United States Patent Application Publication US 2007/0214517 A1 - sequence listing, part 77

SEQ ID NO: 100192 - DNA, 1990 bp, Arabidopsis thaliana
  misc_feature (1)..(1990): Ceres Seq. ID no. 13604573
  misc_feature: MA Experiment ID: 108434 Result: Down-regulated in Transcription
  misc_feature: MA Experiment 108434 PARAMETER Experiment Name: At_Root_Tips_cDNA_P Parameter: Tissue Value: Root Tips
  misc_feature: MA Experiment ID: 108573 Result: Up-regulated in Transcription
  misc_feature: MA Experiment 108573 PARAMETER Experiment Name: At_Drought_cDNA_P Parameter: Timepoint (hr) Value: 6
  misc_feature: MA Experiment 108573 PARAMETER Experiment Name: At_Drought_cDNA_P Parameter: Tissue Value: Aerial
  misc_feature: MA Experiment 108573 PARAMETER Experiment Name: At_Drought_cDNA_P Parameter: Treatment Value: Drought vs. No Drought
  misc_feature: MA Experiment ID: 108585 Result: Up-regulated in Transcription
  misc_feature: MA Experiment 108585 PARAMETER Experiment Name: At_5mM_NaNP_cDNA_P Parameter: Timepoint (hr) Value: 6
  misc_feature: MA Experiment 108585 PARAMETER Experiment Name: At_5mM_NaNP_cDNA_P Parameter: Tissue Value: Aerial
  misc_feature: MA Experiment 108585 PARAMETER Experiment Name: At_5mM_NaNP_cDNA_P Parameter: Treatment Value: null
  misc_feature: MA Experiment ID: 108668 Result: Up-regulated in Transcription
  misc_feature: MA Experiment 108668 PARAMETER Experiment Name: At_2mM_SA_cDNA_P Parameter: Plant Line Value: WS
  misc_feature: MA Experiment 108668 PARAMETER Experiment Name: At_2mM_SA_cDNA_P Parameter: Timepoint (hr) Value: 6
  misc_feature: MA Experiment 108668 PARAMETER Experiment Name: At_2mM_SA_cDNA_P Parameter: Treatment Value: 2mM SA vs. No Treatment
  misc_feature: MA Experiment ID: 20000069 Result: Up-regulated in Transcription
  misc_feature: MA Experiment 20000069 PARAMETER Experiment Name: At_100uM_ABA_Mutants_cDNA_P Parameter: Plant Line Value: CS23
  misc_feature: MA Experiment 20000069 PARAMETER Experiment Name: At_100uM_ABA_Mutants_cDNA_P Parameter: Timepoint (hr) Value: 6
  misc_feature: MA Experiment 20000069 PARAMETER Experiment Name: At_100uM_ABA_Mutants_cDNA_P Parameter: Tissue Value: Aerial
  misc_feature: MA Experiment 20000069 PARAMETER Experiment Name: At_100uM_ABA_Mutants_cDNA_P Parameter: Treatment Value: 100uM ABA vs. No Treatment
  misc_feature: MA Experiment ID: 20000070 Result: Up-regulated in Transcription
  misc_feature: MA Experiment 20000070 PARAMETER Experiment Name: At_100uM_ABA_Mutants_cDNA_P Parameter: Plant Line Value: CS24
  misc_feature: MA Experiment 20000070 PARAMETER Experiment Name: At_100uM_ABA_Mutants_cDNA_P Parameter: Timepoint (hr) Value: 6
  misc_feature: MA Experiment 20000070 PARAMETER Experiment Name: At_100uM_ABA_Mutants_cDNA_P Parameter: Tissue Value: Aerial
  misc_feature: MA Experiment 20000070 PARAMETER Experiment Name: At_100uM_ABA_Mutants_cDNA_P Parameter: Treatment Value: 100uM ABA vs. No Treatment
  misc_feature: MA Experiment ID: 20000071 Result: Up-regulated in Transcription
  misc_feature: MA Experiment 20000071 PARAMETER Experiment Name: At_100uM_ABA_Mutants_cDNA_P Parameter: Plant Line Value: CS8104
  misc_feature: MA Experiment 20000071 PARAMETER Experiment Name: At_100uM_ABA_Mutants_cDNA_P Parameter: Timepoint (hr) Value: 6
  misc_feature: MA Experiment 20000071 PARAMETER Experiment Name: At_100uM_ABA_Mutants_cDNA_P Parameter: Tissue Value: Aerial
  misc_feature: MA Experiment 20000071 PARAMETER Experiment Name: At_100uM_ABA_Mutants_cDNA_P Parameter: Treatment Value: 100uM ABA vs. No Treatment
  misc_feature: MA Experiment ID: 20000072 Result: Up-regulated in Transcription
  misc_feature: MA Experiment 20000072 PARAMETER Experiment Name: At_100uM_ABA_Mutants_cDNA_P Parameter: Plant Line Value: CS8105
  misc_feature: MA Experiment 20000072 PARAMETER Experiment Name: At_100uM_ABA_Mutants_cDNA_P Parameter: Timepoint (hr) Value: 6
  misc_feature: MA Experiment 20000072 PARAMETER Experiment Name: At_100uM_ABA_Mutants_cDNA_P Parameter: Tissue Value: Aerial
  misc_feature: MA Experiment 20000072 PARAMETER Experiment Name: At_100uM_ABA_Mutants_cDNA_P Parameter: Treatment Value: 100uM ABA vs. No Treatment
  misc_feature: MA Experiment ID: 20000086 Result: Up-regulated in Transcription
  misc_feature: MA Experiment 20000086 PARAMETER Experiment Name: At_100uM_ABA_Mutants_cDNA_P Parameter: Plant Line Value: CS22
  misc_feature: MA Experiment 20000086 PARAMETER Experiment Name: At_100uM_ABA_Mutants_cDNA_P Parameter: Timepoint (hr) Value: 6
  misc_feature: MA Experiment 20000086 PARAMETER Experiment Name: At_100uM_ABA_Mutants_cDNA_P Parameter: Tissue Value: Aerial
  misc_feature: MA Experiment 20000086 PARAMETER Experiment Name: At_100uM_ABA_Mutants_cDNA_P Parameter: Treatment Value: 100uM ABA vs. No Treatment
  misc_feature: MA Experiment ID: 20000087 Result: Up-regulated in Transcription
  misc_feature: MA Experiment 20000087 PARAMETER Experiment Name: At_100uM_ABA_Mutants_cDNA_P Parameter: Plant Line Value: WS
  misc_feature: MA Experiment 20000087 PARAMETER Experiment Name: At_100uM_ABA_Mutants_cDNA_P Parameter: Timepoint (hr) Value: 6
  misc_feature: MA Experiment 20000087 PARAMETER Experiment Name: At_100uM_ABA_Mutants_cDNA_P Parameter: Tissue Value: Aerial
  misc_feature: MA Experiment 20000087 PARAMETER Experiment Name: At_100uM_ABA_Mutants_cDNA_P Parameter: Treatment Value: 100uM ABA vs. No Treatment
  misc_feature: MA Experiment ID: 20000088 Result: Up-regulated in Transcription
  misc_feature: MA Experiment 20000088 PARAMETER Experiment Name: At_100uM_ABA_Mutants_cDNA_P Parameter: Plant Line Value: Landsberg
  misc_feature: MA Experiment 20000088 PARAMETER Experiment Name: At_100uM_ABA_Mutants_cDNA_P Parameter: Timepoint (hr) Value: 6
  misc_feature: MA Experiment 20000088 PARAMETER Experiment Name: At_100uM_ABA_Mutants_cDNA_P Parameter: Tissue Value: Aerial
  misc_feature: MA Experiment 20000088 PARAMETER Experiment Name: At_100uM_ABA_Mutants_cDNA_P Parameter: Treatment Value: 100uM ABA vs. No Treatment
  misc_feature: MA Experiment ID: 20000436 Result: Up-regulated in Transcription
  misc_feature: MA Experiment 20000436 PARAMETER Experiment Name: At_Drought_P Parameter: Age (day) Value: 7
  misc_feature: MA Experiment 20000436 PARAMETER Experiment Name: At_Drought_P Parameter: Organism Value: A. thaliana
  misc_feature: MA Experiment 20000436 PARAMETER Experiment Name: At_Drought_P Parameter: Plant Line Value: WS
  misc_feature: MA Experiment 20000436 PARAMETER Experiment Name: At_Drought_P Parameter: Timepoint (hr) Value: 12
  misc_feature: MA Experiment 20000436 PARAMETER Experiment Name: At_Drought_P Parameter: Tissue Value: Whole Plant
  misc_feature: MA Experiment 20000436 PARAMETER Experiment Name: At_Drought_P Parameter: Treatment Value: Drought vs. No Drought
  misc_feature: MA Experiment ID: 20000437 Result: Up-regulated in Transcription
  misc_feature: MA Experiment 20000437 PARAMETER Experiment Name: At_Drought_P Parameter: Age (day) Value: 8
  misc_feature: MA Experiment 20000437 PARAMETER Experiment Name: At_Drought_P Parameter: Organism Value: A. thaliana
  misc_feature: MA Experiment 20000437 PARAMETER Experiment Name: At_Drought_P Parameter: Plant Line Value: WS
  misc_feature: MA Experiment 20000437 PARAMETER Experiment Name: At_Drought_P Parameter: Timepoint (hr) Value: 24
  misc_feature: MA Experiment 20000437 PARAMETER Experiment Name: At_Drought_P Parameter: Tissue Value: Whole Plant
  misc_feature: MA Experiment 20000437 PARAMETER Experiment Name: At_Drought_P Parameter: Treatment Value: Drought vs. No Drought
  misc_feature: MA Experiment ID: 20000439 Result: Up-regulated in Transcription
  misc_feature: MA Experiment 20000439 PARAMETER Experiment Name: At_Roots__P Parameter: Age (day) Value: 14 vs. 21
  misc_feature: MA Experiment 20000439 PARAMETER Experiment Name: At_Roots__P Parameter: Organism Value: A. thaliana
  misc_feature: MA Experiment 20000439 PARAMETER Experiment Name: At_Roots__P Parameter: Tissue Value: Roots vs. Whole Plant
  misc_feature: MA Experiment ID: 20000453 Result: Up-regulated in Transcription
  misc_feature: MA Experiment 20000453 PARAMETER Experiment Name: At_100uM_ABA_P Parameter: Age (day) Value: 15
  misc_feature: MA Experiment 20000453 PARAMETER Experiment Name: At_100uM_ABA_P Parameter: Organism Value: A. thaliana
  misc_feature: MA Experiment 20000453 PARAMETER Experiment Name: At_100uM_ABA_P Parameter: Plant Line Value: WS
  misc_feature: MA Experiment 20000453 PARAMETER Experiment Name: At_100uM_ABA_P Parameter: Timepoint (hr) Value: 24
  misc_feature: MA Experiment 20000453 PARAMETER Experiment Name: At_100uM_ABA_P Parameter: Tissue Value: Aerial
  misc_feature: MA Experiment 20000453 PARAMETER Experiment Name: At_100uM_ABA_P Parameter: Treatment Value: 100uM ABA vs. No Treatment
  misc_feature: MA Experiment ID: 20001905 Result: Up-regulated in Transcription
  misc_feature: MA Experiment 20001905 PARAMETER Experiment Name: At_Drought_Reproduction_P Parameter: Age (day) Value: 40
  misc_feature: MA Experiment 20001905 PARAMETER Experiment Name: At_Drought_Reproduction_P Parameter: Organism Value: A. thaliana
  misc_feature: MA Experiment 20001905 PARAMETER Experiment Name: At_Drought_Reproduction_P Parameter: Plant Line Value: WS
  misc_feature: MA Experiment 20001905 PARAMETER Experiment Name: At_Drought_Reproduction_P Parameter: Timepoint (day) Value: 10
  misc_feature: MA Experiment 20001905 PARAMETER Experiment Name: At_Drought_Reproduction_P Parameter: Tissue Value: Rosettes
  misc_feature: MA Experiment 20001905 PARAMETER Experiment Name: At_Drought_Reproduction_P Parameter: Treatment Value: Drought vs. No Drought
acagactctttcttaatctctctctctttcaaccaaacccctaaacaaaaaaaaaatacattttctgatctctctaaaaatctttctccttcgttaatctcgtgatctctttctttttctatatatggacagaggatggtctggtctcactcttgattcatcttctcttgatcttttaaaccctaatcgtatttctcataagaatcaccgacgtttctcaaatcctttggcgatgtctagaattgacgaagaagatgatcagaagacgagaatatcaaccaacggtagtgaatttaggtttccggtgagtctctcaggtattcgtgatcgtgaagatgaagatttttcatctggcgttgctggagataatgaccgtgaagttcccggcgaagtggatttcttctccgacaagaaatctagggtttgtcgtgaagacgacgaaggatttcgtgtgaagaaggaagaacaagatgatcgaacggacgtaaataccggtttgaatcttcgaacaactggtaatacaaagagtgatgagtcaatgatcgatgatggagaatcttccgaaatggaagataagcgtgcgaaaaatgagttggtgaaattacaagatgagttgaagaaaatgacaatggataatcaaaagcttagagaattgcttacacaagttagcaacagttacacttcacttcagatgcatcttgtttcactaatgcagcaacagcaacaacagaacaataaggtaatagaagctgctgagaagcctgaggagacgatagtaccaaggcaatttattgatttaggccctacgagagcagtaggtgaggccgaggatgtgtcaaattcttcatccgaagatagaactcgttcggggggttcttctgcagccgagaggcgtagtaacgggaagagacttgggcgtgaagaaagccccgaaactgagtccaacaaaattcagaaggtgaattctactaccccgacgacatttgatcaaaccgctgaagctacgatgaggaaagcccgtgtctccgttcgtgcccgatcggaagctccgatgataagcgatggatgtcaatggagaaaatatggccagaagatggccaaagggaatccttgtccgcgggcatattaccgctgcacgatggccacgggctgtcccgttcgcaaacaagttcaacgttgcgcggaagacagatcaattctgattacaacctacgagggaaaccataaccatccgttgccgccagccgcggtagccatggcttctaccaccacggcggcggctaacatgttgctatccgggtcaatgtctagtcacgacgggatgatgaaccctacaaatttactagctagggctgttcttccttgctccacaagcatggcaacaatctcagcctccgcgccgtttccaaccgtcacattagacctcacccactcacctccgcctcctaatggttccaatccttcctcttccgcggctaccaacaacaaccacaactcactgatgcagcggccgcaacaacaacaacagcaaatgacgaacttacctccgggaatgctacctcatgtaataggccaggcattgtataaccaatccaagttctcggggctgcagttctctggtggctctccctcgacggcagcgttttctcagtcacacgcggtggctgatacaataacggcactcacagctgacccgaatttcacggcggctcttgcagccgttatttcttctatgatcaatggtacgaaccaccacgacggcgaaggaaacaacaaaaatcaatagaaaaatattacattttttttttgggtatctacattttttttccaactgggttataggaaacagagagtttatttcattgattcacatttgttctgtttcgtaccaaaatcccagtaaatatacaaaagcaaactatactcaagttcatattcgtaaacactataaatagttacgtaacttaattagcattgcctttaaagcttt

SEQ ID NO: 100193 - protein, 553 aa, Arabidopsis thaliana; identical to SEQ ID NO: 35010
  peptide (1)..(553): Ceres Seq. ID no. 13604574
  misc_feature (311)..(371): Pfam Name: WRKY DNA -binding domain Pfam Description: WRKY DNA -binding domain
  misc_feature (1)..(553): Homolog of NCBI NO: 18407554 NR Description: WRKY family transcription factor [Arabidopsis
  misc_feature (121)..(333): Homolog of NCBI NO: 25404372 NR Description: hypothetical protein F19K23.22 [imported] - thaliana >gi|2160152|gb|AAB60774.1| ESTs
  misc_feature (349)..(553): Homolog of NCBI NO: 25404372 NR Description: hypothetical protein F19K23.22 [imported] - thaliana >gi|2160152|gb|AAB60774.1| ESTs
  misc_feature (37)..(124): Homolog of NCBI NO: 25404372 NR Description: hypothetical protein F19K23.22 [imported] - thaliana >gi|2160152|gb|AAB60774.1| ESTs
  misc_feature (316)..(553): Homolog of NCBI NO: 13506739 NR Description: WRKY DNA-binding protein 6 [Arabidopsis thaliana]
  misc_feature (107)..(552): Homolog of NCBI NO: 34904618 NR Description: putative WRKY DNA binding protein [Oryza sativa
  misc_feature (156)..(552): Homolog of NCBI NO: 5042446 NR Description: putative WRKY DNA binding protein [Oryza sativa
  misc_feature (90)..(552): Homolog of NCBI NO: 11357339 NR Description: hypothetical protein AT4g22070 - Arabidopsis >gi|2961352|emb|CAA18110.1| putative protein [Arabidopsis >gi|7269052|emb|CAB79162.1| putative protein [Arabidopsis
  misc_feature (252)..(552): Homolog of NCBI NO: 18415833 NR Description: WRKY family transcription factor [Arabidopsis >gi|20978775|sp|Q93WT0|WR31_ARATH Probable WRKY transcription
  misc_feature (44)..(552): Homolog of NCBI NO: 15233516 NR Description: WRKY family transcription factor [Arabidopsis >gi|20978795|sp|Q9XEC3|WR42_ARATH Probable WRKY transcription

SEQ ID NO: 100194 - protein, 517 aa, Arabidopsis thaliana; identical to SEQ ID NO: 35011
  peptide (1)..(517): Ceres Seq. ID no. 13604575
  misc_feature (275)..(335): Pfam Name: WRKY DNA -binding domain Pfam Description: WRKY DNA -binding domain
  misc_feature (1)..(517): Homolog of NCBI NO: 18407554 NR Description: WRKY family transcription factor [Arabidopsis
  misc_feature (85)..(297): Homolog of NCBI NO: 25404372 NR Description: hypothetical protein F19K23.22 [imported] - thaliana >gi|2160152|gb|AAB60774.1| ESTs
  misc_feature (313)..(517): Homolog of NCBI NO: 25404372 NR Description: hypothetical protein F19K23.22 [imported] - thaliana >gi|2160152|gb|AAB60774.1| ESTs
  misc_feature (1)..(88): Homolog of NCBI NO: 25404372 NR Description: hypothetical protein F19K23.22 [imported] - thaliana >gi|2160152|gb|AAB60774.1| ESTs
  misc_feature (280)..(517): Homolog of NCBI NO: 13506739 NR Description: WRKY DNA-binding protein 6 [Arabidopsis thaliana]
  misc_feature (71)..(516): Homolog of NCBI NO: 34904618 NR Description: putative WRKY DNA binding protein [Oryza sativa
  misc_feature (120)..(516): Homolog of NCBI NO: 5042446 NR Description: putative WRKY DNA binding protein [Oryza sativa
  misc_feature (54)..(516): Homolog of NCBI NO: 11357339 NR Description: hypothetical protein AT4g22070 - Arabidopsis >gi|2961352|emb|CAA18110.1| putative protein [Arabidopsis >gi|7269052|emb|CAB79162.1| putative protein [Arabidopsis
  misc_feature (216)..(516): Homolog of NCBI NO: 18415833 NR Description: WRKY family transcription factor [Arabidopsis >gi|20978775|sp|Q93WT0|WR31_ARATH Probable WRKY transcription
  misc_feature (8)..(516): Homolog of NCBI NO: 15233516 NR Description: WRKY family transcription factor [Arabidopsis >gi|20978795|sp|Q9XEC3|WR42_ARATH Probable WRKY transcription

SEQ ID NO: 100195 - protein, 415 aa, Arabidopsis thaliana; identical to SEQ ID NO: 35012
  peptide (1)..(415): Ceres Seq. ID no. 13604576
  misc_feature (173)..(233): Pfam Name: WRKY DNA -binding domain Pfam Description: WRKY DNA -binding domain
  misc_feature (1)..(415): Homolog of NCBI NO: 18407554 NR Description: WRKY family transcription factor [Arabidopsis
  misc_feature (1)..(195): Homolog of NCBI NO: 25404372 NR Description: hypothetical protein F19K23.22 [imported] - thaliana >gi|2160152|gb|AAB60774.1| ESTs
  misc_feature (211)..(415): Homolog of NCBI NO: 25404372 NR Description: hypothetical protein F19K23.22 [imported] - thaliana >gi|2160152|gb|AAB60774.1| ESTs
  misc_feature (178)..(415): Homolog of NCBI NO: 13506739 NR Description: WRKY DNA-binding protein 6 [Arabidopsis thaliana]
  misc_feature (1)..(414): Homolog of NCBI NO: 34904618 NR Description: putative WRKY DNA binding protein [Oryza sativa
  misc_feature (18)..(414): Homolog of NCBI NO: 5042446 NR Description: putative WRKY DNA binding protein [Oryza sativa
  misc_feature (1)..(414): Homolog of NCBI NO: 11357339 NR Description: hypothetical protein AT4g22070 - Arabidopsis >gi|2961352|emb|CAA18110.1| putative protein [Arabidopsis >gi|7269052|emb|CAB79162.1| putative protein [Arabidopsis
  misc_feature (114)..(414): Homolog of NCBI NO: 18415833 NR Description: WRKY family transcription factor [Arabidopsis >gi|20978775|sp|Q93WT0|WR31_ARATH Probable WRKY transcription
  misc_feature (1)..(414): Homolog of NCBI NO: 15233516 NR Description: WRKY family transcription factor [Arabidopsis >gi|20978795|sp|Q9XEC3|WR42_ARATH Probable WRKY transcription
  misc_feature (1)..(406): Homolog of NCBI NO: 34894308 NR Description: unnamed protein product [Oryza sativa (japonica group)] >gi|8467950|dbj|BAA96574.1| unnamed protein product

SEQ ID NO: 100196 - DNA, 1762 bp, Arabidopsis thaliana
  misc_feature (1)..(1762): Ceres Seq. ID no. 13604577
  misc_feature: MA Experiment ID: 108461 Result: Up-regulated in Transcription
  misc_feature: MA Experiment 108461 PARAMETER Experiment Name: At_Germinating_Seeds_cDNA_P Parameter: Age (day) Value: 1 vs. 0
  misc_feature: MA Experiment 108461 PARAMETER Experiment Name: At_Germinating_Seeds_cDNA_P Parameter: Tissue Value: Germinating Seeds
  misc_feature: MA Experiment ID: 108607 Result: Up-regulated in Transcription
  misc_feature: MA Experiment 108607 PARAMETER Experiment Name: At_100uM_ABA_cDNA_P Parameter: Timepoint (hr) Value: 4
  misc_feature: MA Experiment 108607 PARAMETER Experiment Name: At_100uM_ABA_cDNA_P Parameter: Tissue Value: Aerial
  misc_feature: MA Experiment 108607 PARAMETER Experiment Name: At_100uM_ABA_cDNA_P Parameter: Treatment Value: 100uM ABA vs. No Treatment
  misc_feature: MA Experiment ID: 20000069 Result: Up-regulated in Transcription
  misc_feature: MA Experiment 20000069 PARAMETER Experiment Name: At_100uM_ABA_Mutants_cDNA_P Parameter: Plant Line Value: CS23
  misc_feature: MA Experiment 20000069 PARAMETER Experiment Name: At_100uM_ABA_Mutants_cDNA_P Parameter: Timepoint (hr) Value: 6
  misc_feature: MA Experiment 20000069 PARAMETER Experiment Name: At_100uM_ABA_Mutants_cDNA_P Parameter: Tissue Value: Aerial
  misc_feature: MA Experiment 20000069 PARAMETER Experiment Name: At_100uM_ABA_Mutants_cDNA_P Parameter: Treatment Value: 100uM ABA vs. No Treatment
  misc_feature: MA Experiment ID: 20000070 Result: Up-regulated in Transcription
  misc_feature: MA Experiment 20000070 PARAMETER Experiment Name: At_100uM_ABA_Mutants_cDNA_P Parameter: Plant Line Value: CS24
  misc_feature: MA Experiment 20000070 PARAMETER Experiment Name: At_100uM_ABA_Mutants_cDNA_P Parameter: Timepoint (hr) Value: 6
  misc_feature: MA Experiment 20000070 PARAMETER Experiment Name: At_100uM_ABA_Mutants_cDNA_P Parameter: Tissue Value: Aerial
  misc_feature: MA Experiment 20000070 PARAMETER Experiment Name: At_100uM_ABA_Mutants_cDNA_P Parameter: Treatment Value: 100uM ABA vs. No Treatment
  misc_feature: MA Experiment ID: 20000071 Result: Up-regulated in Transcription
  misc_feature: MA Experiment 20000071 PARAMETER Experiment Name: At_100uM_ABA_Mutants_cDNA_P Parameter: Plant Line Value: CS8104
  misc_feature: MA Experiment 20000071 PARAMETER Experiment Name: At_100uM_ABA_Mutants_cDNA_P Parameter: Timepoint (hr) Value: 6
  misc_feature: MA Experiment 20000071 PARAMETER Experiment Name: At_100uM_ABA_Mutants_cDNA_P Parameter: Tissue Value: Aerial
  misc_feature: MA Experiment 20000071 PARAMETER Experiment Name: At_100uM_ABA_Mutants_cDNA_P Parameter: Treatment Value: 100uM ABA vs. No Treatment
  misc_feature: MA Experiment ID: 20000072 Result: Up-regulated in Transcription
  misc_feature: MA Experiment 20000072 PARAMETER Experiment Name: At_100uM_ABA_Mutants_cDNA_P Parameter: Plant Line Value: CS8105
  misc_feature: MA Experiment 20000072 PARAMETER Experiment Name: At_100uM_ABA_Mutants_cDNA_P Parameter: Timepoint (hr) Value: 6
  misc_feature: MA Experiment 20000072 PARAMETER Experiment Name: At_100uM_ABA_Mutants_cDNA_P Parameter: Tissue Value: Aerial
  misc_feature: MA Experiment 20000072 PARAMETER Experiment Name: At_100uM_ABA_Mutants_cDNA_P Parameter: Treatment Value: 100uM ABA vs. No Treatment
  misc_feature: MA Experiment ID: 20000086 Result: Up-regulated in Transcription
  misc_feature: MA Experiment 20000086 PARAMETER Experiment Name: At_100uM_ABA_Mutants_cDNA_P Parameter: Plant Line Value: CS22
  misc_feature: MA Experiment 20000086 PARAMETER Experiment Name: At_100uM_ABA_Mutants_cDNA_P Parameter: Timepoint (hr) Value: 6
  misc_feature: MA Experiment 20000086 PARAMETER Experiment Name: At_100uM_ABA_Mutants_cDNA_P Parameter: Tissue Value: Aerial
  misc_feature: MA Experiment 20000086 PARAMETER Experiment Name: At_100uM_ABA_Mutants_cDNA_P Parameter: Treatment Value: 100uM ABA vs. No Treatment
  misc_feature: MA Experiment ID: 20000117 Result: Up-regulated in Transcription
  misc_feature: MA Experiment 20000117 PARAMETER Experiment Name: At_100uM_ABA_Mutants_cDNA_P Parameter: Plant Line Value: Columbia
  misc_feature: MA Experiment 20000117 PARAMETER Experiment Name: At_100uM_ABA_Mutants_cDNA_P Parameter: Timepoint (hr) Value: 6
  misc_feature: MA Experiment 20000117 PARAMETER Experiment Name: At_100uM_ABA_Mutants_cDNA_P Parameter: Tissue Value: Aerial
  misc_feature: MA Experiment 20000117 PARAMETER Experiment Name: At_100uM_ABA_Mutants_cDNA_P Parameter: Treatment Value: 100uM ABA vs. No Treatment
  misc_feature: MA Experiment ID: 20000171 Result: Down-regulated in Transcription
  misc_feature: MA Experiment 20000171 PARAMETER Experiment Name: At_42deg_Heat_P Parameter: Age (day) Value: 14
  misc_feature: MA Experiment 20000171 PARAMETER Experiment Name: At_42deg_Heat_P Parameter: Organism Value: A. thaliana
  misc_feature: MA Experiment 20000171 PARAMETER Experiment Name: At_42deg_Heat_P Parameter: Plant Line Value: WS
  misc_feature: MA Experiment 20000171 PARAMETER Experiment Name: At_42deg_Heat_P Parameter: Temperature (deg C) Value: 42 vs. 22
  misc_feature: MA Experiment 20000171 PARAMETER Experiment Name: At_42deg_Heat_P Parameter: Timepoint (hr) Value: 1
  misc_feature: MA Experiment 20000171 PARAMETER Experiment Name: At_42deg_Heat_P Parameter: Tissue Value: Aerial
  misc_feature: MA Experiment ID: 20000173 Result: Down-regulated in Transcription
  misc_feature: MA Experiment 20000173 PARAMETER Experiment Name: At_42deg_Heat_P Parameter: Age (day) Value: 14
  misc_feature: MA Experiment 20000173 PARAMETER Experiment Name: At_42deg_Heat_P Parameter: Organism Value: A. thaliana
  misc_feature: MA Experiment 20000173 PARAMETER Experiment Name: At_42deg_Heat_P Parameter: Plant Line Value: WS
  misc_feature: MA Experiment 20000173 PARAMETER Experiment Name: At_42deg_Heat_P Parameter: Temperature (deg C) Value: 42 vs. 22
  misc_feature: MA Experiment 20000173 PARAMETER Experiment Name: At_42deg_Heat_P Parameter: Timepoint (hr) Value: 6
  misc_feature: MA Experiment 20000173 PARAMETER Experiment Name: At_42deg_Heat_P Parameter: Tissue Value: Aerial
  misc_feature: MA Experiment ID: 20000184 Result: Down-regulated in Transcription
  misc_feature: MA Experiment 20000184 PARAMETER Experiment Name: At_Shoots__P Parameter: Age (day) Value: 7
  misc_feature: MA Experiment 20000184 PARAMETER Experiment Name: At_Shoots__P Parameter: Tissue Value: Shoots vs. Whole Plant
  misc_feature: MA Experiment ID: 20000436 Result: Up-regulated in Transcription
  misc_feature: MA Experiment 20000436 PARAMETER Experiment Name: At_Drought_P Parameter: Age (day) Value: 7
  misc_feature: MA Experiment 20000436 PARAMETER Experiment Name: At_Drought_P Parameter: Organism Value: A. thaliana
  misc_feature: MA Experiment 20000436 PARAMETER Experiment Name: At_Drought_P Parameter: Plant Line Value: WS
  misc_feature: MA Experiment 20000436 PARAMETER Experiment Name: At_Drought_P Parameter: Timepoint (hr) Value: 12
  misc_feature: MA Experiment 20000436 PARAMETER Experiment Name: At_Drought_P Parameter: Tissue Value: Whole Plant
  misc_feature: MA Experiment 20000436 PARAMETER Experiment Name: At_Drought_P Parameter: Treatment Value: Drought vs. No Drought
  misc_feature: MA Experiment ID: 20000437 Result: Up-regulated in Transcription
  misc_feature: MA Experiment 20000437 PARAMETER Experiment Name: At_Drought_P Parameter: Age (day) Value: 8
  misc_feature: MA Experiment 20000437 PARAMETER Experiment Name: At_Drought_P Parameter: Organism Value: A. thaliana
  misc_feature: MA Experiment 20000437 PARAMETER Experiment Name: At_Drought_P Parameter: Plant Line Value: WS
  misc_feature: MA Experiment 20000437 PARAMETER Experiment Name: At_Drought_P Parameter: Timepoint (hr) Value: 24
  misc_feature: MA Experiment 20000437 PARAMETER Experiment Name: At_Drought_P Parameter: Tissue Value: Whole Plant
  misc_feature: MA Experiment 20000437 PARAMETER Experiment Name: At_Drought_P Parameter: Treatment Value: Drought vs. No Drought
  misc_feature: MA Experiment ID: 20000453 Result: Up-regulated in Transcription
  misc_feature: MA Experiment 20000453 PARAMETER Experiment Name: At_100uM_ABA_P Parameter: Age (day) Value: 15
  misc_feature: MA Experiment 20000453 PARAMETER Experiment Name: At_100uM_ABA_P Parameter: Organism Value: A. thaliana
  misc_feature: MA Experiment 20000453 PARAMETER Experiment Name: At_100uM_ABA_P Parameter: Plant Line Value: WS
  misc_feature: MA Experiment 20000453 PARAMETER Experiment Name: At_100uM_ABA_P Parameter: Timepoint (hr) Value: 24
  misc_feature: MA Experiment 20000453 PARAMETER Experiment Name: At_100uM_ABA_P Parameter: Tissue Value: Aerial
  misc_feature: MA Experiment 20000453 PARAMETER Experiment Name: At_100uM_ABA_P Parameter: Treatment Value: 100uM ABA vs. No Treatment
  misc_feature: MA Experiment ID: 20000495 Result: Up-regulated in Transcription
  misc_feature: MA Experiment 20000495 PARAMETER Experiment Name: At_Guard_Cells_P Parameter: Harvest Date Value: 8/2/2002
  misc_feature: MA Experiment 20000495 PARAMETER Experiment Name: At_Guard_Cells_P Parameter: Organism Value: A. thaliana
  misc_feature: MA Experiment 20000495 PARAMETER Experiment Name: At_Guard_Cells_P Parameter: Tissue Value: Guard Cells vs. Leaves
  misc_feature: MA Experiment ID: 20000794 Result: Up-regulated in Transcription
  misc_feature: MA Experiment 20000794 PARAMETER Experiment Name: At_Petals_P Parameter: Age (day) Value: 23-25 days
  misc_feature: MA Experiment 20000794 PARAMETER Experiment Name: At_Petals_P Parameter: Plant Line Value: WS
  misc_feature: MA Experiment 20000794 PARAMETER Experiment Name: At_Petals_P Parameter: Tissue Value: Petals vs. Whole plant
  misc_feature: MA Experiment ID: 20001554 Result: Up-regulated in Transcription
  misc_feature: MA Experiment 20001554 PARAMETER Experiment Name: At_Drought_Soil_Dry_P Parameter: Age (day) Value: 21
  misc_feature: MA Experiment 20001554 PARAMETER Experiment Name: At_Drought_Soil_Dry_P Parameter: Organism Value: A. thaliana
  misc_feature: MA Experiment 20001554 PARAMETER Experiment Name: At_Drought_Soil_Dry_P Parameter: Plant Line Value: WS
  misc_feature: MA Experiment 20001554 PARAMETER Experiment Name: At_Drought_Soil_Dry_P Parameter: Post Timepoint (hr) Value: None
  misc_feature: MA Experiment 20001554 PARAMETER Experiment Name: At_Drought_Soil_Dry_P Parameter: Post-Treatment Value: None
  misc_feature: MA Experiment 20001554 PARAMETER Experiment Name: At_Drought_Soil_Dry_P Parameter: Timepoint (day) Value: 7
  misc_feature: MA Experiment 20001554 PARAMETER Experiment Name: At_Drought_Soil_Dry_P Parameter: Treatment Value: Drought vs. No Drought
  misc_feature: MA Experiment ID: 20001555 Result: Up-regulated in Transcription
  misc_feature: MA Experiment 20001555 PARAMETER Experiment Name: At_Drought_Soil_Dry_P Parameter: Age (day) Value: 24
  misc_feature: MA Experiment 20001555 PARAMETER Experiment Name: At_Drought_Soil_Dry_P Parameter: Organism Value: A. thaliana
  misc_feature: MA Experiment 20001555 PARAMETER Experiment Name: At_Drought_Soil_Dry_P Parameter: Plant Line Value: WS
  misc_feature: MA Experiment 20001555 PARAMETER Experiment Name: At_Drought_Soil_Dry_P Parameter: Post Timepoint (hr) Value: None
  misc_feature: MA Experiment 20001555 PARAMETER Experiment Name: At_Drought_Soil_Dry_P Parameter: Post-Treatment Value: None
  misc_feature: MA Experiment 20001555 PARAMETER Experiment Name: At_Drought_Soil_Dry_P Parameter: Timepoint (day) Value: 10
  misc_feature: MA Experiment 20001555 PARAMETER Experiment Name: At_Drought_Soil_Dry_P Parameter: Treatment Value: Drought vs. No Drought
  misc_feature: MA Experiment ID: 20001904 Result: Up-regulated in Transcription
  misc_feature: MA Experiment 20001904 PARAMETER Experiment Name: At_Drought_Reproduction_P Parameter: Age (day) Value: 37
  misc_feature: MA Experiment 20001904 PARAMETER Experiment Name: At_Drought_Reproduction_P Parameter: Organism Value: A. thaliana
  misc_feature: MA Experiment 20001904 PARAMETER Experiment Name: At_Drought_Reproduction_P Parameter: Plant Line Value: WS
  misc_feature: MA Experiment 20001904 PARAMETER Experiment Name: At_Drought_Reproduction_P Parameter: Timepoint (day) Value: 7
  misc_feature: MA Experiment 20001904 PARAMETER Experiment Name: At_Drought_Reproduction_P Parameter: Tissue Value: Rosettes
  misc_feature: MA Experiment 20001904 PARAMETER Experiment Name: At_Drought_Reproduction_P Parameter: Treatment Value: Drought vs. No Drought
  misc_feature: MA Experiment ID: 20001905 Result: Up-regulated in Transcription
  misc_feature: MA Experiment 20001905 PARAMETER Experiment Name: At_Drought_Reproduction_P Parameter: Age (day) Value: 40
  misc_feature: MA Experiment 20001905 PARAMETER Experiment Name: At_Drought_Reproduction_P Parameter: Organism Value: A. thaliana
  misc_feature: MA Experiment 20001905 PARAMETER Experiment Name: At_Drought_Reproduction_P Parameter: Plant Line Value: WS
  misc_feature: MA Experiment 20001905 PARAMETER Experiment Name: At_Drought_Reproduction_P Parameter: Timepoint (day) Value: 10
  misc_feature: MA Experiment 20001905 PARAMETER Experiment Name: At_Drought_Reproduction_P Parameter: Tissue Value: Rosettes
  misc_feature: MA Experiment 20001905 PARAMETER Experiment Name: At_Drought_Reproduction_P Parameter: Treatment Value: Drought vs. No Drought
  misc_feature: MA Experiment ID: 20001911 Result: Up-regulated in Transcription
  misc_feature: MA Experiment 20001911 PARAMETER Experiment Name: At_Drought_Reproduction_P Parameter: Age (day) Value: 40
  misc_feature: MA Experiment 20001911 PARAMETER Experiment Name: At_Drought_Reproduction_P Parameter: Organism Value: A. thaliana
  misc_feature: MA Experiment 20001911 PARAMETER Experiment Name: At_Drought_Reproduction_P Parameter: Plant Line Value: WS
  misc_feature: MA Experiment 20001911 PARAMETER Experiment Name: At_Drought_Reproduction_P Parameter: Timepoint (day) Value: 10
  misc_feature: MA Experiment 20001911 PARAMETER Experiment Name: At_Drought_Reproduction_P Parameter: Tissue Value: Flowers
  misc_feature: MA Experiment 20001911 PARAMETER Experiment Name: At_Drought_Reproduction_P Parameter: Treatment Value: Drought vs. No Drought
caacataatgtccattacaaacaacaacagcatcataaatctcatcacgacgaactttcttctctttctccgtcgattcaatcctccacttcccgattccttcctccgccgccggagaaaccttcacaacctccgtctcaaacctaaccatctcctcaatcccaaactccttagcgaaatctttcaaatacgccaaaacttcgccatgactcggaaacctcctcggatctctagacacaccggaacgaaccacgaacgggaaatctctgtatccggtacactctcgtgtaccgttgattcgtagagatctatagacgcttgaatgaacaacggatcgggtcgggtcaacacttaacggatccgattcgacttcatcggtgtagatccaggttcctccgacttgtttttgtttctcgaaaacgaccaccgagtgaccttctcgtcgaagctctcgtgccgctactagacctgcaggtccagcaccgataaccgccacgtggtgtgatctggttggtgataatgcaggtgccatttgtgtgttctttgattagaatctatgaatcacaatcacacacagttgttacaatttatgattacaatgtttttaataatcaatttggtgtgttagaaacttacacgaatctgttattacagacgtagattgccacgttttggttgatagagagaaatgcttttattatataacttgtgtcattgtatttcttctccaccgagacagtgaaacatcaatcaatatgagcaatcatcaaactgtgagatttcttttctctcatttaccattttgcccttccactttcttgatgattgtttgttttttttgtggacagaagcaggtattgaagcaattggagccatggtgtgaacttaaagataaagtggttcttgtgacaggtgcttcatctggtatagggagagagatctgtcttgatctatgcaaagctggttgtaagattgtagcagcagctcgtcgtgttgatcgtctcaactctctctgttctgaaatcaacagctttggtgcaatcggagtccaagccgcagctcttgagctagacgtttcatcagacgcagacactattcgaaaagcggttaaagaagcttgggaaatctttggaacgatcgatgttttgattaacaatgctggaatcagaggcaatgtcaagtctagtttggatttatcaaaagaagaatgggacaaagtctttagaaccaacttgaccggatcttggttaatatccaaatacgtctgccttttgatgcgtgacgctaagcgtgggggctcggtgattaacgtctcgtcgatctctgggcttcatcgcggtttgttgcgcggtggactagcgtatgcttgttccaaaggtggtgttgacaccatgacgaggatgatggctattgagttagctgtttataagatcagagtgaactcgatcgcacctgggattttcaggtcagagatcacacaaggtcttttccagaaagagtggctcgagaaggtaacggaaaagattgtaccattaaagatgcaacagactgtggatccggggcttacatctctcgttcgctatctcattcacgattcttcccaatatgtcaccgggaatacatacatagtcgattccggagctacactccccggtgtgcccattttttcttctctttgaaaatcttagtcaaaatcttctgtgcttgtacatacaccgtgataagaatgatgtcttttccaataaatggcagtactggcatt

SEQ ID NO: 100197 - protein, 307 aa, Arabidopsis thaliana
  peptide (1)..(307): Ceres Seq. ID no. 13604578
  misc_feature (1)..(307): Homolog of NCBI NO: 15221517 NR Description: short-chain dehydrogenase/reductase family protein
  misc_feature (23)..(307): Homolog of NCBI NO: 15222406 NR Description: short-chain dehydrogenase/reductase family protein
  misc_feature (31)..(307): Homolog of NCBI NO: 18410245 NR Description: short-chain dehydrogenase/reductase family [Arabidopsis thaliana] >gi|15028305|gb|AAK76629.1| putative [Arabidopsis thaliana] >gi|19310685|gb|AAL85073.1| putative
  misc_feature (34)..(307): Homolog of NCBI NO: 11250516 NR Description: oxidoreductase-like protein - Arabidopsis thaliana
  misc_feature (21)..(307): Homolog of NCBI NO: 15233243 NR Description: short-chain dehydrogenase/reductase family protein
  misc_feature (27)..(307): Homolog of NCBI NO: 15231362 NR Description: short-chain dehydrogenase/reductase family protein
  misc_feature (32)..(307): Homolog of NCBI NO: 18398539 NR Description: short-chain dehydrogenase/reductase family
  misc_feature (35)..(307): Homolog of NCBI NO: 13549123 NR Description: putative short-chain type alcohol dehydrogenase
  misc_feature (35)..(307): Homolog of NCBI NO: 23451057 NR Description: putative short-chain type alcohol dehydrogenase
  misc_feature (40)..(307): Homolog of NCBI NO: 28411870 NR Description: putative 3-ketoacyl-acyl carrier protein
MSNHQTVRFLFSHLPFCPSTFLMIVCFFCGQKQVLKQLEPWCELKDKVVLVTGASSGIGREICLDLCKAGCKIVAAARRVDRLNSLCSEINSFGAIGVQAAALELDVSSDADTIRKAVKEAWEIFGTIDVLINNAGIRGNVKSSLDLSKEEWDKVFRTNLTGSWLISKYVCLLMRDAKRGGSVINVSSISGLHRGLLRGGLAYACSKGGVDTMTRMMAIELAVYKIRVNSIAPGIFRSEITQGLFQKEWLEKVTEKIVPLKMQQTVDPGLTSLVRYLIHDSSQYVTGNTYIVDSGATLPGVPIFSSL

SEQ ID NO: 100198 - protein, 285 aa, Arabidopsis thaliana
  peptide (1)..(285): Ceres Seq. ID no. 13604579
  misc_feature (1)..(285): Homolog of NCBI NO: 15221517 NR Description: short-chain dehydrogenase/reductase family protein
  misc_feature (1)..(285): Homolog of NCBI NO: 15222406 NR Description: short-chain dehydrogenase/reductase family protein
  misc_feature (9)..(285): Homolog of NCBI NO: 18410245 NR Description: short-chain dehydrogenase/reductase family [Arabidopsis thaliana] >gi|15028305|gb|AAK76629.1| putative [Arabidopsis thaliana] >gi|19310685|gb|AAL85073.1| putative
  misc_feature (12)..(285): Homolog of NCBI NO: 11250516 NR Description: oxidoreductase-like protein - Arabidopsis thaliana
  misc_feature (1)..(285): Homolog of NCBI NO: 15233243 NR Description: short-chain dehydrogenase/reductase family protein
  misc_feature (5)..(285): Homolog of NCBI NO: 15231362 NR Description: short-chain dehydrogenase/reductase family protein
  misc_feature (10)..(285): Homolog of NCBI NO: 18398539 NR Description: short-chain dehydrogenase/reductase family
  misc_feature (13)..(285): Homolog of NCBI NO: 13549123 NR Description: putative short-chain type alcohol dehydrogenase
  misc_feature (13)..(285): Homolog of NCBI NO: 23451057 NR Description: putative short-chain type alcohol dehydrogenase
  misc_feature (18)..(285): Homolog of NCBI NO: 28411870 NR Description: putative 3-ketoacyl-acyl carrier protein
MIVCFFCGQKQVLKQLEPWCELKDKVVLVTGASSGIGREICLDLCKAGCKIVAAARRVDRLNSLCSEINSFGAIGVQAAALELDVSSDADTIRKAVKEAWEIFGTIDVLINNAGIRGNVKSSLDLSKEEWDKVFRTNLTGSWLISKYVCLLMRDAKRGGSVINVSSISGLHRGLLRGGLAYACSKGGVDTMTRMMAIELAVYKIRVNSIAPGIFRSEITQGLFQKEWLEKVTEKIVPLKMQQTVDPGLTSLVRYLIHDSSQYVTGNTYIVDSGATLPGVPIFSSL

SEQ ID NO: 100199 - DNA, 998 bp, Arabidopsis thaliana
  misc_feature (1)..(998): Ceres Seq. ID no. 13604580
  misc_feature: MA Experiment ID: 108461 Result: Down-regulated in Transcription
  misc_feature: MA Experiment 108461 PARAMETER Experiment Name: At_Germinating_Seeds_cDNA_P Parameter: Age (day) Value: 1 vs. 0
  misc_feature: MA Experiment 108461 PARAMETER Experiment Name: At_Germinating_Seeds_cDNA_P Parameter: Tissue Value: Germinating Seeds
  misc_feature: MA Experiment ID: 108488 Result: Down-regulated in Transcription
  misc_feature: MA Experiment ID: 108574 Result: Up-regulated in Transcription
  misc_feature: MA Experiment 108574 PARAMETER Experiment Name: At_Wounding__cDNA_P Parameter: Timepoint (hr) Value: 1
  misc_feature: MA Experiment 108574 PARAMETER Experiment Name: At_Wounding__cDNA_P Parameter: Tissue Value: Aerial
  misc_feature: MA Experiment 108574 PARAMETER Experiment Name: At_Wounding__cDNA_P Parameter: Treatment Value: Wounding vs. No Wounding
  misc_feature: MA Experiment ID: 108576 Result: Up-regulated in Transcription
  misc_feature: MA Experiment 108576 PARAMETER Experiment Name: At_42deg_Heat_cDNA_P Parameter: Temperature (deg C) Value: 42 vs. 22
  misc_feature: MA Experiment 108576 PARAMETER Experiment Name: At_42deg_Heat_cDNA_P Parameter: Timepoint (hr) Value: 1
  misc_feature: MA Experiment 108576 PARAMETER Experiment Name: At_42deg_Heat_cDNA_P Parameter: Tissue Value: Aerial
  misc_feature: MA Experiment ID: 108585 Result: Up-regulated in Transcription
  misc_feature: MA Experiment 108585 PARAMETER Experiment Name: At_5mM_NaNP_cDNA_P Parameter: Timepoint (hr) Value: 6
  misc_feature: MA Experiment 108585 PARAMETER Experiment Name: At_5mM_NaNP_cDNA_P Parameter: Tissue Value: Aerial
  misc_feature: MA Experiment 108585 PARAMETER Experiment Name: At_5mM_NaNP_cDNA_P Parameter: Treatment Value: null
  misc_feature: MA Experiment ID: 108595 Result: Up-regulated in Transcription
  misc_feature: MA Experiment 108595 PARAMETER Experiment Name: At_Ler-pi_Ovule_cDNA_P Parameter: Plant Line Value: null
  misc_feature: MA Experiment ID: 108607 Result: Up-regulated in Transcription
  misc_feature: MA Experiment 108607 PARAMETER Experiment Name: At_100uM_ABA_cDNA_P Parameter: Timepoint (hr) Value: 4
  misc_feature: MA Experiment 108607 PARAMETER Experiment Name: At_100uM_ABA_cDNA_P Parameter: Tissue Value: Aerial
  misc_feature: MA Experiment 108607 PARAMETER Experiment Name: At_100uM_ABA_cDNA_P Parameter: Treatment Value: 100uM ABA vs. No Treatment
  misc_feature: MA Experiment ID: 108608 Result: Up-regulated in Transcription
  misc_feature: MA Experiment 108608 PARAMETER Experiment Name: At_100uM_ABA_cDNA_P Parameter: Timepoint (hr) Value: 1
  misc_feature: MA Experiment 108608 PARAMETER Experiment Name: At_100uM_ABA_cDNA_P Parameter: Tissue Value: Aerial
  misc_feature: MA Experiment 108608 PARAMETER Experiment Name: At_100uM_ABA_cDNA_P Parameter: Treatment Value: 100uM ABA vs. No Treatment
  misc_feature: MA Experiment ID: 108667 Result: Up-regulated in Transcription
  misc_feature: MA Experiment 108667 PARAMETER Experiment Name: At_2mM_SA_cDNA_P Parameter: Plant Line Value: WS
  misc_feature: MA Experiment 108667 PARAMETER Experiment Name: At_2mM_SA_cDNA_P Parameter: Timepoint (hr) Value: 1
  misc_feature: MA Experiment 108667 PARAMETER Experiment Name: At_2mM_SA_cDNA_P Parameter: Treatment Value: 2mM SA vs. No Treatment
  misc_feature: MA Experiment ID: 20000069 Result: Up-regulated in Transcription
  misc_feature: MA Experiment 20000069 PARAMETER Experiment Name: At_100uM_ABA_Mutants_cDNA_P Parameter: Plant Line Value: CS23
  misc_feature: MA Experiment 20000069 PARAMETER Experiment Name: At_100uM_ABA_Mutants_cDNA_P Parameter: Timepoint (hr) Value: 6
  misc_feature: MA Experiment 20000069 PARAMETER Experiment Name: At_100uM_ABA_Mutants_cDNA_P Parameter: Tissue Value: Aerial
  misc_feature: MA Experiment 20000069 PARAMETER Experiment Name: At_100uM_ABA_Mutants_cDNA_P Parameter: Treatment Value: 100uM ABA vs. No Treatment
  misc_feature: MA Experiment ID: 20000070 Result: Up-regulated in Transcription
  misc_feature: MA Experiment 20000070 PARAMETER Experiment Name: At_100uM_ABA_Mutants_cDNA_P Parameter: Plant Line Value: CS24
  misc_feature: MA Experiment 20000070 PARAMETER Experiment Name: At_100uM_ABA_Mutants_cDNA_P Parameter: Timepoint (hr) Value: 6
  misc_feature: MA Experiment 20000070 PARAMETER Experiment Name: At_100uM_ABA_Mutants_cDNA_P Parameter: Tissue Value: Aerial
  misc_feature: MA Experiment 20000070 PARAMETER Experiment Name: At_100uM_ABA_Mutants_cDNA_P Parameter: Treatment Value: 100uM ABA vs. No Treatment
  misc_feature: MA Experiment ID: 20000071 Result: Up-regulated in Transcription
  misc_feature: MA Experiment 20000071 PARAMETER Experiment Name: At_100uM_ABA_Mutants_cDNA_P Parameter: Plant Line Value: CS8104
  misc_feature: MA Experiment 20000071 PARAMETER Experiment Name: At_100uM_ABA_Mutants_cDNA_P Parameter: Timepoint (hr) Value: 6
  misc_feature: MA Experiment 20000071 PARAMETER Experiment Name: At_100uM_ABA_Mutants_cDNA_P Parameter: Tissue Value: Aerial
  misc_feature: MA Experiment 20000071 PARAMETER Experiment Name: At_100uM_ABA_Mutants_cDNA_P Parameter: Treatment Value: 100uM ABA vs. No Treatment
  misc_feature: MA Experiment ID: 20000072 Result: Up-regulated in Transcription
  misc_feature: MA Experiment 20000072 PARAMETER Experiment Name: At_100uM_ABA_Mutants_cDNA_P Parameter: Plant Line Value: CS8105
  misc_feature: MA Experiment 20000072 PARAMETER Experiment Name: At_100uM_ABA_Mutants_cDNA_P Parameter: Timepoint (hr) Value: 6
  misc_feature: MA Experiment 20000072 PARAMETER Experiment Name: At_100uM_ABA_Mutants_cDNA_P Parameter: Tissue Value: Aerial
  misc_feature: MA Experiment 20000072 PARAMETER Experiment Name: At_100uM_ABA_Mutants_cDNA_P Parameter: Treatment Value: 100uM ABA vs. No Treatment
  misc_feature: MA Experiment ID: 20000087 Result: Up-regulated in Transcription
  misc_feature: MA Experiment 20000087 PARAMETER Experiment Name: At_100uM_ABA_Mutants_cDNA_P Parameter: Plant Line Value: WS
  misc_feature: MA Experiment 20000087 PARAMETER Experiment Name: At_100uM_ABA_Mutants_cDNA_P Parameter: Timepoint (hr) Value: 6
  misc_feature: MA Experiment 20000087 PARAMETER Experiment Name: At_100uM_ABA_Mutants_cDNA_P Parameter: Tissue Value: Aerial
  misc_feature: MA Experiment 20000087 PARAMETER Experiment Name: At_100uM_ABA_Mutants_cDNA_P Parameter: Treatment Value: 100uM ABA vs. No Treatment
  misc_feature: MA Experiment ID: 20000088 Result: Up-regulated in Transcription
  misc_feature: MA Experiment 20000088 PARAMETER Experiment Name: At_100uM_ABA_Mutants_cDNA_P Parameter: Plant Line Value: Landsberg
  misc_feature: MA Experiment 20000088 PARAMETER Experiment Name: At_100uM_ABA_Mutants_cDNA_P Parameter: Timepoint (hr) Value: 6
  misc_feature: MA Experiment 20000088 PARAMETER Experiment Name: At_100uM_ABA_Mutants_cDNA_P Parameter: Tissue Value: Aerial
  misc_feature: MA Experiment 20000088 PARAMETER Experiment Name: At_100uM_ABA_Mutants_cDNA_P Parameter: Treatment Value: 100uM ABA vs. No Treatment
  misc_feature: MA Experiment ID: 20000093 Result: Up-regulated in Transcription
  misc_feature: MA Experiment 20000093 PARAMETER Experiment Name: At_42deg_Heat_cDNA_P Parameter: Temperature (deg C) Value: 42 vs. 22
  misc_feature: MA Experiment 20000093 PARAMETER Experiment Name: At_42deg_Heat_cDNA_P Parameter: Timepoint (hr) Value: 0.5
  misc_feature: MA Experiment 20000093 PARAMETER Experiment Name: At_42deg_Heat_cDNA_P Parameter: Tissue Value: Aerial
  misc_feature: MA Experiment ID: 20000112 Result: Up-regulated in Transcription
  misc_feature: MA Experiment 20000112 PARAMETER Experiment Name: At_42deg_Heat_cDNA_P Parameter: Temperature (deg C) Value: 42 vs. 22
  misc_feature: MA Experiment 20000112 PARAMETER Experiment Name: At_42deg_Heat_cDNA_P Parameter: Timepoint (hr) Value: 2
  misc_feature: MA Experiment 20000112 PARAMETER Experiment Name: At_42deg_Heat_cDNA_P Parameter: Tissue Value: Aerial
  misc_feature: MA Experiment ID: 20000117 Result: Up-regulated in Transcription
  misc_feature: MA Experiment 20000117 PARAMETER Experiment Name: At_100uM_ABA_Mutants_cDNA_P Parameter: Plant Line Value: Columbia
  misc_feature: MA Experiment 20000117 PARAMETER Experiment Name: At_100uM_ABA_Mutants_cDNA_P Parameter: Timepoint (hr) Value: 6
  misc_feature: MA Experiment 20000117 PARAMETER Experiment Name: At_100uM_ABA_Mutants_cDNA_P Parameter: Tissue Value: Aerial
  misc_feature: MA Experiment 20000117 PARAMETER Experiment Name: At_100uM_ABA_Mutants_cDNA_P Parameter: Treatment Value: 100uM ABA vs. No Treatment
  misc_feature: MA Experiment ID: 20000144 Result: Up-regulated in Transcription
  misc_feature: MA Experiment 20000144 PARAMETER Experiment Name: At_42deg_Heat_cDNA_P Parameter: Temperature (deg C) Value: 42 vs. 22
  misc_feature: MA Experiment 20000144 PARAMETER Experiment Name: At_42deg_Heat_cDNA_P Parameter: Timepoint (hr) Value: 1
  misc_feature: MA Experiment 20000144 PARAMETER Experiment Name: At_42deg_Heat_cDNA_P Parameter: Tissue Value: Aerial
  misc_feature: MA Experiment ID: 20000185 Result: Up-regulated in Transcription
  misc_feature: MA Experiment 20000185 PARAMETER Experiment Name: At_Roots__P Parameter: Age (day) Value: 7 vs. 21
  misc_feature: MA Experiment 20000185 PARAMETER Experiment Name: At_Roots__P Parameter: Organism Value: A. thaliana
  misc_feature: MA Experiment 20000185 PARAMETER Experiment Name: At_Roots__P Parameter: Tissue Value: Roots vs. Whole Plant
  misc_feature: MA Experiment ID: 20000224 Result: Up-regulated in Transcription
  misc_feature: MA Experiment ID: 20000286 Result: Up-regulated in Transcription
  misc_feature: MA Experiment 20000286 PARAMETER Experiment Name: At_Open_Flower_P Parameter: Age (day) Value: 21
  misc_feature: MA Experiment 20000286 PARAMETER Experiment Name: At_Open_Flower_P Parameter: Plant Line Value: WS
  misc_feature: MA Experiment 20000286 PARAMETER Experiment Name: At_Open_Flower_P Parameter: Tissue Value: Half Open vs. Whole Plant
  misc_feature: MA Experiment ID: 20001555 Result: Up-regulated in Transcription
  misc_feature: MA Experiment 20001555 PARAMETER Experiment Name: At_Drought_Soil_Dry_P Parameter: Age (day) Value: 24
  misc_feature: MA Experiment 20001555 PARAMETER Experiment Name: At_Drought_Soil_Dry_P Parameter: Organism Value: A. thaliana
  misc_feature: MA Experiment 20001555 PARAMETER Experiment Name: At_Drought_Soil_Dry_P Parameter: Plant Line Value: WS
  misc_feature: MA Experiment 20001555 PARAMETER Experiment Name: At_Drought_Soil_Dry_P Parameter: Post Timepoint (hr) Value: None
  misc_feature: MA Experiment 20001555 PARAMETER Experiment Name: At_Drought_Soil_Dry_P Parameter: Post-Treatment Value: None
  misc_feature: MA Experiment 20001555 PARAMETER Experiment Name: At_Drought_Soil_Dry_P Parameter: Timepoint (day) Value: 10
  misc_feature: MA Experiment 20001555 PARAMETER Experiment Name: At_Drought_Soil_Dry_P Parameter: Treatment Value: Drought vs. No Drought
  misc_feature: MA Experiment ID: 20001904 Result: Up-regulated in Transcription
  misc_feature: MA Experiment 20001904 PARAMETER Experiment Name: At_Drought_Reproduction_P Parameter: Age (day) Value: 37
  misc_feature: MA Experiment 20001904 PARAMETER Experiment Name: At_Drought_Reproduction_P Parameter: Organism Value: A. thaliana
  misc_feature: MA Experiment 20001904 PARAMETER Experiment Name: At_Drought_Reproduction_P Parameter: Plant Line Value: WS
  misc_feature: MA Experiment 20001904 PARAMETER Experiment Name: At_Drought_Reproduction_P Parameter: Timepoint (day) Value: 7
  misc_feature: MA Experiment 20001904 PARAMETER Experiment Name: At_Drought_Reproduction_P Parameter: Tissue Value: Rosettes
  misc_feature: MA Experiment 20001904 PARAMETER Experiment Name: At_Drought_Reproduction_P Parameter: Treatment Value: Drought vs. No Drought
  misc_feature: MA Experiment ID: 20001905 Result: Up-regulated in Transcription
  misc_feature: MA Experiment 20001905 PARAMETER Experiment Name: At_Drought_Reproduction_P Parameter: Age (day) Value: 40
  misc_feature: MA Experiment 20001905 PARAMETER Experiment Name: At_Drought_Reproduction_P Parameter: Organism Value: A. thaliana
  misc_feature: MA Experiment 20001905 PARAMETER Experiment Name: At_Drought_Reproduction_P Parameter: Plant Line Value: WS
  misc_feature: MA Experiment 20001905 PARAMETER Experiment Name: At_Drought_Reproduction_P Parameter: Timepoint (day) Value: 10
  misc_feature: MA Experiment 20001905 PARAMETER Experiment Name: At_Drought_Reproduction_P Parameter: Tissue Value: Rosettes
  misc_feature: MA Experiment 20001905 PARAMETER Experiment Name: At_Drought_Reproduction_P Parameter: Treatment Value: Drought vs. No Drought
atttaaaacccttatttaaattatatagaaaaaaaaaaggtcaagtagtcttctattatttactagtataacctctagaaacatcatcaccacattcctggctaatatccttcatctagaacaattattaacgaatcaaaataccaaaaaacaaagcacctcattgactattaaattagtactaatacattaattaagttattattcctatatataaatctcacccattctccaccttatcatcacaatccaaaactctctctctctctctctctctgtctcttgtcttatcatttatctctctaacggcgaggcaatgggttttccggtgggatattctgagctacttctcccaaaaatctttttctacttgttatctttcttaggtttgatacgtaaactcatctccacaatgttcaagatcattggtctaccagatttcttagaacctgaaccggtttcaacctcatggcccgacccaccacccacgttgaccaaacctgactcagcagcaatactagccggagagatgttaccggttgttcgattctcggatataaaccgaccggaatccgagtgttgcgcagtgtgtctctacgatttcgagaacgacgacgagatccgacggctgacgaattgtcgacatatatttcatcggggatgtttggaccgttggatgatgggttataatcagatgacgtgtccactttgtcgtacacagtttatacctgatcatcttcaactggagtttaatcaaaggctctggtctcaatcttctgctgtttcttctcaacttcttgatgaatcatcatcttaggacgtattaaatctttgtccaaacaaaaaaaaaagacatattaaatcctttttttttggtactttcattgggaattgggtttggtgtgagatcgatgtaaatattaaacaaaaaaaaaaaggtagtggttacaggttaatgaaaaaagaaagaagaagaaaatttgtacttatccatccct

SEQ ID NO: 100200 - protein, 166 aa, Arabidopsis thaliana; identical to SEQ ID NO: 25098
  peptide (1)..(166): Ceres Seq. ID no. 13604581
  misc_feature (89)..(132): Pfam Name: Zinc finger, C3HC4 type (RING finger) Pfam Description: Zinc finger, C3HC4 type (RING finger)
  misc_feature (1)..(166): Homolog of NCBI NO: 15222553 NR Description: RING-H2 finger protein, putative [Arabidopsis >gi|25404448|pir||E96663 probable RING zinc finger protein
  misc_feature (1)..(157): Homolog of NCBI NO: 15238072 NR Description: RING-H2 zinc finger protein, putative
  misc_feature (1)..(157): Homolog of NCBI NO: 21554155 NR Description: RING zinc finger protein-like [Arabidopsis
  misc_feature (1)..(153): Homolog of NCBI NO: 15233117 NR Description: BRH1 RING finger protein [Arabidopsis thaliana]
  misc_feature (1)..(154): Homolog of NCBI NO: 11358776 NR Description: RING-H2 finger protein RHA1a [imported] -
  misc_feature (1)..(153): Homolog of NCBI NO: 11358777 NR Description: RING-H2 finger protein RHA1b [imported] -
  misc_feature (1)..(153): Homolog of NCBI NO: 15233350 NR Description: RING-H2 finger protein RHA1b [Arabidopsis
  misc_feature (1)..(154): Homolog of NCBI NO: 15233352 NR Description: RING-H2 finger protein, putative [Arabidopsis
  misc_feature (66)..(164): Homolog of NCBI NO: 32488512 NR Description: OSJNBa0011J08.19 [Oryza sativa (japonica
  misc_feature (1)..(44): Homolog of NCBI NO: 32488512 NR Description: OSJNBa0011J08.19 [Oryza sativa (japonica

SEQ ID NO: 100201 - protein, 134 aa, Arabidopsis thaliana; identical to SEQ ID NO: 25099
  peptide (1)..(134): Ceres Seq. ID no. 13604582
  misc_feature (57)..(100): Pfam Name: Zinc finger, C3HC4 type (RING finger) Pfam Description: Zinc finger, C3HC4 type (RING finger)
  misc_feature (1)..(134): Homolog of NCBI NO: 15222553 NR Description: RING-H2 finger protein, putative [Arabidopsis >gi|25404448|pir||E96663 probable RING zinc finger protein
  misc_feature (1)..(125): Homolog of NCBI NO: 15238072 NR Description: RING-H2 zinc finger protein, putative
  misc_feature (1)..(125): Homolog of NCBI NO: 21554155 NR Description: RING zinc finger protein-like [Arabidopsis
  misc_feature (1)..(121): Homolog of NCBI NO: 15233117 NR Description: BRH1 RING finger protein [Arabidopsis thaliana]
  misc_feature (1)..(122): Homolog of NCBI NO: 11358776 NR Description: RING-H2 finger protein RHA1a [imported] -
  misc_feature (1)..(121): Homolog of NCBI NO: 11358777 NR Description: RING-H2 finger protein RHA1b [imported] -
  misc_feature (1)..(121): Homolog of NCBI NO: 15233350 NR Description: RING-H2 finger protein RHA1b [Arabidopsis
  misc_feature (1)..(122): Homolog of NCBI NO: 15233352 NR Description: RING-H2 finger protein, putative [Arabidopsis
  misc_feature (34)..(132): Homolog of NCBI NO: 32488512 NR Description: OSJNBa0011J08.19 [Oryza sativa (japonica
  misc_feature (1)..(12): Homolog of NCBI NO: 32488512 NR Description: OSJNBa0011J08.19 [Oryza sativa (japonica

SEQ ID NO: 100202 - protein, 95 aa, Arabidopsis thaliana; identical to SEQ ID NO: 44771
  peptide (1)..(95): Ceres Seq. ID no. 13604583
  misc_feature (18)..(61): Pfam Name: Zinc finger, C3HC4 type (RING finger) Pfam Description: Zinc finger, C3HC4 type (RING finger)
  misc_feature (1)..(95): Homolog of NCBI NO: 15222553 NR Description: RING-H2 finger protein, putative [Arabidopsis >gi|25404448|pir||E96663 probable RING zinc finger protein
  misc_feature (1)..(86): Homolog of NCBI NO: 15238072 NR Description: RING-H2 zinc finger protein, putative
  misc_feature (1)..(86): Homolog of NCBI NO: 21554155 NR Description: RING zinc finger protein-like [Arabidopsis
  misc_feature (1)..(82): Homolog of NCBI NO: 15233117 NR Description: BRH1 RING finger protein [Arabidopsis thaliana]
  misc_feature (1)..(83): Homolog of NCBI NO: 11358776 NR Description: RING-H2 finger protein RHA1a [imported] -
  misc_feature (1)..(82): Homolog of NCBI NO: 11358777 NR Description: RING-H2 finger protein RHA1b [imported] -
  misc_feature (1)..(82): Homolog of NCBI NO: 15233350 NR Description: RING-H2 finger protein RHA1b [Arabidopsis
  misc_feature (1)..(83): Homolog of NCBI NO: 15233352 NR Description: RING-H2 finger protein, putative [Arabidopsis
  misc_feature (1)..(93): Homolog of NCBI NO: 32488512 NR Description: OSJNBa0011J08.19 [Oryza sativa (japonica
  misc_feature (1)..(67): Homolog of NCBI NO: 34897812 NR Description: P0514G12.26 [Oryza sativa (japonica

SEQ ID NO: 100203 - DNA, 1143 bp, Arabidopsis thaliana
  misc_feature (1)..(1143): Ceres Seq. ID no. 13604584
  misc_feature: MA Experiment ID: 108434 Result: Up-regulated in Transcription
  misc_feature: MA Experiment 108434 PARAMETER Experiment Name: At_Root_Tips_cDNA_P Parameter: Tissue Value: Root Tips
  misc_feature: MA Experiment ID: 108461 Result: Down-regulated in Transcription
  misc_feature: MA Experiment 108461 PARAMETER Experiment Name: At_Germinating_Seeds_cDNA_P Parameter: Age (day) Value: 1 vs. 0
  misc_feature: MA Experiment 108461 PARAMETER Experiment Name: At_Germinating_Seeds_cDNA_P Parameter: Tissue Value: Germinating Seeds
  misc_feature: MA Experiment ID: 108462 Result: Down-regulated in Transcription
  misc_feature: MA Experiment 108462 PARAMETER Experiment Name: At_Germinating_Seeds_cDNA_P Parameter: Age (day) Value: 2 vs. 0
  misc_feature: MA Experiment 108462 PARAMETER Experiment Name: At_Germinating_Seeds_cDNA_P Parameter: Tissue Value: Germinating Seeds
  misc_feature: MA Experiment ID: 108463 Result: Down-regulated in Transcription
  misc_feature: MA Experiment 108463 PARAMETER Experiment Name: At_Germinating_Seeds_cDNA_P Parameter: Age (day) Value: 3 vs. 0
  misc_feature: MA Experiment 108463 PARAMETER Experiment Name: At_Germinating_Seeds_cDNA_P Parameter: Tissue Value: Germinating Seeds
  misc_feature: MA Experiment ID: 108464 Result: Down-regulated in Transcription
  misc_feature: MA Experiment 108464 PARAMETER Experiment Name: At_Germinating_Seeds_cDNA_P Parameter: Age (day) Value: 4 vs. 0
  misc_feature: MA Experiment 108464 PARAMETER Experiment Name: At_Germinating_Seeds_cDNA_P Parameter: Tissue Value: Germinating Seeds
  misc_feature: MA Experiment ID: 108573 Result: Down-regulated in Transcription
  misc_feature: MA Experiment 108573 PARAMETER Experiment Name: At_Drought_cDNA_P Parameter: Timepoint (hr) Value: 6
  misc_feature: MA Experiment 108573 PARAMETER Experiment Name: At_Drought_cDNA_P Parameter: Tissue Value: Aerial
  misc_feature: MA Experiment 108573 PARAMETER Experiment Name: At_Drought_cDNA_P Parameter: Treatment Value: Drought vs. No Drought
  misc_feature: MA Experiment ID: 20000090 Result: Up-regulated in Transcription
  misc_feature: MA Experiment ID: 20000111 Result: Up-regulated in Transcription
  misc_feature: MA Experiment 20000111 PARAMETER Experiment Name: At_42deg_Heat_cDNA_P Parameter: Temperature (deg C) Value: 42 vs. 22
  misc_feature: MA Experiment 20000111 PARAMETER Experiment Name: At_42deg_Heat_cDNA_P Parameter: Timepoint (hr) Value: 6
  misc_feature: MA Experiment 20000111 PARAMETER Experiment Name: At_42deg_Heat_cDNA_P Parameter: Tissue Value: Aerial
  misc_feature: MA Experiment ID: 20000113 Result: Up-regulated in Transcription
  misc_feature: MA Experiment 20000113 PARAMETER Experiment Name: At_42deg_Heat_cDNA_P Parameter: Temperature (deg C) Value: 42 vs. 22
  misc_feature: MA Experiment 20000113 PARAMETER Experiment Name: At_42deg_Heat_cDNA_P Parameter: Timepoint (hr) Value: 8
  misc_feature: MA Experiment 20000113 PARAMETER Experiment Name: At_42deg_Heat_cDNA_P Parameter: Tissue Value: Aerial
  misc_feature: MA Experiment ID: 20000171 Result: Up-regulated in Transcription
  misc_feature: MA Experiment 20000171 PARAMETER Experiment Name: At_42deg_Heat_P Parameter: Age (day) Value: 14
  misc_feature: MA Experiment 20000171 PARAMETER Experiment Name: At_42deg_Heat_P Parameter: Organism Value: A. thaliana
  misc_feature: MA Experiment 20000171 PARAMETER Experiment Name: At_42deg_Heat_P Parameter: Plant Line Value: WS
  misc_feature: MA Experiment 20000171 PARAMETER Experiment Name: At_42deg_Heat_P Parameter: Temperature (deg C) Value: 42 vs. 22
  misc_feature: MA Experiment 20000171 PARAMETER Experiment Name: At_42deg_Heat_P Parameter: Timepoint (hr) Value: 1
  misc_feature: MA Experiment 20000171 PARAMETER Experiment Name: At_42deg_Heat_P Parameter: Tissue Value: Aerial
  misc_feature: MA Experiment ID: 20000173 Result: Up-regulated in Transcription
  misc_feature: MA Experiment 20000173 PARAMETER Experiment Name: At_42deg_Heat_P Parameter: Age (day) Value: 14
  misc_feature: MA Experiment 20000173 PARAMETER Experiment Name: At_42deg_Heat_P Parameter: Organism Value: A. thaliana
  misc_feature: MA Experiment 20000173 PARAMETER Experiment Name: At_42deg_Heat_P Parameter: Plant Line Value: WS
  misc_feature: MA Experiment 20000173 PARAMETER Experiment Name: At_42deg_Heat_P Parameter: Temperature (deg C) Value: 42 vs. 22
  misc_feature: MA Experiment 20000173 PARAMETER Experiment Name: At_42deg_Heat_P Parameter: Timepoint (hr) Value: 6
  misc_feature: MA Experiment 20000173 PARAMETER Experiment Name: At_42deg_Heat_P Parameter: Tissue Value: Aerial
  misc_feature: MA Experiment ID: 20001558 Result: Up-regulated in Transcription
  misc_feature: MA Experiment 20001558 PARAMETER Experiment Name: At_Drought_Soil_Dry_P Parameter: Age (day) Value: 27
  misc_feature: MA Experiment 20001558 PARAMETER Experiment Name: At_Drought_Soil_Dry_P Parameter: Organism Value: A. thaliana
  misc_feature: MA Experiment 20001558 PARAMETER Experiment Name: At_Drought_Soil_Dry_P Parameter: Plant Line Value: WS
  misc_feature: MA Experiment 20001558 PARAMETER Experiment Name: At_Drought_Soil_Dry_P Parameter: Post Timepoint (hr) Value: 6
  misc_feature: MA Experiment 20001558 PARAMETER Experiment Name: At_Drought_Soil_Dry_P Parameter: Post-Treatment Value: Re-Water vs. No Drought
  misc_feature: MA Experiment 20001558 PARAMETER Experiment Name: At_Drought_Soil_Dry_P Parameter: Timepoint (day) Value: 13
  misc_feature: MA Experiment 20001558 PARAMETER Experiment Name: At_Drought_Soil_Dry_P Parameter: Treatment Value: Drought vs. No Drought
  misc_feature: MA Experiment ID: 20001757 Result: Up-regulated in Transcription
  misc_feature: MA Experiment 20001757 PARAMETER Experiment Name: At_50mM_NH4NO3_L-to-H_P Parameter: Timepoint (hr) Value: 6
  misc_feature: MA Experiment 20001757 PARAMETER Experiment Name: At_50mM_NH4NO3_L-to-H_P Parameter: Tissue Value: Leaf
  misc_feature: MA Experiment 20001757 PARAMETER Experiment Name: At_50mM_NH4NO3_L-to-H_P Parameter: Treatment Value: 50mM NH4NO3 vs 100mM Mannitol
aacacttcgctatttttcttcagtcgtcttcttcttccggcttctctcgaaacccttacctaaaaccctaatccgccacatccgtgttttagcctcacgacgaatcacgatgcaacgcagactcgtaaggttaaaaaaagagtatatctacaggaaaagcttggaaggtgatgagcgtaaggtctatgagcagaagcggctgataagagaagcccttcaagaaggaaagccgattcctactgagctccgaaacgtcgaagccaagcttcgacaagaaattgatcttgaagaccaaaacacagctgttccgcggagtcatatcgatgatgaatatgcaaatgctacggaagcagatccaaagattttgttgacaacttctaggaatccaagtgctccgctcatccgattcactaaggaattgaagtttgtgtttcctaactctcagagaataaatcgtggtagtcaggtcatttctgagatcattgaaactgctcgttcccatgattttactgatgttatattggttcatgagcaccgtggtgtgcctgatggtctcattatctctcatctcccatttggaccaactgcatactttggattacttaatgtggtaacaagacatgatatttcagacaagaaatccattggaaaaatgcctgagcaatatcctcatctcatttttaacaactttactactcagatgggtcaaagagttggaaacatcttaaaacatatcttccctgctccaaaactggatgcaaaacgtatagttactttttctaatcaatccgattatatatcattcaggaatcatgtctatgataaaggagagggaggtccaaaatcaatcgagcttaaagaaatcggtcctcgatttgagttgcggctctaccaggtgaaattaggaactgtggaacaaaatgaagcagagatcgaatgggttataagaccgtacatgaacacctctaaaaagcgcaagttcatcggtgaatgatgactaaacggaacagctttgaaccctttatctaaattctgttttacttatcattctgttggaagagctgttcagtttttgtgtccttagagaaaattgcgatgattttgttttaacgtttagcttataaaaacaaaactttcttgtct

SEQ ID NO: 100204 - protein, 330 aa, Arabidopsis thaliana; identical to SEQ ID NO: 25743
  peptide (1)..(330): Ceres Seq. ID no. 13604585
  misc_feature (37)..(330): Homolog of NCBI NO: 15222534 NR Description: U3 small nucleolar ribonucleo proteinprotein [Arabidopsis thaliana] >gi|25347957|pir||H96662 hypothetical
  misc_feature (32)..(328): Homolog of NCBI NO: 22902285 NR Description: D1Wsu40e protein [Mus musculus]
  misc_feature (37)..(328): Homolog of NCBI NO: 34874626 NR Description: similar to IMP4 [Rattus norvegicus] IMP4 [Mus musculus] >gi|26351353|dbj|BAC39313.1| unnamed protein
  misc_feature (37)..(328): Homolog of NCBI NO: 15529982 NR Description: U3 snoRNP protein 4 homolog [Homo sapiens]
  misc_feature (37)..(328): Homolog of NCBI NO: 30519917 NR Description: U3 snoRNP protein 4 homolog; DNA segment, Chr 1, State University 40, expressed [Mus musculus]
  misc_feature (37)..(328): Homolog of NCBI NO: 39587892 NR Description: Hypothetical protein CBG13507 [Caenorhabditis
  misc_feature (33)..(330): Homolog of NCBI NO: 31198339 NR Description: ENSANGP00000017149 [Anopheles gambiae]
  misc_feature (37)..(328): Homolog of NCBI NO: 4262378 NR Description: stage specific peptide 24 [Trypanosoma cruzi]
  misc_feature (37)..(328): Homolog of NCBI NO: 17544642 NR Description: IMP4 family (34.0 kD) [Caenorhabditis elegans]
  misc_feature (37)..(330): Homolog of NCBI NO: 19114697 NR Description: hypothetical protein [Schizosaccharomyces pombe]

SEQ ID NO: 100205 - protein, 294 aa, Arabidopsis thaliana; identical to SEQ ID NO: 25744
  peptide (1)..(294): Ceres Seq. ID no. 13604586
  misc_feature (1)..(294): Homolog of NCBI NO: 15222534 NR Description: U3 small nucleolar ribonucleo proteinprotein [Arabidopsis thaliana] >gi|25347957|pir||H96662 hypothetical
  misc_feature (1)..(292): Homolog of NCBI NO: 22902285 NR Description: D1Wsu40e protein [Mus musculus]
  misc_feature (1)..(292): Homolog of NCBI NO: 34874626 NR Description: similar to IMP4 [Rattus norvegicus] IMP4 [Mus musculus] >gi|26351353|dbj|BAC39313.1| unnamed protein
  misc_feature (1)..(292): Homolog of NCBI NO: 15529982 NR Description: U3 snoRNP protein 4 homolog [Homo sapiens]
  misc_feature (1)..(292): Homolog of NCBI NO: 30519917 NR Description: U3 snoRNP protein 4 homolog; DNA segment, Chr 1, State University 40, expressed [Mus musculus]
  misc_feature (1)..(292): Homolog of NCBI NO: 39587892 NR Description: Hypothetical protein CBG13507 [Caenorhabditis
  misc_feature (1)..(294): Homolog of NCBI NO: 31198339 NR Description: ENSANGP00000017149 [Anopheles gambiae]
  misc_feature (1)..(292): Homolog of NCBI NO: 4262378 NR Description: stage specific peptide 24 [Trypanosoma cruzi]
  misc_feature (1)..(292): Homolog of NCBI NO: 17544642 NR Description: IMP4 family (34.0 kD) [Caenorhabditis elegans]
  misc_feature (1)..(294): Homolog of NCBI NO: 19114697 NR Description: hypothetical protein [Schizosaccharomyces pombe]

SEQ ID NO: 100206 - DNA, 1024 bp, Arabidopsis thaliana
  misc_feature (1)..(1024): Ceres Seq. ID no. 13604587
  misc_feature: MA Experiment ID: 20001248 Result: Up-regulated in Transcription
  misc_feature: MA Experiment 20001248 PARAMETER Experiment Name: At_Far-red-induction_P Parameter: Age (day) Value: 7
  misc_feature: MA Experiment 20001248 PARAMETER Experiment Name: At_Far-red-induction_P Parameter: Light Value: Far-red vs. White
  misc_feature: MA Experiment 20001248 PARAMETER Experiment Name: At_Far-red-induction_P Parameter: Organism Value: A. thaliana
  misc_feature: MA Experiment 20001248 PARAMETER Experiment Name: At_Far-red-induction_P Parameter: Plant Line Value: Columbia
  misc_feature: MA Experiment 20001248 PARAMETER Experiment Name: At_Far-red-induction_P Parameter: Timepoint (hr) Value: 4
  misc_feature: MA Experiment 20001248 PARAMETER Experiment Name: At_Far-red-induction_P Parameter: Tissue Value: Whole Plant
agaaactgatttgataaaaaaaaatatcttcgttgaagtgagggtgacgagaagtttctgctttcatcaattaaaggtttacgcgtgaagcagatcatcagcaatggcggcgtcgcaagataagttggataagatgaaacttaggcaagattaccggaatttatggcactccgatctcatgggcaccgtcaccgccgacactccctattgctgcatctcgtgtctgtgtggaccttgtgtgtcatacatgcttcggagaagagcactttacaatgacatgtcaaggtatacttgctgtgctggatatatgccctgtagtggaaggtgtggagaaagcaaatgtcctcaactttgccttgccactgaggtcttcctttgcttcggaaactctgtggcctctacccgctttcttctgcaggatgaattcaacatccagacaacacaatgcgacaattgcataattggatttatgttctgcctcagccaagttgcttgcatattctctatagttgcttgcattgttggtagtgatgaactttccgaggcttctcagatactctcttgctgtgctgatatggtctactgcacggtctgcgcatgtatgcagacacaacacaaacttgagatggacaaaagagatggagtgtttggatcgcagccaatgggtgtgccaccagctcagcagatgtctcgttttgatcaacctgtccctcctccagtcggataccctcagtcctatccaccgcctgctcaaggctaccctcctgcatcttacccgcctcccggttatcctcagcattaagaaatttaaccagtatcttcattttatgtgtcaaagtgttgttgttacttggtttaggtgtgcagaactattatattgttcagctttgtcctctgcttatttctgcgatttatttattttgaggtattggtactctggttatgtctgaaaagcttttgctatcatcaactggtttgttgactttggtatttaagtaaagaaaaagaacaacatatgtattag

SEQ ID NO: 100207 - protein, 232 aa, Arabidopsis thaliana; identical to SEQ ID NO: 29812
  peptide (1)..(232): Ceres Seq. ID no. 13604588
  misc_feature (1)..(232): Homolog of NCBI NO: 15222552 NR Description: proline-rich protein family [Arabidopsis thaliana]
  misc_feature (5)..(232): Homolog of NCBI NO: 22328885 NR Description: proline-rich protein family [Arabidopsis >gi|17065516|gb|AAL32912.1| Unknown protein [Arabidopsis >gi|20148523|gb|AAM10152.1| unknown protein [Arabidopsis
  misc_feature (11)..(232): Homolog of NCBI NO: 21554542 NR Description: unknown [Arabidopsis thaliana]
  misc_feature (1)..(201): Homolog of NCBI NO: 15238071 NR Description: hypothetical protein [Arabidopsis thaliana] gb|AAF07369.1~gene_id:MYC6.10~strong similarity to unknown
  misc_feature (1)..(213): Homolog of NCBI NO: 37536436 NR Description: hypothetical protein [Oryza sativa (japonica group)] >gi|18057100|gb|AAL58123.1| hypothetical protein [Oryza
  misc_feature (5)..(162): Homolog of NCBI NO: 7485553 NR Description: hypothetical protein F16G20.170 - Arabidopsis >gi|3451072|emb|CAA20468.1| putative protein [Arabidopsis >gi|7269195|emb|CAB79302.1| putative protein [Arabidopsis
  misc_feature (64)..(231): Homolog of NCBI NO: 25446695 NR Description: Unknown protein [Oryza sativa (japonica
  misc_feature (1)..(45): Homolog of NCBI NO: 25446695 NR Description: Unknown protein [Oryza sativa (japonica
  misc_feature (185)..(232): Homolog of NCBI NO: 25446695 NR Description: Unknown protein [Oryza sativa (japonica
  misc_feature (173)..(232): Homolog of NCBI NO: 7485554 NR Description: hypothetical protein F16G20.180 - Arabidopsis >gi|3451073|emb|CAA20469.1| putative protein [Arabidopsis >gi|7269196|emb|CAB79303.1| putative protein [Arabidopsis

SEQ ID NO: 100208 - protein, 222 aa, Arabidopsis thaliana; identical to SEQ ID NO: 29813
  peptide (1)..(222): Ceres Seq. ID no. 13604589
  misc_feature (1)..(222): Homolog of NCBI NO: 15222552 NR Description: proline-rich protein family [Arabidopsis thaliana]
  misc_feature (1)..(222): Homolog of NCBI NO: 22328885 NR Description: proline-rich protein family [Arabidopsis >gi|17065516|gb|AAL32912.1| Unknown protein [Arabidopsis >gi|20148523|gb|AAM10152.1| unknown protein [Arabidopsis
  misc_feature (1)..(222): Homolog of NCBI NO: 21554542 NR Description: unknown [Arabidopsis thaliana]
  misc_feature (1)..(191): Homolog of NCBI NO: 15238071 NR Description: hypothetical protein [Arabidopsis thaliana] gb|AAF07369.1~gene_id:MYC6.10~strong similarity to unknown
  misc_feature (1)..(203): Homolog of NCBI NO: 37536436 NR Description: hypothetical protein [Oryza sativa (japonica group)] >gi|18057100|gb|AAL58123.1| hypothetical protein [Oryza
  misc_feature (1)..(152): Homolog of NCBI NO: 7485553 NR Description: hypothetical protein F16G20.170 - Arabidopsis >gi|3451072|emb|CAA20468.1| putative protein [Arabidopsis >gi|7269195|emb|CAB79302.1| putative protein [Arabidopsis
  misc_feature (54)..(221): Homolog of NCBI NO: 25446695 NR Description: Unknown protein [Oryza sativa (japonica
  misc_feature (1)..(35): Homolog of NCBI NO: 25446695 NR Description: Unknown protein [Oryza sativa (japonica
  misc_feature (175)..(222): Homolog of NCBI NO: 25446695 NR Description: Unknown protein [Oryza sativa (japonica
  misc_feature (163)..(222): Homolog of NCBI NO: 7485554 NR Description: hypothetical protein F16G20.180 - Arabidopsis >gi|3451073|emb|CAA20469.1| putative protein [Arabidopsis >gi|7269196|emb|CAB79303.1| putative protein [Arabidopsis

SEQ ID NO: 100209 - protein, 207 aa, Arabidopsis thaliana; identical to SEQ ID NO: 29814
  peptide (1)..(207): Ceres Seq. ID no. 13604590
  misc_feature (1)..(207): Homolog of NCBI NO: 15222552 NR Description: proline-rich protein family [Arabidopsis thaliana]
  misc_feature (1)..(207): Homolog of NCBI NO: 22328885 NR Description: proline-rich protein family [Arabidopsis >gi|17065516|gb|AAL32912.1| Unknown protein [Arabidopsis >gi|20148523|gb|AAM10152.1| unknown protein [Arabidopsis
  misc_feature (1)..(207): Homolog of NCBI NO: 21554542 NR Description: unknown [Arabidopsis thaliana]
  misc_feature (1)..(176): Homolog of NCBI NO: 15238071 NR Description: hypothetical protein [Arabidopsis thaliana] gb|AAF07369.1~gene_id:MYC6.10~strong similarity to unknown
  misc_feature (1)..(188): Homolog of NCBI NO: 37536436 NR Description: hypothetical protein [Oryza sativa (japonica group)] >gi|18057100|gb|AAL58123.1| hypothetical protein [Oryza
  misc_feature (1)..(137): Homolog of NCBI NO: 7485553 NR Description: hypothetical protein F16G20.170 - Arabidopsis >gi|3451072|emb|CAA20468.1| putative protein [Arabidopsis >gi|7269195|emb|CAB79302.1| putative protein [Arabidopsis
  misc_feature (39)..(206): Homolog of NCBI NO: 25446695 NR Description: Unknown protein [Oryza sativa (japonica
  misc_feature (1)..(20): Homolog of NCBI NO: 25446695 NR Description: Unknown protein [Oryza sativa (japonica
  misc_feature (160)..(207): Homolog of NCBI NO: 25446695 NR Description: Unknown protein [Oryza sativa (japonica
  misc_feature (148)..(207): Homolog of NCBI NO: 7485554 NR Description: hypothetical protein F16G20.180 - Arabidopsis >gi|3451073|emb|CAA20469.1| putative protein [Arabidopsis >gi|7269196|emb|CAB79303.1| putative protein [Arabidopsis

SEQ ID NO: 100210 - DNA, 593 bp, Arabidopsis thaliana
  misc_feature (1)..(593): Ceres Seq. ID no. 13604591
  misc_feature: MA Experiment ID: 108433 Result: Up-regulated in Transcription
  misc_feature: MA Experiment 108433 PARAMETER Experiment Name: At_rhl_Mutant2_cDNA_P Parameter: Age (day) Value: 7
  misc_feature: MA Experiment 108433 PARAMETER Experiment Name: At_rhl_Mutant2_cDNA_P Parameter: Organism Value: A. thaliana
  misc_feature: MA Experiment 108433 PARAMETER Experiment Name: At_rhl_Mutant2_cDNA_P Parameter: Plant Line Value: rhl Mutant vs. wt landsburg
  misc_feature: MA Experiment 108433 PARAMETER Experiment Name: At_rhl_Mutant2_cDNA_P Parameter: Tissue Value: Roots
  misc_feature: MA Experiment ID: 108585 Result: Up-regulated in Transcription
  misc_feature: MA Experiment 108585 PARAMETER Experiment Name: At_5mM_NaNP_cDNA_P Parameter: Timepoint (hr) Value: 6
  misc_feature: MA Experiment 108585 PARAMETER Experiment Name: At_5mM_NaNP_cDNA_P Parameter: Tissue Value: Aerial
  misc_feature: MA Experiment 108585 PARAMETER Experiment Name: At_5mM_NaNP_cDNA_P Parameter: Treatment Value: null
  misc_feature: MA Experiment ID: 20000180 Result: Down-regulated in Transcription
  misc_feature: MA Experiment 20000180 PARAMETER Experiment Name: At_Germinating_Seeds_P Parameter: Age (hr) Value: 24 vs. 0
  misc_feature: MA Experiment 20000180 PARAMETER Experiment Name: At_Germinating_Seeds_P Parameter: Tissue Value: Germinating Seeds
  misc_feature: MA Experiment ID: 20000224 Result: Down-regulated in Transcription
  misc_feature: MA Experiment ID: 20000234 Result: Up-regulated in Transcription
  misc_feature: MA Experiment 20000234 PARAMETER Experiment Name: At_Siliques_P Parameter: Age (day) Value: 21
  misc_feature: MA Experiment 20000234 PARAMETER Experiment Name: At_Siliques_P Parameter: Organism Value: A. thaliana
  misc_feature: MA Experiment 20000234 PARAMETER Experiment Name: At_Siliques_P Parameter: Plant Line Value: WS
  misc_feature: MA Experiment 20000234 PARAMETER Experiment Name: At_Siliques_P Parameter: Tissue Value: Less Than 5mm Siliques vs. Whole Plant
  misc_feature: MA Experiment ID: 20000235 Result: Up-regulated in Transcription
  misc_feature: MA Experiment 20000235 PARAMETER Experiment Name: At_Siliques_P Parameter: Age (day) Value: 21
  misc_feature: MA Experiment 20000235 PARAMETER Experiment Name: At_Siliques_P Parameter: Organism Value: A. thaliana
  misc_feature: MA Experiment 20000235 PARAMETER Experiment Name: At_Siliques_P Parameter: Plant Line Value: WS
  misc_feature: MA Experiment 20000235 PARAMETER Experiment Name: At_Siliques_P Parameter: Tissue Value: 5-10mm Siliques vs. Whole Plant
  misc_feature: MA Experiment ID: 20000451 Result: Down-regulated in Transcription
  misc_feature: MA Experiment 20000451 PARAMETER Experiment Name: At_CS6879_Shoots-Roots_P Parameter: Age (day) Value: 14
  misc_feature: MA Experiment 20000451 PARAMETER Experiment Name: At_CS6879_Shoots-Roots_P Parameter: Organism Value: A. thaliana
  misc_feature: MA Experiment 20000451 PARAMETER Experiment Name: At_CS6879_Shoots-Roots_P Parameter: Plant Line Value: CS6879 vs. WS
  misc_feature: MA Experiment 20000451 PARAMETER Experiment Name: At_CS6879_Shoots-Roots_P Parameter: Tissue Value: Roots
attgttgtgaatttctgtgagattgagaatgcaggcggaggagataatatgccgtgtttcagacgaagagatcatcgagaattacctgaggccaaagataaacggtgaaacatcttcaatcccgagatatgttgtggaattggcagaggagctgtacactgtagagccttggctgcttcctcgacaaacagctccaattctcaaccctggcgagtggttctactttgggaaacgcaatcgaaagtatagtaacttggaaggtgttcattgcgagggatcgtggatactcgaagacggttgcatcgcagtcctgtccaaggagacgggtgaggaaattggtggaacgacgagatttaggtattactataggaacaagggggataaagagagtcgtctgaagatgagcaattggtttatgagagagtatcgtctctattacaaatccaggagagtcttcaatggacgtcaggttttctgcattatcacttgtaatgatgaacattttatcgaataattctctctgcttttttttctaagataccatagtttaagatcctaattatgagtttgaatctataattataactctttgc

SEQ ID NO: 100211 - protein, 161 aa, Arabidopsis thaliana
  peptide (1)..(161): Ceres Seq. ID no. 13604592
  misc_feature (11)..(136): Pfam Name: No apical meristem (NAM) protein Pfam Description: No apical meristem (NAM) protein
  misc_feature (1)..(161): Homolog of NCBI NO: 18407972 NR Description: No apical meristem (NAM) protein family thaliana] >gi|6692113|gb|AAF24578.1|AC007764_20 F22C12.13
  misc_feature (2)..(133): Homolog of NCBI NO: 15238786 NR Description: No apical meristem (NAM) protein family thaliana] >gi|9758912|dbj|BAB09488.1|
  misc_feature (9)..(134): Homolog of NCBI NO: 7486659 NR Description: hypothetical protein F8D20.90 - Arabidopsis
  misc_feature (11)..(135): Homolog of NCBI NO: 15218843 NR Description: No apical meristem (NAM) protein family
  misc_feature (11)..(135): Homolog of NCBI NO: 15237939 NR Description: No apical meristem (NAM) protein family
  misc_feature (9)..(139): Homolog of NCBI NO: 21358787 NR Description: nam-like protein 1 [Petunia x hybrida]
  misc_feature (11)..(135): Homolog of NCBI NO: 15229511 NR Description: No apical meristem (NAM) protein family thaliana] >gi|9294586|dbj|BAB02867.1| contains similarity to NAM
  misc_feature (11)..(135): Homolog of NCBI NO: 15221787 NR Description: No apical meristem (NAM) protein family
MQAEEIICRVSDEEIIENYLRPKINGETSSIPRYVVELAEELYTVEPWLLPRQTAPILNPGEWFYFGKRNRKYSNLEGVHCEGSWILEDGCIAVLSKETGEEIGGTTRFRYYYRNKGDKESRLKMSNWFMREYRLYYKSRRVFNGRQVFCIITCNDEHFIE

SEQ ID NO: 100212 - DNA, 1342 bp, Arabidopsis thaliana
  misc_feature (1)..(1342): Ceres Seq. ID no. 13604600
  misc_feature: MA Experiment ID: 108585 Result: Up-regulated in Transcription
  misc_feature: MA Experiment 108585 PARAMETER Experiment Name: At_5mM_NaNP_cDNA_P Parameter: Timepoint (hr) Value: 6
  misc_feature: MA Experiment 108585 PARAMETER Experiment Name: At_5mM_NaNP_cDNA_P Parameter: Tissue Value: Aerial
  misc_feature: MA Experiment 108585 PARAMETER Experiment Name: At_5mM_NaNP_cDNA_P Parameter: Treatment Value: null
  misc_feature: MA Experiment ID: 20000069 Result: Down-regulated in Transcription
  misc_feature: MA Experiment 20000069 PARAMETER Experiment Name: At_100uM_ABA_Mutants_cDNA_P Parameter: Plant Line Value: CS23
  misc_feature: MA Experiment 20000069 PARAMETER Experiment Name: At_100uM_ABA_Mutants_cDNA_P Parameter: Timepoint (hr) Value: 6
  misc_feature: MA Experiment 20000069 PARAMETER Experiment Name: At_100uM_ABA_Mutants_cDNA_P Parameter: Tissue Value: Aerial
  misc_feature: MA Experiment 20000069 PARAMETER Experiment Name: At_100uM_ABA_Mutants_cDNA_P Parameter: Treatment Value: 100uM ABA vs. No Treatment
  misc_feature: MA Experiment ID: 20000070 Result: Down-regulated in Transcription
  misc_feature: MA Experiment 20000070 PARAMETER Experiment Name: At_100uM_ABA_Mutants_cDNA_P Parameter: Plant Line Value: CS24
  misc_feature: MA Experiment 20000070 PARAMETER Experiment Name: At_100uM_ABA_Mutants_cDNA_P Parameter: Timepoint (hr) Value: 6
  misc_feature: MA Experiment 20000070 PARAMETER Experiment Name: At_100uM_ABA_Mutants_cDNA_P Parameter: Tissue Value: Aerial
  misc_feature: MA Experiment 20000070 PARAMETER Experiment Name: At_100uM_ABA_Mutants_cDNA_P Parameter: Treatment Value: 100uM ABA vs. No Treatment
  misc_feature: MA Experiment ID: 20000071 Result: Down-regulated in Transcription
  misc_feature: MA Experiment 20000071 PARAMETER Experiment Name: At_100uM_ABA_Mutants_cDNA_P Parameter: Plant Line Value: CS8104
  misc_feature: MA Experiment 20000071 PARAMETER Experiment Name: At_100uM_ABA_Mutants_cDNA_P Parameter: Timepoint (hr) Value: 6
  misc_feature: MA Experiment 20000071 PARAMETER Experiment Name: At_100uM_ABA_Mutants_cDNA_P Parameter: Tissue Value: Aerial
  misc_feature: MA Experiment 20000071 PARAMETER Experiment Name: At_100uM_ABA_Mutants_cDNA_P Parameter: Treatment Value: 100uM ABA vs. No Treatment
  misc_feature: MA Experiment ID: 20000086 Result: Down-regulated in Transcription
  misc_feature: MA Experiment 20000086 PARAMETER Experiment Name: At_100uM_ABA_Mutants_cDNA_P Parameter: Plant Line Value: CS22
  misc_feature: MA Experiment 20000086 PARAMETER Experiment Name: At_100uM_ABA_Mutants_cDNA_P Parameter: Timepoint (hr) Value: 6
  misc_feature: MA Experiment 20000086 PARAMETER Experiment Name: At_100uM_ABA_Mutants_cDNA_P Parameter: Tissue Value: Aerial
  misc_feature: MA Experiment 20000086 PARAMETER Experiment Name: At_100uM_ABA_Mutants_cDNA_P Parameter: Treatment Value: 100uM ABA vs. No Treatment
  misc_feature: MA Experiment ID: 20000087 Result: Down-regulated in Transcription
  misc_feature: MA Experiment 20000087 PARAMETER Experiment Name: At_100uM_ABA_Mutants_cDNA_P Parameter: Plant Line Value: WS
  misc_feature: MA Experiment 20000087 PARAMETER Experiment Name: At_100uM_ABA_Mutants_cDNA_P Parameter: Timepoint (hr) Value: 6
  misc_feature: MA Experiment 20000087 PARAMETER Experiment Name: At_100uM_ABA_Mutants_cDNA_P Parameter: Tissue Value: Aerial
  misc_feature: MA Experiment 20000087 PARAMETER Experiment Name: At_100uM_ABA_Mutants_cDNA_P Parameter: Treatment Value: 100uM ABA vs. No Treatment
  misc_feature: MA Experiment ID: 20000089 Result: Down-regulated in Transcription
  misc_feature: MA Experiment ID: 20000090 Result: Down-regulated in Transcription
  misc_feature: MA Experiment ID: 20000111 Result: Up-regulated in Transcription
  misc_feature: MA Experiment 20000111 PARAMETER Experiment Name: At_42deg_Heat_cDNA_P Parameter: Temperature (deg C) Value: 42 vs. 22
  misc_feature: MA Experiment 20000111 PARAMETER Experiment Name: At_42deg_Heat_cDNA_P Parameter: Timepoint (hr) Value: 6
  misc_feature: MA Experiment 20000111 PARAMETER Experiment Name: At_42deg_Heat_cDNA_P Parameter: Tissue Value: Aerial
  misc_feature: MA Experiment ID: 20000113 Result: Up-regulated in Transcription
  misc_feature: MA Experiment 20000113 PARAMETER Experiment Name: At_42deg_Heat_cDNA_P Parameter: Temperature (deg C) Value: 42 vs. 22
  misc_feature: MA Experiment 20000113 PARAMETER Experiment Name: At_42deg_Heat_cDNA_P Parameter: Timepoint (hr) Value: 8
  misc_feature: MA Experiment 20000113 PARAMETER Experiment Name: At_42deg_Heat_cDNA_P Parameter: Tissue Value: Aerial
  misc_feature: MA Experiment ID: 20000117 Result: Down-regulated in Transcription
  misc_feature: MA Experiment 20000117 PARAMETER Experiment Name: At_100uM_ABA_Mutants_cDNA_P Parameter: Plant Line Value: Columbia
  misc_feature: MA Experiment 20000117 PARAMETER Experiment Name: At_100uM_ABA_Mutants_cDNA_P Parameter: Timepoint (hr) Value: 6
  misc_feature: MA Experiment 20000117 PARAMETER Experiment Name: At_100uM_ABA_Mutants_cDNA_P Parameter: Tissue Value: Aerial
  misc_feature: MA Experiment 20000117 PARAMETER Experiment Name: At_100uM_ABA_Mutants_cDNA_P Parameter: Treatment Value: 100uM ABA vs. No Treatment
  misc_feature: MA Experiment ID: 20000173 Result: Up-regulated in Transcription
  misc_feature: MA Experiment 20000173 PARAMETER Experiment Name: At_42deg_Heat_P Parameter: Age (day) Value: 14
  misc_feature: MA Experiment 20000173 PARAMETER Experiment Name: At_42deg_Heat_P Parameter: Organism Value: A. thaliana
  misc_feature: MA Experiment 20000173 PARAMETER Experiment Name: At_42deg_Heat_P Parameter: Plant Line Value: WS
  misc_feature: MA Experiment 20000173 PARAMETER Experiment Name: At_42deg_Heat_P Parameter: Temperature (deg C) Value: 42 vs. 22
  misc_feature: MA Experiment 20000173 PARAMETER Experiment Name: At_42deg_Heat_P Parameter: Timepoint (hr) Value: 6
  misc_feature: MA Experiment 20000173 PARAMETER Experiment Name: At_42deg_Heat_P Parameter: Tissue Value: Aerial
  misc_feature: MA Experiment ID: 20001248 Result: Down-regulated in Transcription
  misc_feature: MA Experiment 20001248 PARAMETER Experiment Name: At_Far-red-induction_P Parameter: Age (day) Value: 7
  misc_feature: MA Experiment 20001248 PARAMETER Experiment Name: At_Far-red-induction_P Parameter: Light Value: Far-red vs. White
  misc_feature: MA Experiment 20001248 PARAMETER Experiment Name: At_Far-red-induction_P Parameter: Organism Value: A. thaliana
  misc_feature: MA Experiment 20001248 PARAMETER Experiment Name: At_Far-red-induction_P Parameter: Plant Line Value: Columbia
  misc_feature: MA Experiment 20001248 PARAMETER Experiment Name: At_Far-red-induction_P Parameter: Timepoint (hr) Value: 4
  misc_feature: MA Experiment 20001248 PARAMETER Experiment Name: At_Far-red-induction_P Parameter: Tissue Value: Whole Plant
  misc_feature: MA Experiment ID: 20001556 Result: Up-regulated in Transcription
  misc_feature: MA Experiment 20001556 PARAMETER Experiment Name: At_Drought_Soil_Dry_P Parameter: Age (day) Value: 26
  misc_feature: MA Experiment 20001556 PARAMETER Experiment Name: At_Drought_Soil_Dry_P Parameter: Organism Value: A. thaliana
  misc_feature: MA Experiment 20001556 PARAMETER Experiment Name: At_Drought_Soil_Dry_P Parameter: Plant Line Value: WS
  misc_feature: MA Experiment 20001556 PARAMETER Experiment Name: At_Drought_Soil_Dry_P Parameter: Post Timepoint (hr) Value: None
  misc_feature: MA Experiment 20001556 PARAMETER Experiment Name: At_Drought_Soil_Dry_P Parameter: Post-Treatment Value: None
  misc_feature: MA Experiment 20001556 PARAMETER Experiment Name: At_Drought_Soil_Dry_P Parameter: Timepoint (day) Value: 12
  misc_feature: MA Experiment 20001556 PARAMETER Experiment Name: At_Drought_Soil_Dry_P Parameter: Treatment Value: Drought vs. No Drought
  misc_feature: MA Experiment ID: 20001904 Result: Up-regulated in Transcription
  misc_feature: MA Experiment 20001904 PARAMETER Experiment Name: At_Drought_Reproduction_P Parameter: Age (day) Value: 37
  misc_feature: MA Experiment 20001904 PARAMETER Experiment Name: At_Drought_Reproduction_P Parameter: Organism Value: A. thaliana
  misc_feature: MA Experiment 20001904 PARAMETER Experiment Name: At_Drought_Reproduction_P Parameter: Plant Line Value: WS
  misc_feature: MA Experiment 20001904 PARAMETER Experiment Name: At_Drought_Reproduction_P Parameter: Timepoint (day) Value: 7
  misc_feature: MA Experiment 20001904 PARAMETER Experiment Name: At_Drought_Reproduction_P Parameter: Tissue Value: Rosettes
  misc_feature: MA Experiment 20001904 PARAMETER Experiment Name: At_Drought_Reproduction_P Parameter: Treatment Value: Drought vs. No Drought
gttagcggggtcggttacgaagaaaggaagctcttttacattctcgtggcaacgatctcatctacgtgtcacgaaaactcaaatctcttactccggcgaacgatgtaccgaacggcggcgaagcgtcttctcgccggtggtggaatcactaccacccgtctcctccgattaccgaagctcaggtctacaatcatcccttcctcttacacttccggtctctgcacttcgtcgattggtggtaatactgaatcaccaatgggtaagcagtctgtgaaccctaatcaatcgggtccaacggcgtcgtcttctacgggtacaggggaaggacaacgccgacatgagagcagaaagccgagagctgagttccaagaagagcaggctcgtgttctctctgcgtctctccgtcacgtgccgaggttaggttggacggaagaagcgatgatggctggttcaagggatgttggtgtgtctccttcgattgttgggtctttctccaggaaagaagctgctcttgttgagttcttcatggatgaatgccttcaattgcttatggatagaatagactctggattggatttgcaaaatctgattccaagtgaacgtatctccaagctcattagaattcgtctagaaatgcaagtcccttacatgtcaaaatggccccaagctcttagcattcaggcgcatcctctgaatgtcccaacgagttttaagcaacgggcaatgttagttgatgagatatggcatgctgttggagatggagcctcggatttagattggtatgtcaagcgtactattcttggaggcgtttactcaactaccgagatttacatgctcaccgatgactccttagaacatcgcgatacatgggcattcttggatgacagagtcaaagatgcttttgatcttaagaagagcatacaagaggccaagtattttgcagaagacataggagctggagttgggaagtcggttcaaggactgatgaatggagttatgcagacaatgtccagaagaagtggtggctctgcgttttgaaaagatcacacctttacacatgattctgcttcacactccttacggattctccaatattttgagttgggatttactataataatgagattagacttatatgagttgaagtgaaggcatatgaactaatatattatcttctacgtttgaataaaccattgagtttgaaatctttaatttgtaaataaggatgaaacctgttctgtgtttggttgttctgtgcgtaaacagagttggaaacttgtaattttggtctacttcaatttggtagggtgtttattgttcgaaaacaaacatatgggcactt

SEQ ID NO: 100213 - protein, 345 aa, Arabidopsis thaliana
  peptide (1)..(345): Ceres Seq. ID no. 13604601
  misc_feature (35)..(345): Homolog of NCBI NO: 18394701 NR Description: expressed protein [Arabidopsis thaliana]
  misc_feature (35)..(345): Homolog of NCBI NO: 21593282 NR Description: unknown [Arabidopsis thaliana]
  misc_feature (35)..(284): Homolog of NCBI NO: 8778288 NR Description: F14D16.30 [Arabidopsis thaliana]
  misc_feature (35)..(227): Homolog of NCBI NO: 14532534 NR Description: T29M8.1/T29M8.1 [Arabidopsis thaliana]
  misc_feature (27)..(330): Homolog of NCBI NO: 31415917 NR Description: unknown protein [Oryza sativa (japonica
  misc_feature (46)..(341): Homolog of NCBI NO: 33859690 NR Description: RIKEN cDNA 2310005O14 [Mus musculus]
  misc_feature (45)..(341): Homolog of NCBI NO: 32449799 NR Description: Unknown (protein for IMAGE:6514554) [Homo sapiens]
  misc_feature (45)..(341): Homolog of NCBI NO: 40789233 NR Description: hypothetical protein DKFZp434K046 [Homo sapiens] Unknown gene product [Homo sapiens] >gi|40674463|gb|AAH64946.1|
  misc_feature (46)..(303): Homolog of NCBI NO: 34851240 NR Description: similar to Polymerase (RNA) II (DNA directed)
  misc_feature (87)..(341): Homolog of NCBI NO: 6841302 NR Description: HSPC326 [Homo sapiens]
VSGVGYEERKLFYILVATISSTCHENSNLLLRRTMYRTAAKRLLAGGGITTTRLLRLPKLRSTIIPSSYTSGLCTSSIGGNTESPMGKQSVNPNQSGPTASSSTGTGEGQRRHESRKPRAEFQEEQARVLSASLRHVPRLGWTEEAMMAGSRDVGVSPSIVGSFSRKEAALVEFFMDECLQLLMDRIDSGLDLQNLIPSERISKLIRIRLEMQVPYMSKWPQALSIQAHPLNVPTSFKQRAMLVDEIWHAVGDGASDLDWYVKRTILGGVYSTTEIYMLTDDSLEHRDTWAFLDDRVKDAFDLKKSIQEAKYFAEDIGAGVGKSVQGLMNGVMQTMSRRSGGSAF

SEQ ID NO: 100214 - protein, 311 aa, Arabidopsis thaliana
  peptide (1)..(311): Ceres Seq. ID no. 13604602
  misc_feature (1)..(311): Homolog of NCBI NO: 18394701 NR Description: expressed protein [Arabidopsis thaliana]
  misc_feature (1)..(311): Homolog of NCBI NO: 21593282 NR Description: unknown [Arabidopsis thaliana]
  misc_feature (1)..(250): Homolog of NCBI NO: 8778288 NR Description: F14D16.30 [Arabidopsis thaliana]
  misc_feature (1)..(193): Homolog of NCBI NO: 14532534 NR Description: T29M8.1/T29M8.1 [Arabidopsis thaliana]
  misc_feature (1)..(296): Homolog of NCBI NO: 31415917 NR Description: unknown protein [Oryza sativa (japonica
  misc_feature (12)..(307): Homolog of NCBI NO: 33859690 NR Description: RIKEN cDNA 2310005O14 [Mus musculus]
  misc_feature (11)..(307): Homolog of NCBI NO: 32449799 NR Description: Unknown (protein for IMAGE:6514554) [Homo sapiens]
  misc_feature (11)..(307): Homolog of NCBI NO: 40789233 NR Description: hypothetical protein DKFZp434K046 [Homo sapiens] Unknown gene product [Homo sapiens] >gi|40674463|gb|AAH64946.1|
  misc_feature (12)..(269): Homolog of NCBI NO: 34851240 NR Description: similar to Polymerase (RNA) II (DNA directed)
  misc_feature (53)..(307): Homolog of NCBI NO: 6841302 NR Description: HSPC326 [Homo sapiens]
MYRTAAKRLLAGGGITTTRLLRLPKLRSTIIPSSYTSGLCTSSIGGNTESPMGKQSVNPNQSGPTASSSTGTGEGQRRHESRKPRAEFQEEQARVLSASLRHVPRLGWTEEAMMAGSRDVGVSPSIVGSFSRKEAALVEFFMDECLQLLMDRIDSGLDLQNLIPSERISKLIRIRLEMQVPYMSKWPQALSIQAHPLNVPTSFKQRAMLVDEIWHAVGDGASDLDWYVKRTILGGVYSTTEIYMLTDDSLEHRDTWAFLDDRVKDAFDLKKSIQEAKYFAEDIGAGVGKSVQGLMNGVMQTMSRRSGGSAF

SEQ ID NO: 100215 - protein, 260 aa, Arabidopsis thaliana
  peptide (1)..(260): Ceres Seq. ID no. 13604603
  misc_feature (1)..(260): Homolog of NCBI NO: 18394701 NR Description: expressed protein [Arabidopsis thaliana]
  misc_feature (1)..(260): Homolog of NCBI NO: 21593282 NR Description: unknown [Arabidopsis thaliana]
  misc_feature (1)..(199): Homolog of NCBI NO: 8778288 NR Description: F14D16.30 [Arabidopsis thaliana]
  misc_feature (1)..(142): Homolog of NCBI NO: 14532534 NR Description: T29M8.1/T29M8.1 [Arabidopsis thaliana]
  misc_feature (1)..(245): Homolog of NCBI NO: 31415917 NR Description: unknown protein [Oryza sativa (japonica
  misc_feature (1)..(256): Homolog of NCBI NO: 33859690 NR Description: RIKEN cDNA 2310005O14 [Mus musculus]
  misc_feature (1)..(256): Homolog of NCBI NO: 32449799 NR Description: Unknown (protein for IMAGE:6514554) [Homo sapiens]
  misc_feature (1)..(256): Homolog of NCBI NO: 40789233 NR Description: hypothetical protein DKFZp434K046 [Homo sapiens] Unknown gene product [Homo sapiens] >gi|40674463|gb|AAH64946.1|
  misc_feature (1)..(218): Homolog of NCBI NO: 34851240 NR Description: similar to Polymerase (RNA) II (DNA directed)
  misc_feature (2)..(256): Homolog of NCBI NO: 6841302 NR Description: HSPC326 [Homo sapiens]
MGKQSVNPNQSGPTASSSTGTGEGQRRHESRKPRAEFQEEQARVLSASLRHVPRLGWTEEAMMAGSRDVGVSPSIVGSFSRKEAALVEFFMDECLQLLMDRIDSGLDLQNLIPSERISKLIRIRLEMQVPYMSKWPQALSIQAHPLNVPTSFKQRAMLVDEIWHAVGDGASDLDWYVKRTILGGVYSTTEIYMLTDDSLEHRDTWAFLDDRVKDAFDLKKSIQEAKYFAEDIGAGVGKSVQGLMNGVMQTMSRRSGGSAF

SEQ ID NO: 100216 - DNA, 953 bp, Arabidopsis thaliana
  misc_feature (1)..(953): Ceres Seq. ID no. 13604608
  misc_feature: MA Experiment ID: 20000180 Result: Down-regulated in Transcription
  misc_feature: MA Experiment 20000180 PARAMETER Experiment Name: At_Germinating_Seeds_P Parameter: Age (hr) Value: 24 vs. 0
  misc_feature: MA Experiment 20000180 PARAMETER Experiment Name: At_Germinating_Seeds_P Parameter: Tissue Value: Germinating Seeds
  misc_feature: MA Experiment ID: 20000184 Result: Up-regulated in Transcription
  misc_feature: MA Experiment 20000184 PARAMETER Experiment Name: At_Shoots__P Parameter: Age (day) Value: 7
  misc_feature: MA Experiment 20000184 PARAMETER Experiment Name: At_Shoots__P Parameter: Tissue Value: Shoots vs. Whole Plant
  misc_feature: MA Experiment ID: 20000437 Result: Up-regulated in Transcription
  misc_feature: MA Experiment 20000437 PARAMETER Experiment Name: At_Drought_P Parameter: Age (day) Value: 8
  misc_feature: MA Experiment 20000437 PARAMETER Experiment Name: At_Drought_P Parameter: Organism Value: A. thaliana
  misc_feature: MA Experiment 20000437 PARAMETER Experiment Name: At_Drought_P Parameter: Plant Line Value: WS
  misc_feature: MA Experiment 20000437 PARAMETER Experiment Name: At_Drought_P Parameter: Timepoint (hr) Value: 24
  misc_feature: MA Experiment 20000437 PARAMETER Experiment Name: At_Drought_P Parameter: Tissue Value: Whole Plant
  misc_feature: MA Experiment 20000437 PARAMETER Experiment Name: At_Drought_P Parameter: Treatment Value: Drought vs. No Drought
  misc_feature: MA Experiment ID: 20000438 Result: Up-regulated in Transcription
  misc_feature: MA Experiment 20000438 PARAMETER Experiment Name: At_Shoots__P Parameter: Age (day) Value: 14
  misc_feature: MA Experiment 20000438 PARAMETER Experiment Name: At_Shoots__P Parameter: Tissue Value: Shoots vs. Whole Plant
  misc_feature: MA Experiment ID: 20001906 Result: Up-regulated in Transcription
  misc_feature: MA Experiment 20001906 PARAMETER Experiment Name: At_Drought_Reproduction_P Parameter: Age (day) Value: 35
  misc_feature: MA Experiment 20001906 PARAMETER Experiment Name: At_Drought_Reproduction_P Parameter: Organism Value: A. thaliana
  misc_feature: MA Experiment 20001906 PARAMETER Experiment Name: At_Drought_Reproduction_P Parameter: Plant Line Value: WS
  misc_feature: MA Experiment 20001906 PARAMETER Experiment Name: At_Drought_Reproduction_P Parameter: Timepoint (day) Value: 5
  misc_feature: MA Experiment 20001906 PARAMETER Experiment Name: At_Drought_Reproduction_P Parameter: Tissue Value: Siliques
  misc_feature: MA Experiment 20001906 PARAMETER Experiment Name: At_Drought_Reproduction_P Parameter: Treatment Value: Drought vs. No Drought
  misc_feature: MA Experiment ID: 20001907 Result: Up-regulated in Transcription
  misc_feature: MA Experiment 20001907 PARAMETER Experiment Name: At_Drought_Reproduction_P Parameter: Age (day) Value: 37
  misc_feature: MA Experiment 20001907 PARAMETER Experiment Name: At_Drought_Reproduction_P Parameter: Organism Value: A. thaliana
  misc_feature: MA Experiment 20001907 PARAMETER Experiment Name: At_Drought_Reproduction_P Parameter: Plant Line Value: WS
  misc_feature: MA Experiment 20001907 PARAMETER Experiment Name: At_Drought_Reproduction_P Parameter: Timepoint (day) Value: 7
  misc_feature: MA Experiment 20001907 PARAMETER Experiment Name: At_Drought_Reproduction_P Parameter: Tissue Value: Siliques
  misc_feature: MA Experiment 20001907 PARAMETER Experiment Name: At_Drought_Reproduction_P Parameter: Treatment Value: Drought vs. No Drought
  misc_feature: MA Experiment ID: 20001908 Result: Up-regulated in Transcription
  misc_feature: MA Experiment 20001908 PARAMETER Experiment Name: At_Drought_Reproduction_P Parameter: Age (day) Value: 40
  misc_feature: MA Experiment 20001908 PARAMETER Experiment Name: At_Drought_Reproduction_P Parameter: Organism Value: A. thaliana
  misc_feature: MA Experiment 20001908 PARAMETER Experiment Name: At_Drought_Reproduction_P Parameter: Plant Line Value: WS
  misc_feature: MA Experiment 20001908 PARAMETER Experiment Name: At_Drought_Reproduction_P Parameter: Timepoint (day) Value: 10
  misc_feature: MA Experiment 20001908 PARAMETER Experiment Name: At_Drought_Reproduction_P Parameter: Tissue Value: Siliques
  misc_feature: MA Experiment 20001908 PARAMETER Experiment Name: At_Drought_Reproduction_P Parameter: Treatment Value: Drought vs. No Drought
tggcgatctctatttaatcggtcctcgacgcaacttcaacttctactacatccattcacatcaaatcaatacagaaagttttttctatatataaatataaaaggtaaaatgccagggatcacactaggagacacggtgccgaacctagaagtggagacgacacatgacaagttcaaacttcatgactacttcgccaattcttggaccgtcctcttctctcatcccggggatttcacacccgtgtgcaccacggagcttggtgcgatggccaaatacgctcatgagttcgataagagaggcgtgaagctccttggtctgtcttgtgacgatgtacagtcacacaaagactggatcaaagatattgaagcctttaatcacggaagcaaggtgaattacccgataatcgctgacccgaacaaagagatcattcctcagcttaacatgattgatccaattgagaacggaccgtctcgtgcccttcatattgttggtcctgacagtaagataaaattgagcttcttgtatccgtcgaccacgggacgtaacatggacgaagtattgagggctttagactcgttgttgatggcgtccaagcacaataacaagatcgccactccggttaactggaagccagatcaaccggttgtgatttcgcctgctgtgtcggacgaggaagccaaaaagatgttcccacagggtttcaagaccgccgatcttccgtcaaagaaaggctatctgcgtcacacagaggtctcttgaaaagataataacaaaagcctactatataacgtacatgcaagtattgtatgatattaatgtttttacgtacgtgtaaacaaaaataattacgtttgtaacgtatggtgatgatgtggtgcactaggtgtaggccttgtattaataaaaagaagtttgttctatatagagtggtttagtacgacgatttatttact

SEQ ID NO: 100217 - protein, 252 aa, Arabidopsis thaliana
  peptide (1)..(252): Ceres Seq. ID no. 13604609
  misc_feature (42)..(188): Pfam Name: AhpC/TSA family Pfam Description: AhpC/TSA family
  misc_feature (37)..(252): Homolog of NCBI NO: 15221082 NR Description: peroxiredoxin [Arabidopsis thaliana] Peroxiredoxin (Rehydrin homolog) >gi|1926269|emb|CAA72804.1| [Arabidopsis thaliana] >gi|8778528|gb|AAF79536.1|AC023673_24
  misc_feature (37)..(252): Homolog of NCBI NO: 28393058 NR Description: putative peroxiredoxin [Arabidopsis thaliana]
  misc_feature (37)..(252): Homolog of NCBI NO: 7381260 NR Description: peroxiredoxin antioxidant [Brassica napus]
  misc_feature (37)..(252): Homolog of NCBI NO: 25990368 NR Description: 1-cys-peroxiredoxin [Brassica napus]
  misc_feature (37)..(251): Homolog of NCBI NO: 1710077 NR Description: Peroxiredoxin (Rehydrin homolog) (B15C)
  misc_feature (37)..(251): Homolog of NCBI NO: 34539782 NR Description: 1-Cys-peroxiredoxine [Triticum aestivum]
  misc_feature (37)..(251): Homolog of NCBI NO: 6466096 NR Description: 1-Cys peroxiredoxin [Fagopyrum esculentum]
  misc_feature (37)..(251): Homolog of NCBI NO: 12247762 NR Description: 1-Cys peroxiredoxin [Triticum turgidum subsp.
  misc_feature (37)..(251): Homolog of NCBI NO: 19423862 NR Description: 1-cys peroxiredoxin [Xerophyta viscosa]
  misc_feature (37)..(251): Homolog of NCBI NO: 27261084 NR Description: putative RAB24 protein [Oryza sativa (japonica
WRSLFNRSSTQLQLLLHPFTSNQYRKFFLYINIKGKMPGITLGDTVPNLEVETTHDKFKLHDYFANSWTVLFSHPGDFTPVCTTELGAMAKYAHEFDKRGVKLLGLSCDDVQSHKDWIKDIEAFNHGSKVNYPIIADPNKEIIPQLNMIDPIENGPSRALHIVGPDSKIKLSFLYPSTTGRNMDEVLRALDSLLMASKHNNKIATPVNWKPDQPVVISPAVSDEEAKKMFPQGFKTADLPSKKGYLRHTEVS

SEQ ID NO: 100218 - protein, 216 aa, Arabidopsis thaliana
  peptide (1)..(216): Ceres Seq. ID no. 13604610
  misc_feature (6)..(152): Pfam Name: AhpC/TSA family Pfam Description: AhpC/TSA family
  misc_feature (1)..(216): Homolog of NCBI NO: 15221082 NR Description: peroxiredoxin [Arabidopsis thaliana] Peroxiredoxin (Rehydrin homolog) >gi|1926269|emb|CAA72804.1| [Arabidopsis thaliana] >gi|8778528|gb|AAF79536.1|AC023673_24
  misc_feature (1)..(216): Homolog of NCBI NO: 28393058 NR Description: putative peroxiredoxin [Arabidopsis thaliana]
  misc_feature (1)..(216): Homolog of NCBI NO: 7381260 NR Description: peroxiredoxin antioxidant [Brassica napus]
  misc_feature (1)..(216): Homolog of NCBI NO: 25990368 NR Description: 1-cys-peroxiredoxin [Brassica napus]
  misc_feature (1)..(215): Homolog of NCBI NO: 1710077 NR Description: Peroxiredoxin (Rehydrin homolog) (B15C)
  misc_feature (1)..(215): Homolog of NCBI NO: 34539782 NR Description: 1-Cys-peroxiredoxine [Triticum aestivum]
  misc_feature (1)..(215): Homolog of NCBI NO: 6466096 NR Description: 1-Cys peroxiredoxin [Fagopyrum esculentum]
  misc_feature (1)..(215): Homolog of NCBI NO: 12247762 NR Description: 1-Cys peroxiredoxin [Triticum turgidum subsp.
  misc_feature (1)..(215): Homolog of NCBI NO: 19423862 NR Description: 1-cys peroxiredoxin [Xerophyta viscosa]
  misc_feature (1)..(215): Homolog of NCBI NO: 27261084 NR Description: putative RAB24 protein [Oryza sativa (japonica
MPGITLGDTVPNLEVETTHDKFKLHDYFANSWTVLFSHPGDFTPVCTTELGAMAKYAHEFDKRGVKLLGLSCDDVQSHKDWIKDIEAFNHGSKVNYPIIADPNKEIIPQLNMIDPIENGPSRALHIVGPDSKIKLSFLYPSTTGRNMDEVLRALDSLLMASKHNNKIATPVNWKPDQPVVISPAVSDEEAKKMFPQGFKTADLPSKKGYLRHTEVS

SEQ ID NO: 100219 - protein, 164 aa, Arabidopsis thaliana
  peptide (1)..(164): Ceres Seq. ID no. 13604611
  misc_feature (1)..(100): Pfam Name: AhpC/TSA family Pfam Description: AhpC/TSA family
  misc_feature (1)..(164): Homolog of NCBI NO: 15221082 NR Description: peroxiredoxin [Arabidopsis thaliana] Peroxiredoxin (Rehydrin homolog) >gi|1926269|emb|CAA72804.1| [Arabidopsis thaliana] >gi|8778528|gb|AAF79536.1|AC023673_24
  misc_feature (1)..(164): Homolog of NCBI NO: 28393058 NR Description: putative peroxiredoxin [Arabidopsis thaliana]
  misc_feature (1)..(164): Homolog of NCBI NO: 7381260 NR Description: peroxiredoxin antioxidant [Brassica napus]
  misc_feature (1)..(164): Homolog of NCBI NO: 25990368 NR Description: 1-cys-peroxiredoxin [Brassica napus]
  misc_feature (1)..(163): Homolog of NCBI NO: 1710077 NR Description: Peroxiredoxin (Rehydrin homolog) (B15C)
  misc_feature (1)..(163): Homolog of NCBI NO: 34539782 NR Description: 1-Cys-peroxiredoxine [Triticum aestivum]
  misc_feature (1)..(163): Homolog of NCBI NO: 6466096 NR Description: 1-Cys peroxiredoxin [Fagopyrum esculentum]
  misc_feature (1)..(163): Homolog of NCBI NO: 12247762 NR Description: 1-Cys peroxiredoxin [Triticum turgidum subsp.
  misc_feature (1)..(163): Homolog of NCBI NO: 19423862 NR Description: 1-cys peroxiredoxin [Xerophyta viscosa]
  misc_feature (1)..(163): Homolog of NCBI NO: 27261084 NR Description: putative RAB24 protein [Oryza sativa (japonica
MAKYAHEFDKRGVKLLGLSCDDVQSHKDWIKDIEAFNHGSKVNYPIIADPNKEIIPQLNMIDPIENGPSRALHIVGPDSKIKLSFLYPSTTGRNMDEVLRALDSLLMASKHNNKIATPVNWKPDQPVVISPAVSDEEAKKMFPQGFKTADLPSKKGYLRHTEVS

SEQ ID NO: 100220 - DNA, 2290 bp, Arabidopsis thaliana
  misc_feature (1)..(2290): Ceres Seq. ID no. 13604637
  misc_feature: MA Experiment ID: 20000180 Result: Up-regulated in Transcription
  misc_feature: MA Experiment 20000180 PARAMETER Experiment Name: At_Germinating_Seeds_P Parameter: Age (hr) Value: 24 vs. 0
  misc_feature: MA Experiment 20000180 PARAMETER Experiment Name: At_Germinating_Seeds_P Parameter: Tissue Value: Germinating Seeds
  misc_feature: MA Experiment ID: 20000439 Result: Up-regulated in Transcription
  misc_feature: MA Experiment 20000439 PARAMETER Experiment Name: At_Roots__P Parameter: Age (day) Value: 14 vs. 21
  misc_feature: MA Experiment 20000439 PARAMETER Experiment Name: At_Roots__P Parameter: Organism Value: A. thaliana
  misc_feature: MA Experiment 20000439 PARAMETER Experiment Name: At_Roots__P Parameter: Tissue Value: Roots vs. Whole Plant
  misc_feature: MA Experiment ID: 20000495 Result: Up-regulated in Transcription
  misc_feature: MA Experiment 20000495 PARAMETER Experiment Name: At_Guard_Cells_P Parameter: Harvest Date Value: 8/2/2002
  misc_feature: MA Experiment 20000495 PARAMETER Experiment Name: At_Guard_Cells_P Parameter: Organism Value: A. thaliana
  misc_feature: MA Experiment 20000495 PARAMETER Experiment Name: At_Guard_Cells_P Parameter: Tissue Value: Guard Cells vs. Leaves
  misc_feature: MA Experiment ID: 20000527 Result: Down-regulated in Transcription
  misc_feature: MA Experiment 20000527 PARAMETER Experiment Name: At_10percent_PEG_P Parameter: Age (day) Value: 20
  misc_feature: MA Experiment 20000527 PARAMETER Experiment Name: At_10percent_PEG_P Parameter: Organism Value: A. thaliana
  misc_feature: MA Experiment 20000527 PARAMETER Experiment Name: At_10percent_PEG_P Parameter: Plant Line Value: WS
  misc_feature: MA Experiment 20000527 PARAMETER Experiment Name: At_10percent_PEG_P Parameter: Timepoint (day) Value: 20
  misc_feature: MA Experiment 20000527 PARAMETER Experiment Name: At_10percent_PEG_P Parameter: Tissue Value: Whole Plant
  misc_feature: MA Experiment 20000527 PARAMETER Experiment Name: At_10percent_PEG_P Parameter: Treatment Value: 10percent PEG vs. No Treatment
  misc_feature: MA Experiment ID: 20000794 Result: Up-regulated in Transcription
  misc_feature: MA Experiment 20000794 PARAMETER Experiment Name: At_Petals_P Parameter: Age (day) Value: 23-25 days
  misc_feature: MA Experiment 20000794 PARAMETER Experiment Name: At_Petals_P Parameter: Plant Line Value: WS
  misc_feature: MA Experiment 20000794 PARAMETER Experiment Name: At_Petals_P Parameter: Tissue Value: Petals vs. Whole plant
  misc_feature: MA Experiment ID: 20001451 Result: Down-regulated in Transcription
  misc_feature: MA Experiment 20001451 PARAMETER Experiment Name: At_Far-red-induction_P Parameter: Age (day) Value: 7
  misc_feature: MA Experiment 20001451 PARAMETER Experiment Name: At_Far-red-induction_P Parameter: Light Value: Far-red vs. White
  misc_feature: MA Experiment 20001451 PARAMETER Experiment Name: At_Far-red-induction_P Parameter: Organism Value: A. thaliana
  misc_feature: MA Experiment 20001451 PARAMETER Experiment Name: At_Far-red-induction_P Parameter: Plant Line Value: Columbia
  misc_feature: MA Experiment 20001451 PARAMETER Experiment Name: At_Far-red-induction_P Parameter: Timepoint (hr) Value: 24
  misc_feature: MA Experiment 20001451 PARAMETER Experiment Name: At_Far-red-induction_P Parameter: Tissue Value: Whole Plant
  misc_feature: MA Experiment ID: 20001459 Result: Up-regulated in Transcription
  misc_feature: MA Experiment 20001459 PARAMETER Experiment Name: At_50mM_NH4NO3_L-to-H_P Parameter: Age (day) Value: Undefined
  misc_feature: MA Experiment 20001459 PARAMETER Experiment Name: At_50mM_NH4NO3_L-to-H_P Parameter: Organism Value: Undefined
  misc_feature: MA Experiment 20001459 PARAMETER Experiment Name: At_50mM_NH4NO3_L-to-H_P Parameter: Plant Line Value: Undefined
  misc_feature: MA Experiment 20001459 PARAMETER Experiment Name: At_50mM_NH4NO3_L-to-H_P Parameter: Timepoint (hr) Value: 4
  misc_feature: MA Experiment 20001459 PARAMETER Experiment Name: At_50mM_NH4NO3_L-to-H_P Parameter: Tissue Value: Siliques
  misc_feature: MA Experiment 20001459 PARAMETER Experiment Name: At_50mM_NH4NO3_L-to-H_P Parameter: Treatment Value: 50mM NH4NO3 vs. 100mM Manitol
catcgctgttccagacagcgatgactcgagaaccggagtattccattctctcattaacggattctctaaagtgcgccaagcgtgcgcaagagccatcatgtcctacgcatctctcagcgtcaaggacctgaccagccttgtttcaagatccggaaccggttcgtcttcttcgctcaagcctccgggtcagacccgccccgtcaaggtcatcccgcttcagcatcctgacacctccaatgaagctcgtcctccttcgattcctttcgacgatatcttctccggatggacggcgaagatcaagcgcatgaggctcgtcgattggattgatactctctttccttgtttccgatggattcgaacttaccgatggagcgagtattttaagctcgatctcatggctggtatcaccgtcggtataatgcttgttccccaggcaatgtcgtatgcgaaactagctggccttccaccaatttacggtctatactcttcatttgtgccggtatttgtctatgccatatttggctcatcccgtcagcttgcaattggacctgtagcattggtttctcttctcgtctctaatgctttgggtggaatcgctgatacgaacgaggaattacatattgaattggccattttgttggcgcttttagttggaatcttggagtgcatcatggggctcttaaggcttggatggcttattcgtttcattagtcactcagtcatatctggatttacaagtgcttcggccattgtgattgggttatctcaaataaaatatttcctggggtatagcattgcccggagcagcaagattgtgccaatagtagagagcataatagctggagctgataagtttcagtggccacctttcgtgatgggatctcttattctggtgattcttcaagtgatgaaacatgtgggaaaagccaaaaaggaacttcagttcttacgagcagcagcgccactcaccgggattgtgctcggtacaaccattgcaaaagtgtttcatccgccttccatctctctggtgggagaaatacctcagggccttccaacattttctttcccaagaagttttgatcatgcaaaaacgttgcttccaacatcagctctcattactggtgttgccatcttggaatctgtgggaattgccaaagcgcttgcggcaaaaaacagatatgagttggattcaaattcagagttgtttggtcttggtgttgcaaatatattggggtcattattttctgcatacccagctacaggatccttttctaggtcagctgtgaataatgaaagtgaagctaagactggcctatcagggcttataacaggaatcatcattggatgttctctactgttcttgacaccgatgtttaaatacataccacagtgtgctttggcagcaatagtgatatctgccgttagtggcttggtggactatgacgaagctattttcctctggcgtgtggacaagagggatttttcgctttggaccatcactagcaccataacattgttcttcggaatagagatcggtgtccttgttggtgttggtttttcactagcattcgttatccacgagtctgcaaaccctcacattgctgtcttggggcggcttccaggcaccactgtgtacagaaacataaagcagtatccagaggcttacacatacaacgggattgtgatagttcgaatcgattctcctatttactttgccaacataagttacatcaaggacagactacgagaatatgaagtagctgttgacaaatacacaaaccggggactggaggtggatagaataaattttgtaatcctggaaatgtctcctgttacacacatagattcgagcgcagtggaagccttgaaagaactgtatcaagagtataaaacaagggatattcagctagcgatatcaaacccgaacaaagatgttcacttgacaatagcaagatcaggaatggtggagctagttggcaaggaatggttctttgtgagagtacacgacgccgtacaggtgtgtctacaatacgtacagagctctaacttggaggacaagcatttaagttttacgagacgatatggtgggagcaacaacaattcatcctcctccaacgcgctgttgaaggagccattgttatcagtggagaaataaaggatatgtaatgtaagtaatagctgtgtatagtttgttgcgattttgtaaaaacagtatacaatcttcattgtatcacctatataacaacattcttactcttcttttcccacaataaaaatagaccttgatgac

SEQ ID NO: 100221 - protein, 717 aa, Arabidopsis thaliana
  peptide (1)..(717): Ceres Seq. ID no. 13604638
  misc_feature (224)..(528): Pfam Name: Sulfate transporter family Pfam Description: Sulfate transporter family
  misc_feature (37)..(717): Homolog of NCBI NO: 15230510 NR Description: sulphate transporter -related [Arabidopsis >gi|11933425|dbj|BAB19761.1| sulfate transporter [Arabidopsis
  misc_feature (67)..(717): Homolog of NCBI NO: 26450310 NR Description: unknown protein [Arabidopsis thaliana]
  misc_feature (140)..(682): Homolog of NCBI NO: 37998897 NR Description: sulfate transporter [Brassica oleracea var.
  misc_feature (62)..(689): Homolog of NCBI NO: 20162451 NR Description: putative sulphate transporter [Oryza sativa]
  misc_feature (33)..(421): Homolog of NCBI NO: 11022647 NR Description: sulfate transporter-like protein [Arabidopsis
  misc_feature (33)..(384): Homolog of NCBI NO: 26453094 NR Description: putative sulfate transporter [Arabidopsis
  misc_feature (89)..(674): Homolog of NCBI NO: 13487717 NR Description: sulfate transporter 2 [Lycopersicon esculentum]
  misc_feature (108)..(674): Homolog of NCBI NO: 14270243 NR Description: sulfate transporter [Brassica napus]
  misc_feature (107)..(672): Homolog of NCBI NO: 7489442 NR Description: sulfate transport protein ST1, high affinity - >gi|1279876|gb|AAA97952.1| high affinity sulfate transporter
  misc_feature (107)..(672): Homolog of NCBI NO: 1217967 NR Description: high affinity sulphate transporter [Hordeum
IAVPDSDDSRTGVFHSLINGFSKVRQACARAIMSYASLSVKDLTSLVSRSGTGSSSSLKPPGQTRPVKVIPLQHPDTSNEARPPSIPFDDIFSGWTAKIKRMRLVDWIDTLFPCFRWIRTYRWSEYFKLDLMAGITVGIMLVPQAMSYAKLAGLPPIYGLYSSFVPVFVYAIFGSSRQLAIGPVALVSLLVSNALGGIADTNEELHIELAILLALLVGILECIMGLLRLGWLIRFISHSVISGFTSASAIVIGLSQIKYFLGYSIARSSKIVPIVESIIAGADKFQWPPFVMGSLILVILQVMKHVGKAKKELQFLRAAAPLTGIVLGTTIAKVFHPPSISLVGEIPQGLPTFSFPRSFDHAKTLLPTSALITGVAILESVGIAKALAAKNRYELDSNSELFGLGVANILGSLFSAYPATGSFSRSAVNNESEAKTGLSGLITGIIIGCSLLFLTPMFKYIPQCALAAIVISAVSGLVDYDEAIFLWRVDKRDFSLWTITSTITLFFGIEIGVLVGVGFSLAFVIHESANPHIAVLGRLPGTTVYRNIKQYPEAYTYNGIVIVRIDSPIYFANISYIKDRLREYEVAVDKYTNRGLEVDRINFVILEMSPVTHIDSSAVEALKELYQEYKTRDIQLAISNPNKDVHLTIARSGMVELVGKEWFFVRVHDAVQVCLQYVQSSNLEDKHLSFTRRYGGSNNNSSSSNALLKEPLLSVEK

SEQ ID NO: 100222 - protein, 685 aa, Arabidopsis thaliana
  peptide (1)..(685): Ceres Seq. ID no. 13604639
  misc_feature (192)..(496): Pfam Name: Sulfate transporter family Pfam Description: Sulfate transporter family
  misc_feature (5)..(685): Homolog of NCBI NO: 15230510 NR Description: sulphate transporter -related [Arabidopsis >gi|11933425|dbj|BAB19761.1| sulfate transporter [Arabidopsis
  misc_feature (35)..(685): Homolog of NCBI NO: 26450310 NR Description: unknown protein [Arabidopsis thaliana]
  misc_feature (108)..(650): Homolog of NCBI NO: 37998897 NR Description: sulfate transporter [Brassica oleracea var.
  misc_feature (30)..(657): Homolog of NCBI NO: 20162451 NR Description: putative sulphate transporter [Oryza sativa]
  misc_feature (1)..(389): Homolog of NCBI NO: 11022647 NR Description: sulfate transporter-like protein [Arabidopsis
  misc_feature (1)..(352): Homolog of NCBI NO: 26453094 NR Description: putative sulfate transporter [Arabidopsis
  misc_feature (57)..(642): Homolog of NCBI NO: 13487717 NR Description: sulfate transporter 2 [Lycopersicon esculentum]
  misc_feature (76)..(642): Homolog of NCBI NO: 14270243 NR Description: sulfate transporter [Brassica napus]
  misc_feature (75)..(640): Homolog of NCBI NO: 7489442 NR Description: sulfate transport protein ST1, high affinity - >gi|1279876|gb|AAA97952.1| high affinity sulfate transporter
  misc_feature (75)..(640): Homolog of NCBI NO: 1217967 NR Description: high affinity sulphate transporter [Hordeum
MSYASLSVKDLTSLVSRSGTGSSSSLKPPGQTRPVKVIPLQHPDTSNEARPPSIPFDDIFSGWTAKIKRMRLVDWIDTLFPCFRWIRTYRWSEYFKLDLMAGITVGIMLVPQAMSYAKLAGLPPIYGLYSSFVPVFVYAIFGSSRQLAIGPVALVSLLVSNALGGIADTNEELHIELAILLALLVGILECIMGLLRLGWLIRFISHSVISGFTSASAIVIGLSQIKYFLGYSIARSSKIVPIVESIIAGADKFQWPPFVMGSLILVILQVMKHVGKAKKELQFLRAAAPLTGIVLGTTIAKVFHPPSISLVGEIPQGLPTFSFPRSFDHAKTLLPTSALITGVAILESVGIAKALAAKNRYELDSNSELFGLGVANILGSLFSAYPATGSFSRSAVNNESEAKTGLSGLITGIIIGCSLLFLTPMFKYIPQCALAAIVISAVSGLVDYDEAIFLWRVDKRDFSLWTITSTITLFFGIEIGVLVGVGFSLAFVIHESANPHIAVLGRLPGTTVYRNIKQYPEAYTYNGIVIVRIDSPIYFANISYIKDRLREYEVAVDKYTNRGLEVDRINFVILEMSPVTHIDSSAVEALKELYQEYKTRDIQLAISNPNKDVHLTIARSGMVELVGKEWFFVRVHDAVQVCLQYVQSSNLEDKHLSFTRRYGGSNNNSSSSNALLKEPLLSVEK

SEQ ID NO: 100223 - protein, 616 aa, Arabidopsis thaliana
  peptide (1)..(616): Ceres Seq. ID no. 13604640
  misc_feature (123)..(427): Pfam Name: Sulfate transporter family Pfam Description: Sulfate transporter family
  misc_feature (1)..(616): Homolog of NCBI NO: 15230510 NR Description: sulphate transporter -related [Arabidopsis >gi|11933425|dbj|BAB19761.1| sulfate transporter [Arabidopsis
  misc_feature (1)..(616): Homolog of NCBI NO: 26450310 NR Description: unknown protein [Arabidopsis thaliana]
  misc_feature (39)..(581): Homolog of NCBI NO: 37998897 NR Description: sulfate transporter [Brassica oleracea var.
  misc_feature (1)..(588): Homolog of NCBI NO: 20162451 NR Description: putative sulphate transporter [Oryza sativa]
  misc_feature (1)..(320): Homolog of NCBI NO: 11022647 NR Description: sulfate transporter-like protein [Arabidopsis
  misc_feature (1)..(283): Homolog of NCBI NO: 26453094 NR Description: putative sulfate transporter [Arabidopsis
  misc_feature (1)..(573): Homolog of NCBI NO: 13487717 NR Description: sulfate transporter 2 [Lycopersicon esculentum]
  misc_feature (7)..(573): Homolog of NCBI NO: 14270243 NR Description: sulfate transporter [Brassica napus]
  misc_feature (6)..(571): Homolog of NCBI NO: 7489442 NR Description: sulfate transport protein ST1, high affinity - >gi|1279876|gb|AAA97952.1| high affinity sulfate transporter
  misc_feature (6)..(571): Homolog of NCBI NO: 1217967 NR Description: high affinity sulphate transporter [Hordeum
MRLVDWIDTLFPCFRWIRTYRWSEYFKLDLMAGITVGIMLVPQAMSYAKLAGLPPIYGLYSSFVPVFVYAIFGSSRQLAIGPVALVSLLVSNALGGIADTNEELHIELAILLALLVGILECIMGLLRLGWLIRFISHSVISGFTSASAIVIGLSQIKYFLGYSIARSSKIVPIVESIIAGADKFQWPPFVMGSLILVILQVMKHVGKAKKELQFLRAAAPLTGIVLGTTIAKVFHPPSISLVGEIPQGLPTFSFPRSFDHAKTLLPTSALITGVAILESVGIAKALAAKNRYELDSNSELFGLGVANILGSLFSAYPATGSFSRSAVNNESEAKTGLSGLITGIIIGCSLLFLTPMFKYIPQCALAAIVISAVSGLVDYDEAIFLWRVDKRDFSLWTITSTITLFFGIEIGVLVGVGFSLAFVIHESANPHIAVLGRLPGTTVYRNIKQYPEAYTYNGIVIVRIDSPIYFANISYIKDRLREYEVAVDKYTNRGLEVDRINFVILEMSPVTHIDSSAVEALKELYQEYKTRDIQLAISNPNKDVHLTIARSGMVELVGKEWFFVRVHDAVQVCLQYVQSSNLEDKHLSFTRRYGGSNNNSSSSNALLKEPLLSVEK

SEQ ID NO: 100224 - DNA, 2981 bp, Arabidopsis thaliana
  misc_feature (1)..(2981): Ceres Seq. ID no. 13604656
  misc_feature: MA Experiment ID: 20000184 Result: Down-regulated in Transcription
  misc_feature: MA Experiment 20000184 PARAMETER Experiment Name: At_Shoots__P Parameter: Age (day) Value: 7
  misc_feature: MA Experiment 20000184 PARAMETER Experiment Name: At_Shoots__P Parameter: Tissue Value: Shoots vs. Whole Plant
  misc_feature: MA Experiment ID: 20001451 Result: Up-regulated in Transcription
  misc_feature: MA Experiment 20001451 PARAMETER Experiment Name: At_Far-red-induction_P Parameter: Age (day) Value: 7
  misc_feature: MA Experiment 20001451 PARAMETER Experiment Name: At_Far-red-induction_P Parameter: Light Value: Far-red vs. White
  misc_feature: MA Experiment 20001451 PARAMETER Experiment Name: At_Far-red-induction_P Parameter: Organism Value: A. thaliana
  misc_feature: MA Experiment 20001451 PARAMETER Experiment Name: At_Far-red-induction_P Parameter: Plant Line Value: Columbia
  misc_feature: MA Experiment 20001451 PARAMETER Experiment Name: At_Far-red-induction_P Parameter: Timepoint (hr) Value: 24
  misc_feature: MA Experiment 20001451 PARAMETER Experiment Name: At_Far-red-induction_P Parameter: Tissue Value: Whole Plant
tgagggaaagatagagaatggataatggagggagcgtgttgtcgctctctgctccacacttcccttactccgccaccattctccgacgtcactctccggtggcttccatatctttctcccttaagcaaccaccaccgcaaccaccagaacctcctgagagtcctcctgacctccgccgcccggagaaatctattggttcttcttcatcttcttcctctccttccccctatcccttctcctaaaacccctcttaagattaatccactcaagggtttaaccaatcgctcttctgtgtctcctcttgttcaatcagaggtttcgagtaaagtttcttcctttggctcctctctagcatccaagctacgtttgtccagcaagctctctcctcctcctcctcctccacctccgcctcctgttgaggaaaccacccaattccgagatgagtttcggagtgacacgaaaccaccggaagaagaaactcgaaacccgcaacaggaattccgacaagaagggaagatattcgttggtaatttaccgacatggataaagaaaccagagtttgaagagttcttccgacagttcggaccgatagagaatgtgattctaatcaaaggacatcacgaggtcgagaaaaacgcgggatttgggttcattatttacgcggcagagaagtctgcaatgaaagctgtggagttcgacggcgttgagtttcacggcaggatattgacggtgaagctagacgacggaaagaggctgaaaacaaaggctgaacagagagtgaggtgggtagaggaaggagaagaagacacgaaaatgtctaataagtcgtcgtggcatcaagagagagaagggtctcgaaagtcactacagaggattttagataccaatggagataactggcaagctgttatttcagctttcgagaagatcagcaagccttcgaggacagagtttggtttgatggtgaagttctatggaagaagaggggatatgcatcgtgcacgtgagacttttgagagaatgcgcgcgaggggtatcacaccaacatcacgtatatacacaagccttattcacgcttatgcagttggtagagacatggacgaagcactgtcttgtgttcgtaaaatgaaggaagaaggaattgagatgagtttggtgacttatagtgtaatcgttggaggattctctaaagcgggacatgccgactgcagattactggtttgacgaggccaaacggatacacaaaacccttaatgccagtatatatggaaaaatcatatatgcacactgtcagacgtgcaatatggagcgggcagaggcattggtgagggagatggaagaagaaggtattgatgctcctattgctatctaccacaccatgatggatggttatacaatggtcgctgatgagaagaaaggcttagttgttttcaaaagacttaaggaatgtggatttactccaacagttgttacttatgggtgcctcattaatctttatactaaggttggaaagatttcaaaagccttggaagttagtagagtgatgaaggaagagggcgtaaagcataatttaaagacttattcgatgatgattaacggatttgtaaaactaaaagattgggccaatgcgtttgctgtatttgaagatatggtaaaagaaggcatgaaaccagatgttatactatacaacaacatcatctcagcattctgcgggatgggtaacatggatcgagcgatccagactgttaaggagatgcaaaagctgaggcatagaccaaccacacggacatttatgcctatcatacatggatatgcgaaatccggagacatgaggagatcactagaagtttttgatatgatgagacgatgtgggtgtgttccaaccgttcatactttcaatggtttgattaatggtttagttgagaaacgtcagatggaaaaggcggttgagatattagacgagatgacattggcgggtgtaagtgcaaacgaacatacttacacaaagatcatgcaaggctatgcatcagtcggtgataccggaaaagcctttgagtattttacaaggcttcaaaacgaaggtttggatgttgacattttcacttacgaggcgttacttaaagcttgctgcaaatcaggaagaatgcagagcgcattagctgtcacgaaagaaatgagtgcacggaatatcccgcgcaattccttcgtctataacatattaatcgacggatgggcacgaagaggcgatgtatgggaagccgcggatttgatacagcagatgaaaaaagaaggtgttaaacccgacattcatacttacacatccttcattagcgcttgttctaaggccggcgacatgaatagagctacacaaacaatcgaagaaatggaagcactaggtgtgaaacctaacatcaagacatacacgaccttaataaaaggatgggcgagagcatctcttccagagaaagccttaagttgctacgaggaaatgaaggcgatggggataaaacccgacaaagctgtgtatcattgccttctgacttcgcttctgtcgcgtgcttcaatcgcagaagcttacatttactcaggagtgatgactatctgcaaggaaatggtggaggcaggcttgattgttgatatgggaactgcggttcactggtctaaatgtctgtgtaagattgaagcttcaggtggtgagctcactgagacgttgcagaagactttcccacctgattggagctcgcatcatcatcaccatggcttcttagatcaagtttctgatgttgactccgatgaagatgatgttgatggtgaagatggtgaggacgatgaagatgttaactctgtttcggatttattatcaccttacaagtaagaaaaaactgatattgtaacaacttaaggaaagagcaatatcagcatatttttgtaattttgttttcttgtgttttacgtttttgcaaaataaaccttattgaacc

SEQ ID NO: 100225 - protein, 558 aa, Arabidopsis thaliana
  peptide (1)..(558): Ceres Seq. ID no. 13604657
  misc_feature (196)..(230): Pfam Name: PPR repeat Pfam Description: PPR repeat
  misc_feature (1)..(558): Homolog of NCBI NO: 18414702 NR Description: pentatricopeptide (PPR) repeat-containing protein
  misc_feature (1)..(457): Homolog of NCBI NO: 15983487 NR Description: AT5g04810/MUK11_13 [Arabidopsis thaliana]
  misc_feature (1)..(457): Homolog of NCBI NO: 9758456 NR Description: membrane-associated salt-inducible protein-like
  misc_feature (1)..(457): Homolog of NCBI NO: 11358102 NR Description: hypothetical protein T1E3.170 - Arabidopsis (fragment) >gi|7413543|emb|CAB86023.1| putative protein
  misc_feature (1)..(458): Homolog of NCBI NO: 15983487 NR Description: AT5g04810/MUK11_13 [Arabidopsis thaliana]
  misc_feature (1)..(458): Homolog of NCBI NO: 9758456 NR Description: membrane-associated salt-inducible protein-like
  misc_feature (1)..(458): Homolog of NCBI NO: 11358102 NR Description: hypothetical protein T1E3.170 - Arabidopsis (fragment) >gi|7413543|emb|CAB86023.1| putative protein
  misc_feature (23)..(548): Homolog of NCBI NO: 32488707 NR Description: OSJNBa0088H09.8 [Oryza sativa (japonica
  misc_feature (1)..(193): Homolog of NCBI NO: 15983487 NR Description: AT5g04810/MUK11_13 [Arabidopsis thaliana]
  misc_feature (130)..(518): Homolog of NCBI NO: 7489198 NR Description: salt-inducible protein, membrane-associated -
MPTADYWFDEAKRIHKTLNASIYGKIIYAHCQTCNMERAEALVREMEEEGIDAPIAIYHTMMDGYTMVADEKKGLVVFKRLKECGFTPTVVTYGCLINLYTKVGKISKALEVSRVMKEEGVKHNLKTYSMMINGFVKLKDWANAFAVFEDMVKEGMKPDVILYNNIISAFCGMGNMDRAIQTVKEMQKLRHRPTTRTFMPIIHGYAKSGDMRRSLEVFDMMRRCGCVPTVHTFNGLINGLVEKRQMEKAVEILDEMTLAGVSANEHTYTKIMQGYASVGDTGKAFEYFTRLQNEGLDVDIFTYEALLKACCKSGRMQSALAVTKEMSARNIPRNSFVYNILIDGWARRGDVWEAADLIQQMKKEGVKPDIHTYTSFISACSKAGDMNRATQTIEEMEALGVKPNIKTYTTLIKGWARASLPEKALSCYEEMKAMGIKPDKAVYHCLLTSLLSRASIAEAYIYSGVMTICKEMVEAGLIVDMGTAVHWSKCLCKIEASGGELTETLQKTFPPDWSSHHHHHGFLDQVSDVDSDEDDVDGEDGEDDEDVNSVSDLLSPYK

SEQ ID NO: 100226 - protein, 523 aa, Arabidopsis thaliana
  peptide (1)..(523): Ceres Seq. ID no. 13604658
  misc_feature (161)..(195): Pfam Name: PPR repeat Pfam Description: PPR repeat
  misc_feature (1)..(523): Homolog of NCBI NO: 18414702 NR Description: pentatricopeptide (PPR) repeat-containing protein
  misc_feature (1)..(422): Homolog of NCBI NO: 15983487 NR Description: AT5g04810/MUK11_13 [Arabidopsis thaliana]
  misc_feature (1)..(422): Homolog of NCBI NO: 9758456 NR Description: membrane-associated salt-inducible protein-like
  misc_feature (1)..(422): Homolog of NCBI NO: 11358102 NR Description: hypothetical protein T1E3.170 - Arabidopsis (fragment) >gi|7413543|emb|CAB86023.1| putative protein
  misc_feature (1)..(423): Homolog of NCBI NO: 15983487 NR Description: AT5g04810/MUK11_13 [Arabidopsis thaliana]
  misc_feature (1)..(423): Homolog of NCBI NO: 9758456 NR Description: membrane-associated salt-inducible protein-like
  misc_feature (1)..(423): Homolog of NCBI NO: 11358102 NR Description: hypothetical protein T1E3.170 - Arabidopsis (fragment) >gi|7413543|emb|CAB86023.1| putative protein
  misc_feature (1)..(513): Homolog of NCBI NO: 32488707 NR Description: OSJNBa0088H09.8 [Oryza sativa (japonica
  misc_feature (1)..(158): Homolog of NCBI NO: 15983487 NR Description: AT5g04810/MUK11_13 [Arabidopsis thaliana]
  misc_feature (95)..(483): Homolog of NCBI NO: 7489198 NR Description: salt-inducible protein, membrane-associated -
MERAEALVREMEEEGIDAPIAIYHTMMDGYTMVADEKKGLVVFKRLKECGFTPTVVTYGCLINLYTKVGKISKALEVSRVMKEEGVKHNLKTYSMMINGFVKLKDWANAFAVFEDMVKEGMKPDVILYNNIISAFCGMGNMDRAIQTVKEMQKLRHRPTTRTFMPIIHGYAKSGDMRRSLEVFDMMRRCGCVPTVHTFNGLINGLVEKRQMEKAVEILDEMTLAGVSANEHTYTKIMQGYASVGDTGKAFEYFTRLQNEGLDVDIFTYEALLKACCKSGRMQSALAVTKEMSARNIPRNSFVYNILIDGWARRGDVWEAADLIQQMKKEGVKPDIHTYTSFISACSKAGDMNRATQTIEEMEALGVKPNIKTYTTLIKGWARASLPEKALSCYEEMKAMGIKPDKAVYHCLLTSLLSRASIAEAYIYSGVMTICKEMVEAGLIVDMGTAVHWSKCLCKIEASGGELTETLQKTFPPDWSSHHHHHGFLDQVSDVDSDEDDVDGEDGEDDEDVNSVSDLLSPYK

SEQ ID NO: 100227 - protein, 513 aa, Arabidopsis thaliana
  peptide (1)..(513): Ceres Seq. ID no. 13604659
  misc_feature (151)..(185): Pfam Name: PPR repeat Pfam Description: PPR repeat
  misc_feature (1)..(513): Homolog of NCBI NO: 18414702 NR Description: pentatricopeptide (PPR) repeat-containing protein
  misc_feature (1)..(412): Homolog of NCBI NO: 15983487 NR Description: AT5g04810/MUK11_13 [Arabidopsis thaliana]
  misc_feature (1)..(412): Homolog of NCBI NO: 9758456 NR Description: membrane-associated salt-inducible protein-like
  misc_feature (1)..(412): Homolog of NCBI NO: 11358102 NR Description: hypothetical protein T1E3.170 - Arabidopsis (fragment) >gi|7413543|emb|CAB86023.1| putative protein
  misc_feature (1)..(413): Homolog of NCBI NO: 15983487 NR Description: AT5g04810/MUK11_13 [Arabidopsis thaliana]
  misc_feature (1)..(413): Homolog of NCBI NO: 9758456 NR Description: membrane-associated salt-inducible protein-like
  misc_feature (1)..(413): Homolog of NCBI NO: 11358102 NR Description: hypothetical protein T1E3.170 - Arabidopsis (fragment) >gi|7413543|emb|CAB86023.1| putative protein
  misc_feature (1)..(503): Homolog of NCBI NO: 32488707 NR Description: OSJNBa0088H09.8 [Oryza sativa (japonica
  misc_feature (1)..(148): Homolog of NCBI NO: 15983487 NR Description: AT5g04810/MUK11_13 [Arabidopsis thaliana]
  misc_feature (85)..(473): Homolog of NCBI NO: 7489198 NR Description: salt-inducible protein, membrane-associated -
MEEEGIDAPIAIYHTMMDGYTMVADEKKGLVVFKRLKECGFTPTVVTYGCLINLYTKVGKISKALEVSRVMKEEGVKHNLKTYSMMINGFVKLKDWANAFAVFEDMVKEGMKPDVILYNNIISAFCGMGNMDRAIQTVKEMQKLRHRPTTRTFMPIIHGYAKSGDMRRSLEVFDMMRRCGCVPTVHTFNGLINGLVEKRQMEKAVEILDEMTLAGVSANEHTYTKIMQGYASVGDTGKAFEYFTRLQNEGLDVDIFTYEALLKACCKSGRMQSALAVTKEMSARNIPRNSFVYNILIDGWARRGDVWEAADLIQQMKKEGVKPDIHTYTSFISACSKAGDMNRATQTIEEMEALGVKPNIKTYTTLIKGWARASLPEKALSCYEEMKAMGIKPDKAVYHCLLTSLLSRASIAEAYIYSGVMTICKEMVEAGLIVDMGTAVHWSKCLCKIEASGGELTETLQKTFPPDWSSHHHHHGFLDQVSDVDSDEDDVDGEDGEDDEDVNSVSDLLSPYK

SEQ ID NO: 100228 - DNA, 2526 bp, Arabidopsis thaliana
  misc_feature (1)..(2526): Ceres Seq. ID no. 13604660
  misc_feature: MA Experiment ID: 20001557 Result: Up-regulated in Transcription
  misc_feature: MA Experiment 20001557 PARAMETER Experiment Name: At_Drought_Soil_Dry_P Parameter: Age (day) Value: 27
  misc_feature: MA Experiment 20001557 PARAMETER Experiment Name: At_Drought_Soil_Dry_P Parameter: Organism Value: A. thaliana
  misc_feature: MA Experiment 20001557 PARAMETER Experiment Name: At_Drought_Soil_Dry_P Parameter: Plant Line Value: WS
  misc_feature: MA Experiment 20001557 PARAMETER Experiment Name: At_Drought_Soil_Dry_P Parameter: Post Timepoint (hr) Value: 3
  misc_feature: MA Experiment 20001557 PARAMETER Experiment Name: At_Drought_Soil_Dry_P Parameter: Post-Treatment Value: Re-Water vs. No Drought
  misc_feature: MA Experiment 20001557 PARAMETER Experiment Name: At_Drought_Soil_Dry_P Parameter: Timepoint (day) Value: 13
  misc_feature: MA Experiment 20001557 PARAMETER Experiment Name: At_Drought_Soil_Dry_P Parameter: Treatment Value: Drought vs. No Drought
aagtgtagtgctattaaactatcccttttattttcccacccaactcaatttattttctcattctttctctttactcttcttcagatctctctgtttctttctttgttgttgttatctggggatgctttctactctctgtttggtttccttcattgtgactttctattttctgggtttgtttcaagtcatgatttttccgatacccttttgatttttcttgctatttctcacctctgtataagcaagctctctgctgtttctcctcatccaagttgggtttatcagttcagctgtgtagaaattcaatcgtctgagaagtccgaggtttgatgtctgatggttttaagatcgaaaggatttgacttttatcagattagtaatgagattagattgtttttgaggttattgtaatcagatcttgatgctatttctggtgaaagagatttaagacaagttagggaatgggtaatacttgtgttggaccaagcagaaatggcttcttgcaatctgtttcagctgcaatgtggcggccaagagatggagatgattcggcttccatgagtaatggagatattgcaagtgaagctgtttcgggagagcttcgatctcgattatctgatgaagtccagaataaacctcctgaacaggtcacaatgccgaagccagggactgacgtcgagaccaaggacagagagattcgaactgaaagcaagcctgaaacgctagaggagataagccttgagtccaaaccagagactaagcaggagaccaagtcagagaccaagccggagtcaaaacctgatcctccagctaaacctaagaagcctaaacacatgaagagagtgtcaagtgcagggcttaggactgagtcagtgttgcagaggaagactgaaaacttcaaggaattctattccttgggaaggaaactcggacaagggcaatttgggacgacttttttatgtgtcgagaagactacggggaaggagtttgcctgcaagtcgattgctaagaggaagctattgactgatgaggacgttgaggatgtgagaagagaaattcagataatgcatcacttggctggtcaccctaatgtcatctccatcaaaggagcttatgaggatgttgtggcagtgcaccttgtaatggagtgttgtgcaggcggcgagctttttgacaggatcattcaacgcggtcactacacagagaggaaagcggctgagctcactagaaccattgttggggttgtagaggcttgccattctcttggtgttatgcatcgagacctcaagcccgagaattttctgtttgtcagtaaacacgaagattccctcttgaagacgattgattttggactctccatgttctttaaaccagacgatgtttttacagatgttgttggtagcccatattatgttgccccagaagttcttcgaaagcgttatggccctgaagctgatgtctggagtgctggagtgattgtgtacattttattaagcggagttcctccattctgggctgaaaccgaacaaggtattttcgaacaggtcctccacggtgatcttgacttttcgtccgatccatggccaagtatatctgaaagtgcaaaggatttagtgaggaaaatgcttgtcagggatcccaagaaaaggttaactgcccaccaagtattatgtcatccatgggttcaagtcgacggtgtggctccagacaagcctttggattctgctgttctgagccgtatgaagcagttttctgcaatgaacaagttcaagaaaatggctcttagagtcattgctgagagcttatctgaagaagaaatcgccggcttgaaagaaatgtttaatatgatagatgcggacaagagtggtcagataactttcgaagaactgaaagcaggactaaaacgagtaggggcgaatctcaaagagtctgaaattctcgacttgatgcaagctgctgatgtggacaacagcggaacaatagattacaaagagttcatagctgcaacattacatctaaacaaaatagagagagaggaccatttgtttgcagcctttacatactttgacaaagatgggagcggctatatcaccccagacgagcttcaacaagcttgtgaggagtttggtgttgaggatgtccgcatagaagaactgatgcgcgatgttgatcaagacaatgacgggcgaatagactacaacgagtttgtggcgatgatgcagaaaggaagcatcacaggaggacctgtgaaaatgggtctagagaaaagctttagcattgctcttaaactctagtttctcagtctatttaaaagtacaaaactaaagccaagaagacaaaagagttttctgataatatataccattttgattatgttgaagacatatgcacacagccaagattctctcttgccctcttttggattctctcaatcttttggatgaggttttgtcttagacttgttttggaaactttgttgtattgtgttacttcttgagcatatatagtcttctaacattacaaacc

SEQ ID NO: 100229 - protein, 610 aa, Arabidopsis thaliana
  peptide (1)..(610): Ceres Seq. ID no. 13604661
  misc_feature (150)..(408): Pfam Name: Protein kinase domain Pfam Description: Protein kinase domain
  misc_feature (51)..(609): Homolog of NCBI NO: 15228350 NR Description: calcium-dependent protein kinase (CDPK)(CPK2)
  misc_feature (74)..(609): Homolog of NCBI NO: 16215471 NR Description: calcium-dependent protein kinase 3 [Nicotiana
  misc_feature (1)..(92): Homolog of NCBI NO: 16215471 NR Description: calcium-dependent protein kinase 3 [Nicotiana
  misc_feature (74)..(609): Homolog of NCBI NO: 15289758 NR Description: calcium dependent protein kinase [Solanum
  misc_feature (1)..(92): Homolog of NCBI NO: 15289758 NR Description: calcium dependent protein kinase [Solanum
  misc_feature (70)..(609): Homolog of NCBI NO: 16215475 NR Description: calcium-dependent protein kinase 2 [Nicotiana
  misc_feature (1)..(86): Homolog of NCBI NO: 16215475 NR Description: calcium-dependent protein kinase 2 [Nicotiana
  misc_feature (73)..(609): Homolog of NCBI NO: 7434364 NR Description: calcium-dependent protein kinase (EC 2.7.1.-)
  misc_feature (1)..(79): Homolog of NCBI NO: 7434364 NR Description: calcium-dependent protein kinase (EC 2.7.1.-)
  misc_feature (69)..(609): Homolog of NCBI NO: 16215467 NR Description: calcium-dependent protein kinase 2 [Nicotiana
MGNTCVGPSRNGFLQSVSAAMWRPRDGDDSASMSNGDIASEAVSGELRSRLSDEVQNKPPEQVTMPKPGTDVETKDREIRTESKPETLEEISLESKPETKQETKSETKPESKPDPPAKPKKPKHMKRVSSAGLRTESVLQRKTENFKEFYSLGRKLGQGQFGTTFLCVEKTTGKEFACKSIAKRKLLTDEDVEDVRREIQIMHHLAGHPNVISIKGAYEDVVAVHLVMECCAGGELFDRIIQRGHYTERKAAELTRTIVGVVEACHSLGVMHRDLKPENFLFVSKHEDSLLKTIDFGLSMFFKPDDVFTDVVGSPYYVAPEVLRKRYGPEADVWSAGVIVYILLSGVPPFWAETEQGIFEQVLHGDLDFSSDPWPSISESAKDLVRKMLVRDPKKRLTAHQVLCHPWVQVDGVAPDKPLDSAVLSRMKQFSAMNKFKKMALRVIAESLSEEEIAGLKEMFNMIDADKSGQITFEELKAGLKRVGANLKESEILDLMQAADVDNSGTIDYKEFIAATLHLNKIEREDHLFAAFTYFDKDGSGYITPDELQQACEEFGVEDVRIEELMRDVDQDNDGRIDYNEFVAMMQKGSITGGPVKMGLEKSFSIALKL

SEQ ID NO: 100230 - protein, 590 aa, Arabidopsis thaliana
  peptide (1)..(590): Ceres Seq. ID no. 13604662
  misc_feature (130)..(388): Pfam Name: Protein kinase domain Pfam Description: Protein kinase domain
  misc_feature (31)..(589): Homolog of NCBI NO: 15228350 NR Description: calcium-dependent protein kinase (CDPK)(CPK2)
  misc_feature (54)..(589): Homolog of NCBI NO: 16215471 NR Description: calcium-dependent protein kinase 3 [Nicotiana
  misc_feature (1)..(72): Homolog of NCBI NO: 16215471 NR Description: calcium-dependent protein kinase 3 [Nicotiana
  misc_feature (54)..(589): Homolog of NCBI NO: 15289758 NR Description: calcium dependent protein kinase [Solanum
  misc_feature (1)..(72): Homolog of NCBI NO: 15289758 NR Description: calcium dependent protein kinase [Solanum
  misc_feature (50)..(589): Homolog of NCBI NO: 16215475 NR Description: calcium-dependent protein kinase 2 [Nicotiana
  misc_feature (1)..(66): Homolog of NCBI NO: 16215475 NR Description: calcium-dependent protein kinase 2 [Nicotiana
  misc_feature (53)..(589): Homolog of NCBI NO: 7434364 NR Description: calcium-dependent protein kinase (EC 2.7.1.-)
  misc_feature (1)..(59): Homolog of NCBI NO: 7434364 NR Description: calcium-dependent protein kinase (EC 2.7.1.-)
  misc_feature (49)..(589): Homolog of NCBI NO: 16215467 NR Description: calcium-dependent protein kinase 2 [Nicotiana
MWRPRDGDDSASMSNGDIASEAVSGELRSRLSDEVQNKPPEQVTMPKPGTDVETKDREIRTESKPETLEEISLESKPETKQETKSETKPESKPDPPAKPKKPKHMKRVSSAGLRTESVLQRKTENFKEFYSLGRKLGQGQFGTTFLCVEKTTGKEFACKSIAKRKLLTDEDVEDVRREIQIMHHLAGHPNVISIKGAYEDVVAVHLVMECCAGGELFDRIIQRGHYTERKAAELTRTIVGVVEACHSLGVMHRDLKPENFLFVSKHEDSLLKTIDFGLSMFFKPDDVFTDVVGSPYYVAPEVLRKRYGPEADVWSAGVIVYILLSGVPPFWAETEQGIFEQVLHGDLDFSSDPWPSISESAKDLVRKMLVRDPKKRLTAHQVLCHPWVQVDGVAPDKPLDSAVLSRMKQFSAMNKFKKMALRVIAESLSEEEIAGLKEMFNMIDADKSGQITFEELKAGLKRVGANLKESEILDLMQAADVDNSGTIDYKEFIAATLHLNKIEREDHLFAAFTYFDKDGSGYITPDELQQACEEFGVEDVRIEELMRDVDQDNDGRIDYNEFVAMMQKGSITGGPVKMGLEKSFSIALKL

SEQ ID NO: 100231 - protein, 578 aa, Arabidopsis thaliana
  peptide (1)..(578): Ceres Seq. ID no. 13604663
  misc_feature (118)..(376): Pfam Name: Protein kinase domain Pfam Description: Protein kinase domain
  misc_feature (19)..(577): Homolog of NCBI NO: 15228350 NR Description: calcium-dependent protein kinase (CDPK)(CPK2)
  misc_feature (42)..(577): Homolog of NCBI NO: 16215471 NR Description: calcium-dependent protein kinase 3 [Nicotiana
  misc_feature (1)..(60): Homolog of NCBI NO: 16215471 NR Description: calcium-dependent protein kinase 3 [Nicotiana
  misc_feature (42)..(577): Homolog of NCBI NO: 15289758 NR Description: calcium dependent protein kinase [Solanum
  misc_feature (1)..(60): Homolog of NCBI NO: 15289758 NR Description: calcium dependent protein kinase [Solanum
  misc_feature (38)..(577): Homolog of NCBI NO: 16215475 NR Description: calcium-dependent protein kinase 2 [Nicotiana
  misc_feature (1)..(54): Homolog of NCBI NO: 16215475 NR Description: calcium-dependent protein kinase 2 [Nicotiana
  misc_feature (41)..(577): Homolog of NCBI NO: 7434364 NR Description: calcium-dependent protein kinase (EC 2.7.1.-)
  misc_feature (1)..(47): Homolog of NCBI NO: 7434364 NR Description: calcium-dependent protein kinase (EC 2.7.1.-)
  misc_feature (37)..(577): Homolog of NCBI NO: 16215467 NR Description: calcium-dependent protein kinase 2 [Nicotiana
MSNGDIASEAVSGELRSRLSDEVQNKPPEQVTMPKPGTDVETKDREIRTESKPETLEEISLESKPETKQETKSETKPESKPDPPAKPKKPKHMKRVSSAGLRTESVLQRKTENFKEFYSLGRKLGQGQFGTTFLCVEKTTGKEFACKSIAKRKLLTDEDVEDVRREIQIMHHLAGHPNVISIKGAYEDVVAVHLVMECCAGGELFDRIIQRGHYTERKAAELTRTIVGVVEACHSLGVMHRDLKPENFLFVSKHEDSLLKTIDFGLSMFFKPDDVFTDVVGSPYYVAPEVLRKRYGPEADVWSAGVIVYILLSGVPPFWAETEQGIFEQVLHGDLDFSSDPWPSISESAKDLVRKMLVRDPKKRLTAHQVLCHPWVQVDGVAPDKPLDSAVLSRMKQFSAMNKFKKMALRVIAESLSEEEIAGLKEMFNMIDADKSGQITFEELKAGLKRVGANLKESEILDLMQAADVDNSGTIDYKEFIAATLHLNKIEREDHLFAAFTYFDKDGSGYITPDELQQACEEFGVEDVRIEELMRDVDQDNDGRIDYNEFVAMMQKGSITGGPVKMGLEKSFSIALKL

SEQ ID NO: 100232 - DNA, 1937 bp, Arabidopsis thaliana
  misc_feature (1)..(1937): Ceres Seq. ID no. 13604664
  misc_feature: MA Experiment ID: 20000307 Result: Up-regulated in Transcription
  misc_feature: MA Experiment 20000307 PARAMETER Experiment Name: At_Germinating_Seeds_Sub_P Parameter: Age (hr) Value: 24 vs. 0
  misc_feature: MA Experiment 20000307 PARAMETER Experiment Name: At_Germinating_Seeds_Sub_P Parameter: Organism Value: A. thaliana
  misc_feature: MA Experiment 20000307 PARAMETER Experiment Name: At_Germinating_Seeds_Sub_P Parameter: Plant Line Value: WS
  misc_feature: MA Experiment 20000307 PARAMETER Experiment Name: At_Germinating_Seeds_Sub_P Parameter: Tissue Value: Germinating Seeds
  misc_feature: MA Experiment ID: 20000314 Result: Up-regulated in Transcription
  misc_feature: MA Experiment 20000314 PARAMETER Experiment Name: At_14day_Shoots-Roots_Sub_P Parameter: Age (day) Value: 14
  misc_feature: MA Experiment 20000314 PARAMETER Experiment Name: At_14day_Shoots-Roots_Sub_P Parameter: Organism Value: A. thaliana
  misc_feature: MA Experiment 20000314 PARAMETER Experiment Name: At_14day_Shoots-Roots_Sub_P Parameter: Plant Line Value: WS
  misc_feature: MA Experiment 20000314 PARAMETER Experiment Name: At_14day_Shoots-Roots_Sub_P Parameter: Tissue Value: Roots vs. Whole Plant
  misc_feature: MA Experiment ID: 20000634 Result: Down-regulated in Transcription
  misc_feature: MA Experiment 20000634 PARAMETER Experiment Name: At_10percent_PEG_Sub_P Parameter: Age (day) Value: 12
  misc_feature: MA Experiment 20000634 PARAMETER Experiment Name: At_10percent_PEG_Sub_P Parameter: Organism Value: A. thaliana
  misc_feature: MA Experiment 20000634 PARAMETER Experiment Name: At_10percent_PEG_Sub_P Parameter: Plant Line Value: WS
  misc_feature: MA Experiment 20000634 PARAMETER Experiment Name: At_10percent_PEG_Sub_P Parameter: Timepoint (day) Value: 12
  misc_feature: MA Experiment 20000634 PARAMETER Experiment Name: At_10percent_PEG_Sub_P Parameter: Tissue Value: Whole Plant
  misc_feature: MA Experiment 20000634 PARAMETER Experiment Name: At_10percent_PEG_Sub_P Parameter: Treatment Value: 10% PEG vs. No Treatment
actcgagaacatcaaaaacatttgatcacacaaaacttcaatatctcacaaacgagaggccggttaggaggaaattacaaaaatgtcctcctacggcagactcgacgagcatgagcaagcgaaacttgaggcaagtcggaagacaaagaagagaattgccatcatcgctatatcttccatcgttctcgtctgcattgtcgtcggagccgtcgttggaaccacagctcgcgataacagcaagaaaccaccgacggagaataacggagagccaatatcagtctccgtgaaagccctgtgcgacgtgacattgcacaaagaaaaatgtttcgagacccttggatcggctccaaacgcgagccgatcaagcccagaggagcttttcaagtacgccgtcaaagtcaccatcacggagctctcgaaagttctcgacggattctccaacggcgaacacatggataacgccacgtcagcagcaatgggggcttgcgtggagcttatcgggctagccgttgatcaactcaacgaaacaatgacgtcgtccttgaagaactttgacgatctaaggacgtggcttagctccgtgggaacgtaccaagaaacgtgtatggatgcgttagtggaagcgaacaaaccaagtttaacgactttcggagaaaaccatttgaaaaactcgacggagatgactagcaatgcgttagcgatcataacgtggctagggaaaatcgctgacaccgttaagtttagacgacgtcgtttgttggagactggtaacgccaaagtcgttgtagctgacttgccgatgatggaaggtcggagacttttggagagtggtgatttgaagaagaaagcgactatcgtggtggctaaagacgggtcggggaaatatcggacgattggtgaggctttagcggaagtggaggagaagaatgagaaacctacgattatatatgtgaagaaaggagtttatttagagaatgttagggttgagaagacgaaatggaatgttgtgatggttggagatggacaaagtaagactatcgtctctgctggactcaacttcatcgatggaacccccactttcgaaaccgccacatttgctgtgtttggaaaggggttcatggctagggacatgggcttcattaacacagctggtccagctaagcatcaagccgtagctctaatggtaagcgcagacttatctgtgttctacaagtgcaccatggacgctttccaagatacaatgtacgctcatgcacaacgtcagttttaccgtgattgtgttatcctcggaaccgttgattttatatttggaaacgctgcggttgtattccaaaagtgcgagatcttgcctcgtcgtcctatgaaaggccagcagaatacaataaccgctcagggccggaaagatccgaaccaaaacacaggaatttctatccacaattgtactatcaagcctttggataacttaaccgatatccaaacattcctaggccggccttggaaggatttctctacaacggttatcatgaagtcgttcatggacaaattcatcaacccgaaagggtggttaccgtggacaggagataccgcgccagacacgatcttttacgccgagtacttaaattccgggccaggagcatcgaccaagaaccgggttaagtggcaagggttgaagacgtctttaacaaagaaggaagcaaataagtttacggtgaaaccttttatagacggcaataactggttgccggctaccaaagttcccttcaactctgatttttgatattttttgctggaaaaggctggtctgaaaactgatgcatggctagtcgttctttaatttgtttataacgaacatacaacattcccttctaaaacattttcttgtattggctttatttcaaagtgtctgaatttgtttctatatattcatataatttcgg

SEQ ID NO: 100233 - protein, 564 aa, Arabidopsis thaliana
  peptide (1)..(564): Ceres Seq. ID no. 13604665
  misc_feature (257)..(550): Pfam Name: Pectinesterase Pfam Description: Pectinesterase
  misc_feature (1)..(564): Homolog of NCBI NO: 15238377 NR Description: pectinesterase family [Arabidopsis thaliana]
  misc_feature (1)..(564): Homolog of NCBI NO: 28393771 NR Description: unknown protein [Arabidopsis thaliana]
  misc_feature (1)..(562): Homolog of NCBI NO: 15228355 NR Description: pectinesterase family [Arabidopsis thaliana]
  misc_feature (1)..(562): Homolog of NCBI NO: 6093739 NR Description: Pectinesterase 3 precursor (Pectin methylesterase
  misc_feature (7)..(554): Homolog of NCBI NO: 15231826 NR Description: pectinesterase family [Arabidopsis thaliana]
  misc_feature (8)..(558): Homolog of NCBI NO: 15220958 NR Description: pectinesterase family [Arabidopsis thaliana] Pectinesterase 1 precursor (Pectin methylesterase 1) (PE 1)
  misc_feature (8)..(558): Homolog of NCBI NO: 21593683 NR Description: pectinesterase, putative [Arabidopsis thaliana]
  misc_feature (20)..(561): Homolog of NCBI NO: 6689892 NR Description: pectin methyl esterase [Solanum tuberosum]
  misc_feature (20)..(561): Homolog of NCBI NO: 2098711 NR Description: pectinesterase [Citrus sinensis]
  misc_feature (26)..(560): Homolog of NCBI NO: 34394412 NR Description: putative pectin methylesterase [Oryza sativa
MSSYGRLDEHEQAKLEASRKTKKRIAIIAISSIVLVCIVVGAVVGTTARDNSKKPPTENNGEPISVSVKALCDVTLHKEKCFETLGSAPNASRSSPEELFKYAVKVTITELSKVLDGFSNGEHMDNATSAAMGACVELIGLAVDQLNETMTSSLKNFDDLRTWLSSVGTYQETCMDALVEANKPSLTTFGENHLKNSTEMTSNALAIITWLGKIADTVKFRRRRLLETGNAKVVVADLPMMEGRRLLESGDLKKKATIVVAKDGSGKYRTIGEALAEVEEKNEKPTIIYVKKGVYLENVRVEKTKWNVVMVGDGQSKTIVSAGLNFIDGTPTFETATFAVFGKGFMARDMGFINTAGPAKHQAVALMVSADLSVFYKCTMDAFQDTMYAHAQRQFYRDCVILGTVDFIFGNAAVVFQKCEILPRRPMKGQQNTITAQGRKDPNQNTGISIHNCTIKPLDNLTDIQTFLGRPWKDFSTTVIMKSFMDKFINPKGWLPWTGDTAPDTIFYAEYLNSGPGASTKNRVKWQGLKTSLTKKEANKFTVKPFIDGNNWLPATKVPFNSDF

SEQ ID NO: 100234 - protein, 441 aa, Arabidopsis thaliana
  peptide (1)..(441): Ceres Seq. ID no. 13604666
  misc_feature (134)..(427): Pfam Name: Pectinesterase Pfam Description: Pectinesterase
  misc_feature (1)..(441): Homolog of NCBI NO: 15238377 NR Description: pectinesterase family [Arabidopsis thaliana]
  misc_feature (1)..(441): Homolog of NCBI NO: 28393771 NR Description: unknown protein [Arabidopsis thaliana]
  misc_feature (1)..(439): Homolog of NCBI NO: 15228355 NR Description: pectinesterase family [Arabidopsis thaliana]
  misc_feature (1)..(439): Homolog of NCBI NO: 6093739 NR Description: Pectinesterase 3 precursor (Pectin methylesterase
  misc_feature (1)..(431): Homolog of NCBI NO: 15231826 NR Description: pectinesterase family [Arabidopsis thaliana]
  misc_feature (1)..(435): Homolog of NCBI NO: 15220958 NR Description: pectinesterase family [Arabidopsis thaliana] Pectinesterase 1 precursor (Pectin methylesterase 1) (PE 1)
  misc_feature (1)..(435): Homolog of NCBI NO: 21593683 NR Description: pectinesterase, putative [Arabidopsis thaliana]
  misc_feature (1)..(438): Homolog of NCBI NO: 6689892 NR Description: pectin methyl esterase [Solanum tuberosum]
  misc_feature (1)..(438): Homolog of NCBI NO: 2098711 NR Description: pectinesterase [Citrus sinensis]
  misc_feature (1)..(437): Homolog of NCBI NO: 34394412 NR Description: putative pectin methylesterase [Oryza sativa
MDNATSAAMGACVELIGLAVDQLNETMTSSLKNFDDLRTWLSSVGTYQETCMDALVEANKPSLTTFGENHLKNSTEMTSNALAIITWLGKIADTVKFRRRRLLETGNAKVVVADLPMMEGRRLLESGDLKKKATIVVAKDGSGKYRTIGEALAEVEEKNEKPTIIYVKKGVYLENVRVEKTKWNVVMVGDGQSKTIVSAGLNFIDGTPTFETATFAVFGKGFMARDMGFINTAGPAKHQAVALMVSADLSVFYKCTMDAFQDTMYAHAQRQFYRDCVILGTVDFIFGNAAVVFQKCEILPRRPMKGQQNTITAQGRKDPNQNTGISIHNCTIKPLDNLTDIQTFLGRPWKDFSTTVIMKSFMDKFINPKGWLPWTGDTAPDTIFYAEYLNSGPGASTKNRVKWQGLKTSLTKKEANKFTVKPFIDGNNWLPATKVPFNSDF

SEQ ID NO: 100235 - protein, 433 aa, Arabidopsis thaliana
  peptide (1)..(433): Ceres Seq. ID no. 13604667
  misc_feature (126)..(419): Pfam Name: Pectinesterase Pfam Description: Pectinesterase
  misc_feature (1)..(433): Homolog of NCBI NO: 15238377 NR Description: pectinesterase family [Arabidopsis thaliana]
  misc_feature (1)..(433): Homolog of NCBI NO: 28393771 NR Description: unknown protein [Arabidopsis thaliana]
  misc_feature (1)..(431): Homolog of NCBI NO: 15228355 NR Description: pectinesterase family [Arabidopsis thaliana]
  misc_feature (1)..(431): Homolog of NCBI NO: 6093739 NR Description: Pectinesterase 3 precursor (Pectin methylesterase
  misc_feature (1)..(423): Homolog of NCBI NO: 15231826 NR Description: pectinesterase family [Arabidopsis thaliana]
  misc_feature (1)..(427): Homolog of NCBI NO: 15220958 NR Description: pectinesterase family [Arabidopsis thaliana] Pectinesterase 1 precursor (Pectin methylesterase 1) (PE 1)
  misc_feature (1)..(427): Homolog of NCBI NO: 21593683 NR Description: pectinesterase, putative [Arabidopsis thaliana]
  misc_feature (1)..(430): Homolog of NCBI NO: 6689892 NR Description: pectin methyl esterase [Solanum tuberosum]
  misc_feature (1)..(430): Homolog of NCBI NO: 2098711 NR Description: pectinesterase [Citrus sinensis]
  misc_feature (1)..(429): Homolog of NCBI NO: 34394412 NR Description: putative pectin methylesterase [Oryza sativa
MGACVELIGLAVDQLNETMTSSLKNFDDLRTWLSSVGTYQETCMDALVEANKPSLTTFGENHLKNSTEMTSNALAIITWLGKIADTVKFRRRRLLETGNAKVVVADLPMMEGRRLLESGDLKKKATIVVAKDGSGKYRTIGEALAEVEEKNEKPTIIYVKKGVYLENVRVEKTKWNVVMVGDGQSKTIVSAGLNFIDGTPTFETATFAVFGKGFMARDMGFINTAGPAKHQAVALMVSADLSVFYKCTMDAFQDTMYAHAQRQFYRDCVILGTVDFIFGNAAVVFQKCEILPRRPMKGQQNTITAQGRKDPNQNTGISIHNCTIKPLDNLTDIQTFLGRPWKDFSTTVIMKSFMDKFINPKGWLPWTGDTAPDTIFYAEYLNSGPGASTKNRVKWQGLKTSLTKKEANKFTVKPFIDGNNWLPATKVPFNSDF

SEQ ID NO: 100236 - DNA, 1875 bp, Arabidopsis thaliana
  misc_feature (1)..(1875): Ceres Seq. ID no. 13604668
  misc_feature: MA Experiment ID: 20000307 Result: Up-regulated in Transcription
  misc_feature: MA Experiment 20000307 PARAMETER Experiment Name: At_Germinating_Seeds_Sub_P Parameter: Age (hr) Value: 24 vs. 0
  misc_feature: MA Experiment 20000307 PARAMETER Experiment Name: At_Germinating_Seeds_Sub_P Parameter: Organism Value: A. thaliana
  misc_feature: MA Experiment 20000307 PARAMETER Experiment Name: At_Germinating_Seeds_Sub_P Parameter: Plant Line Value: WS
  misc_feature: MA Experiment 20000307 PARAMETER Experiment Name: At_Germinating_Seeds_Sub_P Parameter: Tissue Value: Germinating Seeds
  misc_feature: MA Experiment ID: 20000327 Result: Down-regulated in Transcription
  misc_feature: MA Experiment 20000327 PARAMETER Experiment Name: At_42deg_Heat_Sub_P Parameter: Age (day) Value: 14
  misc_feature: MA Experiment 20000327 PARAMETER Experiment Name: At_42deg_Heat_Sub_P Parameter: Organism Value: A. thaliana
  misc_feature: MA Experiment 20000327 PARAMETER Experiment Name: At_42deg_Heat_Sub_P Parameter: Plant Line Value: WS
  misc_feature: MA Experiment 20000327 PARAMETER Experiment Name: At_42deg_Heat_Sub_P Parameter: Temperature (deg C) Value: 42 vs. 22
  misc_feature: MA Experiment 20000327 PARAMETER Experiment Name: At_42deg_Heat_Sub_P Parameter: Timepoint (hr) Value: 1
  misc_feature: MA Experiment 20000327 PARAMETER Experiment Name: At_42deg_Heat_Sub_P Parameter: Tissue Value: Aerial
  misc_feature: MA Experiment ID: 20000634 Result: Up-regulated in Transcription
  misc_feature: MA Experiment 20000634 PARAMETER Experiment Name: At_10percent_PEG_Sub_P Parameter: Age (day) Value: 12
  misc_feature: MA Experiment 20000634 PARAMETER Experiment Name: At_10percent_PEG_Sub_P Parameter: Organism Value: A. thaliana
  misc_feature: MA Experiment 20000634 PARAMETER Experiment Name: At_10percent_PEG_Sub_P Parameter: Plant Line Value: WS
  misc_feature: MA Experiment 20000634 PARAMETER Experiment Name: At_10percent_PEG_Sub_P Parameter: Timepoint (day) Value: 12
  misc_feature: MA Experiment 20000634 PARAMETER Experiment Name: At_10percent_PEG_Sub_P Parameter: Tissue Value: Whole Plant
  misc_feature: MA Experiment 20000634 PARAMETER Experiment Name: At_10percent_PEG_Sub_P Parameter: Treatment Value: 10% PEG vs. No Treatment
atgcaaactcattcttcatctctcgtgttcttggctcttctctgtctgtcatgggctttactagtctcaccaacacgtcctccgtcacaacctccatcacatcctccaatacagccttcgtcacagccgccaacacagcctccgtcacagccaccaacgcagcctccaacacagcctccgtcacatccaccaacacagcctccaacaccgccaccatcacagtctccatcgcagccttctccactaccaccaaacatcgcttgtaaatccactccttacccaaagctctgccgcacgatcctctccgccgttaaatcatcaccttccgatccttaccattacggaaagttcacaatgaagcaatgcctcaaacaagctcgtcgcctctccaaagtcatcaaccgctttgcccagcgcgtggaagctgatccaggtacgtcgacggtggaagaggtcagtgcggtggctgattgcggtgagctagcagagcttagcgtcgaataccttgaaacggttacggaggagctgaaagcggcggagctgatgacggctgcgctcgttgatcgtgtcacgagtcttctcggtggcgttgtgactaatcagcagacgtgcctcgacggtcttgtggacgctaagagcggatttgcgacggcgattggaacgccgttagggaatctaacgcgcctctacagtgtgtcgttggggcttgtgagtcacgcgcttaaccgtaatttgaagaggtataaaggttccaaggggaaaatctttggtggtggtaacaaacccgttcgtgaacctctcgagactttgattaaggttttacgcaaaacatgcgacaagggcaaagattgtcggaaagctaacagaaatttaggtgagctaggagagacgagcggtggatcgatcctcgtaagggaagcagtgaccgtcggtccatatgaaaccgataacttccccaccataactgaggccgttgctgccgcacctaatcacacattcccggagcaaggctacttcgtaatctatgcaagggcaggtctttacgaagaatatgttgtcatttcaaataaaaaaagaaacataatgcttattggggacggaatcaataaaactatcatttctggaaaccacagttttattgatggttggacaacgtataattcttcgacctttgcggtggtgggagaccgatttgttgcggttgatgtgacattccgaaacacagctggaccagagaagcaccaggctgtggccgtaagaaacaatgcggatggatcgacattttatcgatgtagttttgaaggctatcaagatactctttacgttcattctttgagacagttctatcgtgaatgtgatatatatgggaccatagattttatattcggaaatgcagctgccatatttcaaaactgcaacatatatgcccgaaaaccgatggcaaatcagaagaatgcagtgacagcccatggaagaactgacccaaaccagaaaactggaatctccatcattaattgtactattggagctgccccggacctcgctgctgaccccaagtcgaccatgacattccttgggcggccatggaagccttactcgaggacggtctacatacaatcatacatcagcgatgttgtccaaccggtagggtggctggaatggaatggtacaaccgggctagacacgatctcctatggtgaatatgacaattttggaccgggggctgatacaagtaaaagggtccaatggtcaggatatagcctattgaacttggtacaagccatgaacttcaccgtatataatttcactttgggagacacttggttgcctcagactgacattcccttctacggcggtttgcttcacaccgaatga

SEQ ID NO: 100237 - protein, 624 aa, Arabidopsis thaliana
  peptide (1)..(624): Ceres Seq. ID no. 13604669
  misc_feature (307)..(606): Pfam Name: Pectinesterase Pfam Description: Pectinesterase
  misc_feature (1)..(624): Homolog of NCBI NO: 6630558 NR Description: putative pectinesterase [Arabidopsis thaliana]
  misc_feature (1)..(624): Homolog of NCBI NO: 30681457 NR Description: pectinesterase, putative [Arabidopsis thaliana]
  misc_feature (82)..(621): Homolog of NCBI NO: 18411914 NR Description: expressed protein [Arabidopsis thaliana]
  misc_feature (82)..(621): Homolog of NCBI NO: 19424045 NR Description: unknown protein [Arabidopsis thaliana]
  misc_feature (362)..(624): Homolog of NCBI NO: 21618192 NR Description: putative pectinesterase [Arabidopsis thaliana]
  misc_feature (362)..(624): Homolog of NCBI NO: 18398974 NR Description: pectinesterase, putative [Arabidopsis thaliana]
  misc_feature (88)..(621): Homolog of NCBI NO: 18379010 NR Description: pectinesterase family [Arabidopsis thaliana]
  misc_feature (83)..(621): Homolog of NCBI NO: 31321894 NR Description: papillar cell-specific pectin methylesterase-like
  misc_feature (68)..(621): Homolog of NCBI NO: 18407388 NR Description: pectinesterase family [Arabidopsis thaliana]
  misc_feature (306)..(621): Homolog of NCBI NO: 7447370 NR Description: probable pectinesterase (EC 3.1.1.11) T30B22.15 -
MQTHSSSLVFLALLCLSWALLVSPTRPPSQPPSHPPIQPSSQPPTQPPSQPPTQPPTQPPSHPPTQPPTPPPSQSPSQPSPLPPNIACKSTPYPKLCRTILSAVKSSPSDPYHYGKFTMKQCLKQARRLSKVINRFAQRVEADPGTSTVEEVSAVADCGELAELSVEYLETVTEELKAAELMTAALVDRVTSLLGGVVTNQQTCLDGLVDAKSGFATAIGTPLGNLTRLYSVSLGLVSHALNRNLKRYKGSKGKIFGGGNKPVREPLETLIKVLRKTCDKGKDCRKANRNLGELGETSGGSILVREAVTVGPYETDNFPTITEAVAAAPNHTFPEQGYFVIYARAGLYEEYVVISNKKRNIMLIGDGINKTIISGNHSFIDGWTTYNSSTFAVVGDRFVAVDVTFRNTAGPEKHQAVAVRNNADGSTFYRCSFEGYQDTLYVHSLRQFYRECDIYGTIDFIFGNAAAIFQNCNIYARKPMANQKNAVTAHGRTDPNQKTGISIINCTIGAAPDLAADPKSTMTFLGRPWKPYSRTVYIQSYISDVVQPVGWLEWNGTTGLDTISYGEYDNFGPGADTSKRVQWSGYSLLNLVQAMNFTVYNFTLGDTWLPQTDIPFYGGLLHTE

SEQ ID NO: 100238 - protein, 506 aa, Arabidopsis thaliana
  peptide (1)..(506): Ceres Seq. ID no. 13604670
  misc_feature (189)..(488): Pfam Name: Pectinesterase Pfam Description: Pectinesterase
  misc_feature (1)..(506): Homolog of NCBI NO: 6630558 NR Description: putative pectinesterase [Arabidopsis thaliana]
  misc_feature (1)..(506): Homolog of NCBI NO: 30681457 NR Description: pectinesterase, putative [Arabidopsis thaliana]
  misc_feature (1)..(503): Homolog of NCBI NO: 18411914 NR Description: expressed protein [Arabidopsis thaliana]
  misc_feature (1)..(503): Homolog of NCBI NO: 19424045 NR Description: unknown protein [Arabidopsis thaliana]
  misc_feature (244)..(506): Homolog of NCBI NO: 21618192 NR Description: putative pectinesterase [Arabidopsis thaliana]
  misc_feature (244)..(506): Homolog of NCBI NO: 18398974 NR Description: pectinesterase, putative [Arabidopsis thaliana]
  misc_feature (1)..(503): Homolog of NCBI NO: 18379010 NR Description: pectinesterase family [Arabidopsis thaliana]
  misc_feature (1)..(503): Homolog of NCBI NO: 31321894 NR Description: papillar cell-specific pectin methylesterase-like
  misc_feature (1)..(503): Homolog of NCBI NO: 18407388 NR Description: pectinesterase family [Arabidopsis thaliana]
  misc_feature (188)..(503): Homolog of NCBI NO: 7447370 NR Description: probable pectinesterase (EC 3.1.1.11) T30B22.15 -
MKQCLKQARRLSKVINRFAQRVEADPGTSTVEEVSAVADCGELAELSVEYLETVTEELKAAELMTAALVDRVTSLLGGVVTNQQTCLDGLVDAKSGFATAIGTPLGNLTRLYSVSLGLVSHALNRNLKRYKGSKGKIFGGGNKPVREPLETLIKVLRKTCDKGKDCRKANRNLGELGETSGGSILVREAVTVGPYETDNFPTITEAVAAAPNHTFPEQGYFVIYARAGLYEEYVVISNKKRNIMLIGDGINKTIISGNHSFIDGWTTYNSSTFAVVGDRFVAVDVTFRNTAGPEKHQAVAVRNNADGSTFYRCSFEGYQDTLYVHSLRQFYRECDIYGTIDFIFGNAAAIFQNCNIYARKPMANQKNAVTAHGRTDPNQKTGISIINCTIGAAPDLAADPKSTMTFLGRPWKPYSRTVYIQSYISDVVQPVGWLEWNGTTGLDTISYGEYDNFGPGADTSKRVQWSGYSLLNLVQAMNFTVYNFTLGDTWLPQTDIPFYGGLLHTE

SEQ ID NO: 100239 - protein, 443 aa, Arabidopsis thaliana
  peptide (1)..(443): Ceres Seq. ID no. 13604671
  misc_feature (126)..(425): Pfam Name: Pectinesterase Pfam Description: Pectinesterase
  misc_feature (1)..(443): Homolog of NCBI NO: 6630558 NR Description: putative pectinesterase [Arabidopsis thaliana]
  misc_feature (1)..(443): Homolog of NCBI NO: 30681457 NR Description: pectinesterase, putative [Arabidopsis thaliana]
  misc_feature (1)..(440): Homolog of NCBI NO: 18411914 NR Description: expressed protein [Arabidopsis thaliana]
  misc_feature (1)..(440): Homolog of NCBI NO: 19424045 NR Description: unknown protein [Arabidopsis thaliana]
  misc_feature (181)..(443): Homolog of NCBI NO: 21618192 NR Description: putative pectinesterase [Arabidopsis thaliana]
  misc_feature (181)..(443): Homolog of NCBI NO: 18398974 NR Description: pectinesterase, putative [Arabidopsis thaliana]
  misc_feature (1)..(440): Homolog of NCBI NO: 18379010 NR Description: pectinesterase family [Arabidopsis thaliana]
  misc_feature (1)..(440): Homolog of NCBI NO: 31321894 NR Description: papillar cell-specific pectin methylesterase-like
  misc_feature (1)..(440): Homolog of NCBI NO: 18407388 NR Description: pectinesterase family [Arabidopsis thaliana]
  misc_feature (125)..(440): Homolog of NCBI NO: 7447370 NR Description: probable pectinesterase (EC 3.1.1.11) T30B22.15 -
MTAALVDRVTSLLGGVVTNQQTCLDGLVDAKSGFATAIGTPLGNLTRLYSVSLGLVSHALNRNLKRYKGSKGKIFGGGNKPVREPLETLIKVLRKTCDKGKDCRKANRNLGELGETSGGSILVREAVTVGPYETDNFPTITEAVAAAPNHTFPEQGYFVIYARAGLYEEYVVISNKKRNIMLIGDGINKTIISGNHSFIDGWTTYNSSTFAVVGDRFVAVDVTFRNTAGPEKHQAVAVRNNADGSTFYRCSFEGYQDTLYVHSLRQFYRECDIYGTIDFIFGNAAAIFQNCNIYARKPMANQKNAVTAHGRTDPNQKTGISIINCTIGAAPDLAADPKSTMTFLGRPWKPYSRTVYIQSYISDVVQPVGWLEWNGTTGLDTISYGEYDNFGPGADTSKRVQWSGYSLLNLVQAMNFTVYNFTLGDTWLPQTDIPFYGGLLHTE

SEQ ID NO: 100240 - DNA, 2131 bp, Arabidopsis thaliana
  misc_feature (1)..(2131): Ceres Seq. ID no. 13604679
  misc_feature: MA Experiment ID: 20000171 Result: Up-regulated in Transcription
  misc_feature: MA Experiment 20000171 PARAMETER Experiment Name: At_42deg_Heat_P Parameter: Age (day) Value: 14
  misc_feature: MA Experiment 20000171 PARAMETER Experiment Name: At_42deg_Heat_P Parameter: Organism Value: A. thaliana
  misc_feature: MA Experiment 20000171 PARAMETER Experiment Name: At_42deg_Heat_P Parameter: Plant Line Value: WS
  misc_feature: MA Experiment 20000171 PARAMETER Experiment Name: At_42deg_Heat_P Parameter: Temperature (deg C) Value: 42 vs. 22
  misc_feature: MA Experiment 20000171 PARAMETER Experiment Name: At_42deg_Heat_P Parameter: Timepoint (hr) Value: 1
  misc_feature: MA Experiment 20000171 PARAMETER Experiment Name: At_42deg_Heat_P Parameter: Tissue Value: Aerial
gcgggcttcataaatctatatacagacaaatttacacataaagaaacgcattaaaaaaactatttactcagattcagcttcttctccacgcaaagactcgcttctctttttttctcttcctgagtttggattttttttgcttgagctgaatcatgttttattctcaccagcttctagctcgaaaagctccgttgggtcagatatggatggccgctacattgcacgcgaagatcaaccggaagaaactagataagctcgatatcattcaaatctgcgaagagattttgaatccgtcggttccgatggctcttagactctccgggattcttatgggtggtgttgtgattgtttatgagaggaaagtgaagctcctattcgatgatgttaatcgctttctggttgaaattaatggagcttggcgcacaaaatctgttccggatcccactttactacctaaaggaaaaacccatgccaggaaagaggctgttacattgcctgagaacgaagaagctgattttggagattttgaacagactcgtaatgttcctaaatttggcaattacatggattttcagcagacttttatttccatgcggttagatgaatcccatgttaacaataaccccgagccagaagatcttggacagcagttccatcaagctgatgccgagaatatcacactctttgagtatcatggttcattccagaccaacaatgaaacatatgatcgttttgaaagatttgacatcgaaggagatgatgaaacacagatgaactccaatccaagagaaggcgctgaaatacctacaactctcatcccatcaccacctcgtcatcatgacattcccgaaggagtcaaccccacaagccctcagcgccaggagcaacaggagaatcgtagggacggatttgctgagcagatggaggaacaaaacataccggacaaagaggaacacgatagaccacaaccagcgaaaaagagagcaagaaagacagctacttcagcgatggattatgagcaaactattatcgctggtcatgtttaccagtcatggctccaggatacttctgacattctctgtaggggggaaaagagaaaggttcgaggaactatccggccagacatggaaagtttcaaacgtgcgaatatgccacctacacaactctttgaaaaggacagttcttacccgcctcagctttaccagctttggtcaaagaatactcaagttcttcaaacctcatcatctgaatctcgacatcctgatctccgtgcggaacaatctccagggtttgttcaggagagaatgcataaccaccatcaaacagaccatcatgagcgcagtgacacaagctcccaaaatcttgatagtcccgcagaaatactccggacagttcgtactgggaaaggtgcttcagtagaaagcatgatggctggatctcgagcaagccctgaaactattaaccgccaggctgctgatattaatgtcacgccattctattctggagatgatgtgagatccatgcctagtacaccatccgcacgtggagcagcttcaattaacaacatagagatcagctctaaaagtcgcatgcccaatagaaaaagaccaaattcctcaccaagaagaggactcgaaccagtggcggaagagagaccgtgggagcaccgtgaatatgagtttgagttttcaatgttacctgaaaaacgcttcacagccgataaagaaatactatttgaaactgcatctacacagactcaaaagccagtgtgcaatcaatcagacgagatgataacagatagcatcaaaagtcacctgaagacacactttgaaacacctggagctcctcaagtggaatctcttaacaagctcgctgttggaatggacagaaacgctgcagctaaactcttcttccaatcctgtgtgttagctactcgcggagtcatcaaggtaaaccaagcagagccttatggggacattctcattgcaagaggacccaacatgtaaggtttgatttctaaattataaaagattctggtgaaccgattatccatagttgttttgcttttcatattctagcagagagagttcgtagacttttttaagttataaagagcaagcgttctttaccc

SEQ ID NO: 100241 - protein, 617 aa, Arabidopsis thaliana
  peptide (1)..(617): Ceres Seq. ID no. 13604680
  misc_feature (1)..(617): Homolog of NCBI NO: 34558723 NR Description: Rad21-4 protein [Oryza sativa (japonica
  misc_feature (110)..(381): Homolog of NCBI NO: 5091612 NR Description: 10A19I.14 [Oryza sativa]
  misc_feature (441)..(592): Homolog of NCBI NO: 5091612 NR Description: 10A19I.14 [Oryza sativa]
  misc_feature (19)..(76): Homolog of NCBI NO: 5091612 NR Description: 10A19I.14 [Oryza sativa]
  misc_feature (377)..(617): Homolog of NCBI NO: 22326839 NR Description: RAD21-3 protein [Arabidopsis thaliana]
  misc_feature (1)..(139): Homolog of NCBI NO: 22326839 NR Description: RAD21-3 protein [Arabidopsis thaliana]
  misc_feature (271)..(617): Homolog of NCBI NO: 12006362 NR Description: cohesion family protein SYN3 [Arabidopsis
  misc_feature (1)..(137): Homolog of NCBI NO: 12006362 NR Description: cohesion family protein SYN3 [Arabidopsis
  misc_feature (271)..(617): Homolog of NCBI NO: 15231707 NR Description: cohesion family protein (SYN3) (RAD21-2) thaliana] >gi|30913284|sp|Q9FQ19|SC13_ARATH Sister chromatid
  misc_feature (1)..(137): Homolog of NCBI NO: 15231707 NR Description: cohesion family protein (SYN3) (RAD21-2) thaliana] >gi|30913284|sp|Q9FQ19|SC13_ARATH Sister chromatid
MFYSHQLLARKAPLGQIWMAATLHAKINRKKLDKLDIIQICEEILNPSVPMALRLSGILMGGVVIVYERKVKLLFDDVNRFLVEINGAWRTKSVPDPTLLPKGKTHARKEAVTLPENEEADFGDFEQTRNVPKFGNYMDFQQTFISMRLDESHVNNNPEPEDLGQQFHQADAENITLFEYHGSFQTNNETYDRFERFDIEGDDETQMNSNPREGAEIPTTLIPSPPRHHDIPEGVNPTSPQRQEQQENRRDGFAEQMEEQNIPDKEEHDRPQPAKKRARKTATSAMDYEQTIIAGHVYQSWLQDTSDILCRGEKRKVRGTIRPDMESFKRANMPPTQLFEKDSSYPPQLYQLWSKNTQVLQTSSSESRHPDLRAEQSPGFVQERMHNHHQTDHHERSDTSSQNLDSPAEILRTVRTGKGASVESMMAGSRASPETINRQAADINVTPFYSGDDVRSMPSTPSARGAASINNIEISSKSRMPNRKRPNSSPRRGLEPVAEERPWEHREYEFEFSMLPEKRFTADKEILFETASTQTQKPVCNQSDEMITDSIKSHLKTHFETPGAPQVESLNKLAVGMDRNAAAKLFFQSCVLATRGVIKVNQAEPYGDILIARGPNM

SEQ ID NO: 100242 - protein, 599 aa, Arabidopsis thaliana; identical to SEQ ID NO: 77745
  peptide (1)..(599): Ceres Seq. ID no. 13604681
  misc_feature (1)..(599): Homolog of NCBI NO: 34558723 NR Description: Rad21-4 protein [Oryza sativa (japonica
  misc_feature (92)..(363): Homolog of NCBI NO: 5091612 NR Description: 10A19I.14 [Oryza sativa]
  misc_feature (423)..(574): Homolog of NCBI NO: 5091612 NR Description: 10A19I.14 [Oryza sativa]
  misc_feature (1)..(58): Homolog of NCBI NO: 5091612 NR Description: 10A19I.14 [Oryza sativa]
  misc_feature (359)..(599): Homolog of NCBI NO: 22326839 NR Description: RAD21-3 protein [Arabidopsis thaliana]
  misc_feature (1)..(121): Homolog of NCBI NO: 22326839 NR Description: RAD21-3 protein [Arabidopsis thaliana]
  misc_feature (253)..(599): Homolog of NCBI NO: 12006362 NR Description: cohesion family protein SYN3 [Arabidopsis
  misc_feature (1)..(119): Homolog of NCBI NO: 12006362 NR Description: cohesion family protein SYN3 [Arabidopsis
  misc_feature (253)..(599): Homolog of NCBI NO: 15231707 NR Description: cohesion family protein (SYN3) (RAD21-2) thaliana] >gi|30913284|sp|Q9FQ19|SC13_ARATH Sister chromatid
  misc_feature (1)..(119): Homolog of NCBI NO: 15231707 NR Description: cohesion family protein (SYN3) (RAD21-2) thaliana] >gi|30913284|sp|Q9FQ19|SC13_ARATH Sister chromatid

SEQ ID NO: 100243 - protein, 567 aa, Arabidopsis thaliana; identical to SEQ ID NO: 77746
  peptide (1)..(567): Ceres Seq. ID no. 13604682
  misc_feature (1)..(567): Homolog of NCBI NO: 34558723 NR Description: Rad21-4 protein [Oryza sativa (japonica
  misc_feature (60)..(331): Homolog of NCBI NO: 5091612 NR Description: 10A19I.14 [Oryza sativa]
  misc_feature (391)..(542): Homolog of NCBI NO: 5091612 NR Description: 10A19I.14 [Oryza sativa]
  misc_feature (1)..(26): Homolog of NCBI NO: 5091612 NR Description: 10A19I.14 [Oryza sativa]
  misc_feature (327)..(567): Homolog of NCBI NO: 22326839 NR Description: RAD21-3 protein [Arabidopsis thaliana]
  misc_feature (1)..(89): Homolog of NCBI NO: 22326839 NR Description: RAD21-3 protein [Arabidopsis thaliana]
  misc_feature (221)..(567): Homolog of NCBI NO: 12006362 NR Description: cohesion family protein SYN3 [Arabidopsis
  misc_feature (1)..(87): Homolog of NCBI NO: 12006362 NR Description: cohesion family protein SYN3 [Arabidopsis
  misc_feature (221)..(567): Homolog of NCBI NO: 15231707 NR Description: cohesion family protein (SYN3) (RAD21-2) thaliana] >gi|30913284|sp|Q9FQ19|SC13_ARATH Sister chromatid
  misc_feature (1)..(87): Homolog of NCBI NO: 15231707 NR Description: cohesion family protein (SYN3) (RAD21-2) thaliana] >gi|30913284|sp|Q9FQ19|SC13_ARATH Sister chromatid

SEQ ID NO: 100244 - DNA, 1176 bp, Arabidopsis thaliana
  misc_feature (1)..(1176): Ceres Seq. ID no. 13604702
  misc_feature: MA Experiment ID: 20000180 Result: Down-regulated in Transcription
  misc_feature: MA Experiment 20000180 PARAMETER Experiment Name: At_Germinating_Seeds_P Parameter: Age (hr) Value: 24 vs. 0
  misc_feature: MA Experiment 20000180 PARAMETER Experiment Name: At_Germinating_Seeds_P Parameter: Tissue Value: Germinating Seeds
  misc_feature: MA Experiment ID: 20000184 Result: Down-regulated in Transcription
  misc_feature: MA Experiment 20000184 PARAMETER Experiment Name: At_Shoots__P Parameter: Age (day) Value: 7
  misc_feature: MA Experiment 20000184 PARAMETER Experiment Name: At_Shoots__P Parameter: Tissue Value: Shoots vs. Whole Plant
  misc_feature: MA Experiment ID: 20000185 Result: Down-regulated in Transcription
  misc_feature: MA Experiment 20000185 PARAMETER Experiment Name: At_Roots__P Parameter: Age (day) Value: 7 vs. 21
  misc_feature: MA Experiment 20000185 PARAMETER Experiment Name: At_Roots__P Parameter: Organism Value: A. thaliana
  misc_feature: MA Experiment 20000185 PARAMETER Experiment Name: At_Roots__P Parameter: Tissue Value: Roots vs. Whole Plant
  misc_feature: MA Experiment ID: 20001248 Result: Up-regulated in Transcription
  misc_feature: MA Experiment 20001248 PARAMETER Experiment Name: At_Far-red-induction_P Parameter: Age (day) Value: 7
  misc_feature: MA Experiment 20001248 PARAMETER Experiment Name: At_Far-red-induction_P Parameter: Light Value: Far-red vs. White
  misc_feature: MA Experiment 20001248 PARAMETER Experiment Name: At_Far-red-induction_P Parameter: Organism Value: A. thaliana
  misc_feature: MA Experiment 20001248 PARAMETER Experiment Name: At_Far-red-induction_P Parameter: Plant Line Value: Columbia
  misc_feature: MA Experiment 20001248 PARAMETER Experiment Name: At_Far-red-induction_P Parameter: Timepoint (hr) Value: 4
  misc_feature: MA Experiment 20001248 PARAMETER Experiment Name: At_Far-red-induction_P Parameter: Tissue Value: Whole Plant
  misc_feature: MA Experiment ID: 20001450 Result: Up-regulated in Transcription
  misc_feature: MA Experiment 20001450 PARAMETER Experiment Name: At_Far-red-induction_P Parameter: Age (day) Value: 7
  misc_feature: MA Experiment 20001450 PARAMETER Experiment Name: At_Far-red-induction_P Parameter: Light Value: Far-red vs. White
  misc_feature: MA Experiment 20001450 PARAMETER Experiment Name: At_Far-red-induction_P Parameter: Organism Value: A. thaliana
  misc_feature: MA Experiment 20001450 PARAMETER Experiment Name: At_Far-red-induction_P Parameter: Plant Line Value: Columbia
  misc_feature: MA Experiment 20001450 PARAMETER Experiment Name: At_Far-red-induction_P Parameter: Timepoint (hr) Value: 8
  misc_feature: MA Experiment 20001450 PARAMETER Experiment Name: At_Far-red-induction_P Parameter: Tissue Value: Whole Plant
  misc_feature: MA Experiment ID: 20001451 Result: Up-regulated in Transcription
  misc_feature: MA Experiment 20001451 PARAMETER Experiment Name: At_Far-red-induction_P Parameter: Age (day) Value: 7
  misc_feature: MA Experiment 20001451 PARAMETER Experiment Name: At_Far-red-induction_P Parameter: Light Value: Far-red vs. White
  misc_feature: MA Experiment 20001451 PARAMETER Experiment Name: At_Far-red-induction_P Parameter: Organism Value: A. thaliana
  misc_feature: MA Experiment 20001451 PARAMETER Experiment Name: At_Far-red-induction_P Parameter: Plant Line Value: Columbia
  misc_feature: MA Experiment 20001451 PARAMETER Experiment Name: At_Far-red-induction_P Parameter: Timepoint (hr) Value: 24
  misc_feature: MA Experiment 20001451 PARAMETER Experiment Name: At_Far-red-induction_P Parameter: Tissue Value: Whole Plant
ccgttgcttcaatggcgaaagacggacctaactgggacggtctgcttaagtggagtctctctcactccgatggtactcgacctacttgccaattaagtgaggaggatcgaaaatggtttgcagaagctatgcaatcacaaacggtagatgtagtcaagcggttgaaggagattacacaggtattgcagacacctcaacaagttttggaggctcatgaagtgacccctcaagatattgaaggtttgttggatgagttgcaggaacatgttgaatcgattgatatggctaatgatcttcattccgttggaggcttggtacctcttcttggctacctcaaaaactccaatgctaatatccgggctaagtctgcagatgttgtaagcacaatagttgagaacaatcctcggagtcaagaatcagttatggaagccaatggtttagagtccttgcttttaaggtttacttcagacaccgatatgcattctcgaacacaggctctcggtgcaatatcatctttgattcgcaataataaacctgggatcacaggtttccggattgcaaatggttactctggtttaaaagatgctttggaaactgatagtgtgagatttcaaaggaaagctttaaacttgttgcattatcttctacaagagaatgactcagactccgatattgctatagaattcgggcttcaccatttgatgatgcacctcgtgtctagcttcgatgctgatgtaagagaagctgctcttcgaggattgcttgagctcgtgaaagctagaaaagactgtagtacttgtggttctagcatagtgaaaggcgatgagagactcagacagattctaaaagatcggatcaaagcaatcagccgggtcaaagcaatgagcttgtttatgtcacaagaagatctatcagccgctaaagaggagaggcagctcttagattcactatggaccacaatcttcaacgaaccttcttctctttagagacaaagatacaaagagacaaaaccgtctgtgcttccttatatcatgagtaagcactaaaaccgtcttttatgtctttggacccaccagctaaagcttgtgtctttagaacactagttaaaaggatggtaaccactgtataatgaccaaattttgattctattttgagttcaaattttctcagtttccc

SEQ ID NO: 100245 - protein, 327 aa, Arabidopsis thaliana
  peptide (1)..(327): Ceres Seq. ID no. 13604703
  misc_feature (133)..(174): Pfam Name: Armadillo/beta-catenin-like repeat Pfam Description: Armadillo/beta-catenin-like repeat
  misc_feature (4)..(327): Homolog of NCBI NO: 15241689 NR Description: expressed protein [Arabidopsis thaliana]
  misc_feature (4)..(327): Homolog of NCBI NO: 21553998 NR Description: unknown [Arabidopsis thaliana]
  misc_feature (4)..(327): Homolog of NCBI NO: 18398480 NR Description: expressed protein [Arabidopsis thaliana] unknown protein [Arabidopsis thaliana]
  misc_feature (33)..(327): Homolog of NCBI NO: 6478927 NR Description: hypothetical protein [Arabidopsis thaliana]
  misc_feature (4)..(32): Homolog of NCBI NO: 6478927 NR Description: hypothetical protein [Arabidopsis thaliana]
  misc_feature (4)..(327): Homolog of NCBI NO: 15232329 NR Description: expressed protein [Arabidopsis thaliana]
  misc_feature (4)..(327): Homolog of NCBI NO: 26449490 NR Description: unknown protein [Arabidopsis thaliana]
  misc_feature (4)..(327): Homolog of NCBI NO: 34897412 NR Description: putative Hsp70 binding protein [Oryza sativa
  misc_feature (10)..(244): Homolog of NCBI NO: 23510095 NR Description: hypothetical protein [Plasmodium falciparum 3D7]
  misc_feature (13)..(282): Homolog of NCBI NO: 31221541 NR Description: ENSANGP00000019732 [Anopheles gambiae]
VASMAKDGPNWDGLLKWSLSHSDGTRPTCQLSEEDRKWFAEAMQSQTVDVVKRLKEITQVLQTPQQVLEAHEVTPQDIEGLLDELQEHVESIDMANDLHSVGGLVPLLGYLKNSNANIRAKSADVVSTIVENNPRSQESVMEANGLESLLLRFTSDTDMHSRTQALGAISSLIRNNKPGITGFRIANGYSGLKDALETDSVRFQRKALNLLHYLLQENDSDSDIAIEFGLHHLMMHLVSSFDADVREAALRGLLELVKARKDCSTCGSSIVKGDERLRQILKDRIKAISRVKAMSLFMSQEDLSAAKEERQLLDSLWTTIFNEPSSL

SEQ ID NO: 100246 - protein, 324 aa, Arabidopsis thaliana
  peptide (1)..(324): Ceres Seq. ID no. 13604704
  misc_feature (130)..(171): Pfam Name: Armadillo/beta-catenin-like repeat Pfam Description: Armadillo/beta-catenin-like repeat
  misc_feature (1)..(324): Homolog of NCBI NO: 15241689 NR Description: expressed protein [Arabidopsis thaliana]
  misc_feature (1)..(324): Homolog of NCBI NO: 21553998 NR Description: unknown [Arabidopsis thaliana]
  misc_feature (1)..(324): Homolog of NCBI NO: 18398480 NR Description: expressed protein [Arabidopsis thaliana] unknown protein [Arabidopsis thaliana]
  misc_feature (30)..(324): Homolog of NCBI NO: 6478927 NR Description: hypothetical protein [Arabidopsis thaliana]
  misc_feature (1)..(29): Homolog of NCBI NO: 6478927 NR Description: hypothetical protein [Arabidopsis thaliana]
  misc_feature (1)..(324): Homolog of NCBI NO: 15232329 NR Description: expressed protein [Arabidopsis thaliana]
  misc_feature (1)..(324): Homolog of NCBI NO: 26449490 NR Description: unknown protein [Arabidopsis thaliana]
  misc_feature (1)..(324): Homolog of NCBI NO: 34897412 NR Description: putative Hsp70 binding protein [Oryza sativa
  misc_feature (7)..(241): Homolog of NCBI NO: 23510095 NR Description: hypothetical protein [Plasmodium falciparum 3D7]
  misc_feature (10)..(279): Homolog of NCBI NO: 31221541 NR Description: ENSANGP00000019732 [Anopheles gambiae]
MAKDGPNWDGLLKWSLSHSDGTRPTCQLSEEDRKWFAEAMQSQTVDVVKRLKEITQVLQTPQQVLEAHEVTPQDIEGLLDELQEHVESIDMANDLHSVGGLVPLLGYLKNSNANIRAKSADVVSTIVENNPRSQESVMEANGLESLLLRFTSDTDMHSRTQALGAISSLIRNNKPGITGFRIANGYSGLKDALETDSVRFQRKALNLLHYLLQENDSDSDIAIEFGLHHLMMHLVSSFDADVREAALRGLLELVKARKDCSTCGSSIVKGDERLRQILKDRIKAISRVKAMSLFMSQEDLSAAKEERQLLDSLWTTIFNEPSSL

SEQ ID NO: 100247 - protein, 285 aa, Arabidopsis thaliana; identical to SEQ ID NO: 88802
  peptide (1)..(285): Ceres Seq. ID no. 13604705
  misc_feature (91)..(132): Pfam Name: Armadillo/beta-catenin-like repeat Pfam Description: Armadillo/beta-catenin-like repeat
  misc_feature (1)..(285): Homolog of NCBI NO: 15241689 NR Description: expressed protein [Arabidopsis thaliana]
  misc_feature (1)..(285): Homolog of NCBI NO: 21553998 NR Description: unknown [Arabidopsis thaliana]
  misc_feature (1)..(285): Homolog of NCBI NO: 18398480 NR Description: expressed protein [Arabidopsis thaliana] unknown protein [Arabidopsis thaliana]
  misc_feature (1)..(285): Homolog of NCBI NO: 6478927 NR Description: hypothetical protein [Arabidopsis thaliana]
  misc_feature (1)..(285): Homolog of NCBI NO: 15232329 NR Description: expressed protein [Arabidopsis thaliana]
  misc_feature (1)..(285): Homolog of NCBI NO: 26449490 NR Description: unknown protein [Arabidopsis thaliana]
  misc_feature (1)..(285): Homolog of NCBI NO: 34897412 NR Description: putative Hsp70 binding protein [Oryza sativa
  misc_feature (1)..(202): Homolog of NCBI NO: 23510095 NR Description: hypothetical protein [Plasmodium falciparum 3D7]
  misc_feature (1)..(240): Homolog of NCBI NO: 31221541 NR Description: ENSANGP00000019732 [Anopheles gambiae]
  misc_feature (1)..(241): Homolog of NCBI NO: 29436427 NR Description: Similar to RIKEN cDNA 1500019G21 gene [Danio

SEQ ID NO: 100248 - DNA, 1181 bp, Arabidopsis thaliana
  misc_feature (1)..(1181): Ceres Seq. ID no. 13604733
  misc_feature: MA Experiment ID: 20000180 Result: Up-regulated in Transcription
  misc_feature: MA Experiment 20000180 PARAMETER Experiment Name: At_Germinating_Seeds_P Parameter: Age (hr) Value: 24 vs. 0
  misc_feature: MA Experiment 20000180 PARAMETER Experiment Name: At_Germinating_Seeds_P Parameter: Tissue Value: Germinating Seeds
  misc_feature: MA Experiment ID: 20001911 Result: Down-regulated in Transcription
  misc_feature: MA Experiment 20001911 PARAMETER Experiment Name: At_Drought_Reproduction_P Parameter: Age (day) Value: 40
  misc_feature: MA Experiment 20001911 PARAMETER Experiment Name: At_Drought_Reproduction_P Parameter: Organism Value: A. thaliana
  misc_feature: MA Experiment 20001911 PARAMETER Experiment Name: At_Drought_Reproduction_P Parameter: Plant Line Value: WS
  misc_feature: MA Experiment 20001911 PARAMETER Experiment Name: At_Drought_Reproduction_P Parameter: Timepoint (day) Value: 10
  misc_feature: MA Experiment 20001911 PARAMETER Experiment Name: At_Drought_Reproduction_P Parameter: Tissue Value: Flowers
  misc_feature: MA Experiment 20001911 PARAMETER Experiment Name: At_Drought_Reproduction_P Parameter: Treatment Value: Drought vs. No Drought
ctttctccgtaaagaataaatcttccagtttcttcatcacatttcttttccttattttaatcaaaacatttgtttgcatcattcacaggcaaataaaaattctccctttttcttagattgctactacttataaagtagagagtgcagatagatgtaattatcaaacgaggaagcatcattatcattatcattatcatcattactgcttcatagattcatattattgtttatctaaaagtttgcttttgtagtagttggtggttaagtaggatttgatttgatcttctagaattacagatcgagaaacagcaaatctgaggttttagaaaatgggatcttcttctgggcaaagtggatacgatctgtcttttaagatcttgttgattggtgattctggtgttggtaaaagcagtttgcttgtcagcttcatttctagctccgttgaagatcttgctcctactattggtgttgatttcaagatcaaacaattgacagtaggaggcaaaaggctaaaactcacaatctgggacacagctggacaggaacggtttagaacactgacaagctcttactacagaggcgcccaaggaatcattctcgtttatgatgtgacgagaagggagacatttacaaacttagtagatgtgtggggtaaggagattgagctttactccacaaaccaagaatgtgtaaggatgctcgttgggaacaaagtcgatagagaatctgagagaggagtaagcagagaagaagggattgctctagcaaaagaactcaactgcatgtttcttgagtgtagtgctagaactcgacaaaacgtggaacagtgtttcgaagagttggctttgaagataatggaggtacctagtctcttggaagaaggatcaagtgctgtgaagagaaacatcttgaagcagaaaccagaacaccagactaatactcaatccggctgttgcagctagtgaccctagtcgatgttgcatataaaatactcgaatctttatcttgtgtattgcaaactgaacctgattcttctctctgtggttgcctcttttgtgtgtagaacataatgtagcttcaatgtaaatttgtgggattacttgtattcttcttttgcttctgaaatgagatttgtgataataacatcatataatagaataaaccccatcaagtgttttctt

SEQ ID NO: 100249 - protein, 210 aa, Arabidopsis thaliana
  peptide (1)..(210): Ceres Seq. ID no. 13604734
  misc_feature (15)..(177): Pfam Name: Ras family Pfam Description: Ras family
  misc_feature (1)..(210): Homolog of NCBI NO: 18414255 NR Description: Ras family GTP-binding protein [Arabidopsis
  misc_feature (1)..(210): Homolog of NCBI NO: 1370172 NR Description: RAB1X [Lotus japonicus]
  misc_feature (1)..(210): Homolog of NCBI NO: 15232785 NR Description: GTP-binding protein, putative [Arabidopsis
  misc_feature (1)..(210): Homolog of NCBI NO: 15218575 NR Description: GTP-binding protein, putative [Arabidopsis
  misc_feature (69)..(210): Homolog of NCBI NO: 25294118 NR Description: protein F9C16.3 [imported] - Arabidopsis thaliana
  misc_feature (1)..(68): Homolog of NCBI NO: 25294118 NR Description: protein F9C16.3 [imported] - Arabidopsis thaliana
  misc_feature (3)..(209): Homolog of NCBI NO: 15451614 NR Description: Putative GTP-binding protein [Oryza sativa]
  misc_feature (2)..(209): Homolog of NCBI NO: 37534998 NR Description: putative GTP-binding protein [Oryza sativa
  misc_feature (3)..(209): Homolog of NCBI NO: 1370174 NR Description: RAB1Y [Lotus japonicus]
  misc_feature (10)..(210): Homolog of NCBI NO: 549810 NR Description: GTP-BINDING PROTEIN YPTV3 >gi|486945|pir||S36366
MGSSSGQSGYDLSFKILLIGDSGVGKSSLLVSFISSSVEDLAPTIGVDFKIKQLTVGGKRLKLTIWDTAGQERFRTLTSSYYRGAQGIILVYDVTRRETFTNLVDVWGKEIELYSTNQECVRMLVGNKVDRESERGVSREEGIALAKELNCMFLECSARTRQNVEQCFEELALKIMEVPSLLEEGSSAVKRNILKQKPEHQTNTQSGCCS

SEQ ID NO: 100250 - DNA, 2588 bp, Arabidopsis thaliana
  misc_feature (1)..(2588): Ceres Seq. ID no. 13604735
  misc_feature: MA Experiment ID: 20000438 Result: Up-regulated in Transcription
  misc_feature: MA Experiment 20000438 PARAMETER Experiment Name: At_Shoots__P Parameter: Age (day) Value: 14
  misc_feature: MA Experiment 20000438 PARAMETER Experiment Name: At_Shoots__P Parameter: Tissue Value: Shoots vs. Whole Plant
  misc_feature: MA Experiment ID: 20000495 Result: Down-regulated in Transcription
  misc_feature: MA Experiment 20000495 PARAMETER Experiment Name: At_Guard_Cells_P Parameter: Harvest Date Value: 8/2/2002
  misc_feature: MA Experiment 20000495 PARAMETER Experiment Name: At_Guard_Cells_P Parameter: Organism Value: A. thaliana
  misc_feature: MA Experiment 20000495 PARAMETER Experiment Name: At_Guard_Cells_P Parameter: Tissue Value: Guard Cells vs. Leaves
  misc_feature: MA Experiment ID: 20001248 Result: Down-regulated in Transcription
  misc_feature: MA Experiment 20001248 PARAMETER Experiment Name: At_Far-red-induction_P Parameter: Age (day) Value: 7
  misc_feature: MA Experiment 20001248 PARAMETER Experiment Name: At_Far-red-induction_P Parameter: Light Value: Far-red vs. White
  misc_feature: MA Experiment 20001248 PARAMETER Experiment Name: At_Far-red-induction_P Parameter: Organism Value: A. thaliana
  misc_feature: MA Experiment 20001248 PARAMETER Experiment Name: At_Far-red-induction_P Parameter: Plant Line Value: Columbia
  misc_feature: MA Experiment 20001248 PARAMETER Experiment Name: At_Far-red-induction_P Parameter: Timepoint (hr) Value: 4
  misc_feature: MA Experiment 20001248 PARAMETER Experiment Name: At_Far-red-induction_P Parameter: Tissue Value: Whole Plant
  misc_feature: MA Experiment ID: 20001450 Result: Down-regulated in Transcription
  misc_feature: MA Experiment 20001450 PARAMETER Experiment Name: At_Far-red-induction_P Parameter: Age (day) Value: 7
  misc_feature: MA Experiment 20001450 PARAMETER Experiment Name: At_Far-red-induction_P Parameter: Light Value: Far-red vs. White
  misc_feature: MA Experiment 20001450 PARAMETER Experiment Name: At_Far-red-induction_P Parameter: Organism Value: A. thaliana
  misc_feature: MA Experiment 20001450 PARAMETER Experiment Name: At_Far-red-induction_P Parameter: Plant Line Value: Columbia
  misc_feature: MA Experiment 20001450 PARAMETER Experiment Name: At_Far-red-induction_P Parameter: Timepoint (hr) Value: 8
  misc_feature: MA Experiment 20001450 PARAMETER Experiment Name: At_Far-red-induction_P Parameter: Tissue Value: Whole Plant
  misc_feature: MA Experiment ID: 20001451 Result: Down-regulated in Transcription
  misc_feature: MA Experiment 20001451 PARAMETER Experiment Name: At_Far-red-induction_P Parameter: Age (day) Value: 7
  misc_feature: MA Experiment 20001451 PARAMETER Experiment Name: At_Far-red-induction_P Parameter: Light Value: Far-red vs. White
  misc_feature: MA Experiment 20001451 PARAMETER Experiment Name: At_Far-red-induction_P Parameter: Organism Value: A. thaliana
  misc_feature: MA Experiment 20001451 PARAMETER Experiment Name: At_Far-red-induction_P Parameter: Plant Line Value: Columbia
  misc_feature: MA Experiment 20001451 PARAMETER Experiment Name: At_Far-red-induction_P Parameter: Timepoint (hr) Value: 24
  misc_feature: MA Experiment 20001451 PARAMETER Experiment Name: At_Far-red-induction_P Parameter: Tissue Value: Whole Plant
  misc_feature: MA Experiment ID: 20001557 Result: Down-regulated in Transcription
  misc_feature: MA Experiment 20001557 PARAMETER Experiment Name: At_Drought_Soil_Dry_P Parameter: Age (day) Value: 27
  misc_feature: MA Experiment 20001557 PARAMETER Experiment Name: At_Drought_Soil_Dry_P Parameter: Organism Value: A. thaliana
  misc_feature: MA Experiment 20001557 PARAMETER Experiment Name: At_Drought_Soil_Dry_P Parameter: Plant Line Value: WS
  misc_feature: MA Experiment 20001557 PARAMETER Experiment Name: At_Drought_Soil_Dry_P Parameter: Post Timepoint (hr) Value: 3
  misc_feature: MA Experiment 20001557 PARAMETER Experiment Name: At_Drought_Soil_Dry_P Parameter: Post-Treatment Value: Re-Water vs. No Drought
  misc_feature: MA Experiment 20001557 PARAMETER Experiment Name: At_Drought_Soil_Dry_P Parameter: Timepoint (day) Value: 13
  misc_feature: MA Experiment 20001557 PARAMETER Experiment Name: At_Drought_Soil_Dry_P Parameter: Treatment Value: Drought vs. No Drought
  misc_feature: MA Experiment ID: 20001905 Result: Down-regulated in Transcription
  misc_feature: MA Experiment 20001905 PARAMETER Experiment Name: At_Drought_Reproduction_P Parameter: Age (day) Value: 40
  misc_feature: MA Experiment 20001905 PARAMETER Experiment Name: At_Drought_Reproduction_P Parameter: Organism Value: A. thaliana
  misc_feature: MA Experiment 20001905 PARAMETER Experiment Name: At_Drought_Reproduction_P Parameter: Plant Line Value: WS
  misc_feature: MA Experiment 20001905 PARAMETER Experiment Name: At_Drought_Reproduction_P Parameter: Timepoint (day) Value: 10
  misc_feature: MA Experiment 20001905 PARAMETER Experiment Name: At_Drought_Reproduction_P Parameter: Tissue Value: Rosettes
  misc_feature: MA Experiment 20001905 PARAMETER Experiment Name: At_Drought_Reproduction_P Parameter: Treatment Value: Drought vs. No Drought
atggtggtgattcacggagtgtctcttactccacgcttcactcttccttctcgacctctcaacactggctttaatgccggcaattccaccctctctttcttcttcaaaaagcaccctctctctcggaagatctttgctgggaaacaatctgcggagtttgattcttcgtcacaagctatctctgcttctgagaaagtcttagtacctgataatcttgatgatgatcccagaggtttttcacagatatttgatctagaaagtcaaacaatggaatatactgaggcagtaagaacagaagaccaaacaatgaacgttgtcaaggagagaggggtgaaaccaagaatagttcccccaccgggtgatggcaagaaaatttatgagatagaccccatgttacgaacttacaacaatcatcttgattaccgttatggacagtataaaagattgcgtgaggaaatagacaagtatgagggtggtcttgaggcattctctcgtggctatgaaaagttaggattttcgcgcagtgatgccggtataacttatagagagtgggcgcctggagctaaggctgcatcacttatcggagatttcaacaactggaattctaatgcagatatcatgactcggaatgaatttggtgtttgggagatctttttgcccaacaacactgatggttcgcctgcaattcctcatggctcacgtgtaaagattcgtatggatactccatctggcattaaagactcaattcctgcttggatcaagttctcggtgcaagctccaggtgaaatcccattcaatggcatatactatgatcctccagaagaggagaagtatgtattcaaacatcctcaaccaaagagacctaagtcgctaaggatttatgaagcacatgttggcatgagtagcacggaaccaatggtcaatacgtatgctaactttagagatgatgttcttccccgcatcaaaaagcttggatataatgctgttcaaattatggccatacaagaacattcatattatgccagctttgggtaccatgtcacaaacttttttgccccaagcagtcgctgtgggaccccagaggaactaaaatcactgatagatagagctcacgagttaggcctggtagttctgatggatatcgttcatagccatgcttcaaaaaacacattggatggactgaacatgtttgatggaactgatgctcactattttcactctggacctcggggataccattggatgtgggattcacgacttttcaattatgggagctgggaagtattacgatatctcctttcaaatgcacggtggtggctagaagaatacaagtttgatggatttagatttgatggtgtaacctcaatgatgtatactcatcatggactctcggttggatttactgggaactacaccgaatactttggattggaaactgatgtggatgctgtgaattatctcatgctggttaatgatatgattcatgggctctaccctgaagcgattaccgttggtgaagatgttagtggtatgccaacattctgtattcctgtccaagatggtggcgttggatttgactaccgtttacacatggccatagctgataagtggatagaaatgctcaagaagagagatgaagactggcaaatgggcgacatcatttacacacttaccaacagaaggtggtcagagaagtgtatctcttatgctgaaagtcacgatcaagctcttgttggtgataaaacaattgccttctggttaatggacaaggatatgtatgatttcatggcagtagacagaccatcaactcctcttatcgatagaggaatagctttgcacaaaatgattaggcttataactatgggattaggcggtgaaggttacttaaattttatgggaaacgaattcggacatccagaatggattgattttcccagaggcgagcagcgtctttctgatggtagcgtgattcctggcaacaatttcagttatgacaaatgccgccgcagatttgatcttggggatgcagattatctcagataccgcggactacaagaatttgatcaggcaatgcaacatcttgaagagaattacggttttatgacttcggagcaccaattcatatcacgaaaagacgaagcagatagagtaatcgtattcgaaagaggtgatctcgtctttgtctttaactttcactggaccagcagctactttgattaccgcattggttgctccaagcctggaaaatataagatcgtattggactcggacgatcctctctttggtggattcaataggctcgatcgcaaggcagagtacttcacttatgatggcttatacgacgaacgaccctgctccttcatggtctatgcaccgtgtagaaccgccgtggtttatgctttagcaaaccacgattagaactttcagactttggatccaatatcataatcaaggaagagtgtgtgaaaaaatgtttttccttcattagagtgaagtaaagaatctggtaacgaaaaaaatgtctgtgtatacaagatcaccgaaaatgtaaagaatctggtaatggaaaatatctaaaacattaaacc

SEQ ID NO: 100251 - protein, 805 aa, Arabidopsis thaliana
  peptide (1)..(805): Ceres Seq. ID no. 13604736
  misc_feature (125)..(799): Homolog of NCBI NO: 7433851 NR Description: 1,4-alpha-glucan branching enzyme (EC 2.4.1.18) I
  misc_feature (125)..(799): Homolog of NCBI NO: 4586236 NR Description: starch branching enzyme I [Triticum aestivum]
  misc_feature (125)..(799): Homolog of NCBI NO: 4586237 NR Description: starch branching enzyme I [Triticum aestivum]
  misc_feature (125)..(799): Homolog of NCBI NO: 11037532 NR Description: starch branching enyzyme 1 [Triticum aestivum]
  misc_feature (125)..(799): Homolog of NCBI NO: 4586238 NR Description: starch branching enzyme I [Triticum aestivum]
  misc_feature (121)..(805): Homolog of NCBI NO: 283000 NR Description: 1,4-alpha-glucan branching enzyme (EC 2.4.1.18) I
  misc_feature (121)..(805): Homolog of NCBI NO: 399544 NR Description: 1,4-alpha-glucan branching enzyme (Starch
  misc_feature (121)..(805): Homolog of NCBI NO: 32130583 NR Description: starch-branching enzyme 1 [Oryza sativa (japonica
  misc_feature (121)..(799): Homolog of NCBI NO: 32186932 NR Description: starch branching enzyme I [Hordeum vulgare]
  misc_feature (125)..(799): Homolog of NCBI NO: 1771261 NR Description: 1,4-alpha-glucan branching enzyme [Manihot
MVVIHGVSLTPRFTLPSRPLNTGFNAGNSTLSFFFKKHPLSRKIFAGKQSAEFDSSSQAISASEKVLVPDNLDDDPRGFSQIFDLESQTMEYTEAVRTEDQTMNVVKERGVKPRIVPPPGDGKKIYEIDPMLRTYNNHLDYRYGQYKRLREEIDKYEGGLEAFSRGYEKLGFSRSDAGITYREWAPGAKAASLIGDFNNWNSNADIMTRNEFGVWEIFLPNNTDGSPAIPHGSRVKIRMDTPSGIKDSIPAWIKFSVQAPGEIPFNGIYYDPPEEEKYVFKHPQPKRPKSLRIYEAHVGMSSTEPMVNTYANFRDDVLPRIKKLGYNAVQIMAIQEHSYYASFGYHVTNFFAPSSRCGTPEELKSLIDRAHELGLVVLMDIVHSHASKNTLDGLNMFDGTDAHYFHSGPRGYHWMWDSRLFNYGSWEVLRYLLSNARWWLEEYKFDGFRFDGVTSMMYTHHGLSVGFTGNYTEYFGLETDVDAVNYLMLVNDMIHGLYPEAITVGEDVSGMPTFCIPVQDGGVGFDYRLHMAIADKWIEMLKKRDEDWQMGDIIYTLTNRRWSEKCISYAESHDQALVGDKTIAFWLMDKDMYDFMAVDRPSTPLIDRGIALHKMIRLITMGLGGEGYLNFMGNEFGHPEWIDFPRGEQRLSDGSVIPGNNFSYDKCRRRFDLGDADYLRYRGLQEFDQAMQHLEENYGFMTSEHQFISRKDEADRVIVFERGDLVFVFNFHWTSSYFDYRIGCSKPGKYKIVLDSDDPLFGGFNRLDRKAEYFTYDGLYDERPCSFMVYAPCRTAVVYALANHD

SEQ ID NO: 100252 - protein, 716 aa, Arabidopsis thaliana
  peptide (1)..(716): Ceres Seq. ID no. 13604737
  misc_feature (36)..(710): Homolog of NCBI NO: 7433851 NR Description: 1,4-alpha-glucan branching enzyme (EC 2.4.1.18) I
  misc_feature (36)..(710): Homolog of NCBI NO: 4586236 NR Description: starch branching enzyme I [Triticum aestivum]
  misc_feature (36)..(710): Homolog of NCBI NO: 11037532 NR Description: starch branching enyzyme 1 [Triticum aestivum]
  misc_feature (36)..(710): Homolog of NCBI NO: 4586238 NR Description: starch branching enzyme I [Triticum aestivum]
  misc_feature (36)..(710): Homolog of NCBI NO: 4586237 NR Description: starch branching enzyme I [Triticum aestivum]
  misc_feature (32)..(716): Homolog of NCBI NO: 283000 NR Description: 1,4-alpha-glucan branching enzyme (EC 2.4.1.18) I
  misc_feature (32)..(716): Homolog of NCBI NO: 399544 NR Description: 1,4-alpha-glucan branching enzyme (Starch
  misc_feature (32)..(716): Homolog of NCBI NO: 32130583 NR Description: starch-branching enzyme 1 [Oryza sativa (japonica
  misc_feature (32)..(710): Homolog of NCBI NO: 32186932 NR Description: starch branching enzyme I [Hordeum vulgare]
  misc_feature (36)..(710): Homolog of NCBI NO: 1771261 NR Description: 1,4-alpha-glucan branching enzyme [Manihot
MEYTEAVRTEDQTMNVVKERGVKPRIVPPPGDGKKIYEIDPMLRTYNNHLDYRYGQYKRLREEIDKYEGGLEAFSRGYEKLGFSRSDAGITYREWAPGAKAASLIGDFNNWNSNADIMTRNEFGVWEIFLPNNTDGSPAIPHGSRVKIRMDTPSGIKDSIPAWIKFSVQAPGEIPFNGIYYDPPEEEKYVFKHPQPKRPKSLRIYEAHVGMSSTEPMVNTYANFRDDVLPRIKKLGYNAVQIMAIQEHSYYASFGYHVTNFFAPSSRCGTPEELKSLIDRAHELGLVVLMDIVHSHASKNTLDGLNMFDGTDAHYFHSGPRGYHWMWDSRLFNYGSWEVLRYLLSNARWWLEEYKFDGFRFDGVTSMMYTHHGLSVGFTGNYTEYFGLETDVDAVNYLMLVNDMIHGLYPEAITVGEDVSGMPTFCIPVQDGGVGFDYRLHMAIADKWIEMLKKRDEDWQMGDIIYTLTNRRWSEKCISYAESHDQALVGDKTIAFWLMDKDMYDFMAVDRPSTPLIDRGIALHKMIRLITMGLGGEGYLNFMGNEFGHPEWIDFPRGEQRLSDGSVIPGNNFSYDKCRRRFDLGDADYLRYRGLQEFDQAMQHLEENYGFMTSEHQFISRKDEADRVIVFERGDLVFVFNFHWTSSYFDYRIGCSKPGKYKIVLDSDDPLFGGFNRLDRKAEYFTYDGLYDERPCSFMVYAPCRTAVVYALANHD

SEQ ID NO: 100253 - protein, 703 aa, Arabidopsis thaliana
  peptide (1)..(703): Ceres Seq. ID no. 13604738
  misc_feature (23)..(697): Homolog of NCBI NO: 7433851 NR Description: 1,4-alpha-glucan branching enzyme (EC 2.4.1.18) I
  misc_feature (23)..(697): Homolog of NCBI NO: 4586236 NR Description: starch branching enzyme I [Triticum aestivum]
  misc_feature (23)..(697): Homolog of NCBI NO: 4586237 NR Description: starch branching enzyme I [Triticum aestivum]
  misc_feature (23)..(697): Homolog of NCBI NO: 11037532 NR Description: starch branching enyzyme 1 [Triticum aestivum]
  misc_feature (23)..(697): Homolog of NCBI NO: 4586238 NR Description: starch branching enzyme I [Triticum aestivum]
  misc_feature (19)..(703): Homolog of NCBI NO: 283000 NR Description: 1,4-alpha-glucan branching enzyme (EC 2.4.1.18) I
  misc_feature (19)..(703): Homolog of NCBI NO: 399544 NR Description: 1,4-alpha-glucan branching enzyme (Starch
  misc_feature (19)..(703): Homolog of NCBI NO: 32130583 NR Description: starch-branching enzyme 1 [Oryza sativa (japonica
  misc_feature (19)..(697): Homolog of NCBI NO: 32186932 NR Description: starch branching enzyme I [Hordeum vulgare]
  misc_feature (23)..(697): Homolog of NCBI NO: 1771261 NR Description: 1,4-alpha-glucan branching enzyme [Manihot
MNVVKERGVKPRIVPPPGDGKKIYEIDPMLRTYNNHLDYRYGQYKRLREEIDKYEGGLEAFSRGYEKLGFSRSDAGITYREWAPGAKAASLIGDFNNWNSNADIMTRNEFGVWEIFLPNNTDGSPAIPHGSRVKIRMDTPSGIKDSIPAWIKFSVQAPGEIPFNGIYYDPPEEEKYVFKHPQPKRPKSLRIYEAHVGMSSTEPMVNTYANFRDDVLPRIKKLGYNAVQIMAIQEHSYYASFGYHVTNFFAPSSRCGTPEELKSLIDRAHELGLVVLMDIVHSHASKNTLDGLNMFDGTDAHYFHSGPRGYHWMWDSRLFNYGSWEVLRYLLSNARWWLEEYKFDGFRFDGVTSMMYTHHGLSVGFTGNYTEYFGLETDVDAVNYLMLVNDMIHGLYPEAITVGEDVSGMPTFCIPVQDGGVGFDYRLHMAIADKWIEMLKKRDEDWQMGDIIYTLTNRRWSEKCISYAESHDQALVGDKTIAFWLMDKDMYDFMAVDRPSTPLIDRGIALHKMIRLITMGLGGEGYLNFMGNEFGHPEWIDFPRGEQRLSDGSVIPGNNFSYDKCRRRFDLGDADYLRYRGLQEFDQAMQHLEENYGFMTSEHQFISRKDEADRVIVFERGDLVFVFNFHWTSSYFDYRIGCSKPGKYKIVLDSDDPLFGGFNRLDRKAEYFTYDGLYDERPCSFMVYAPCRTAVVYALANHD

SEQ ID NO: 100254 - DNA, 886 bp, Arabidopsis thaliana
  misc_feature (1)..(886): Ceres Seq. ID no. 13604739
  misc_feature: MA Experiment ID: 20000184 Result: Up-regulated in Transcription
  misc_feature: MA Experiment 20000184 PARAMETER Experiment Name: At_Shoots__P Parameter: Age (day) Value: 7
  misc_feature: MA Experiment 20000184 PARAMETER Experiment Name: At_Shoots__P Parameter: Tissue Value: Shoots vs. Whole Plant
  misc_feature: MA Experiment ID: 20000185 Result: Up-regulated in Transcription
  misc_feature: MA Experiment 20000185 PARAMETER Experiment Name: At_Roots__P Parameter: Age (day) Value: 7 vs. 21
  misc_feature: MA Experiment 20000185 PARAMETER Experiment Name: At_Roots__P Parameter: Organism Value: A. thaliana
  misc_feature: MA Experiment 20000185 PARAMETER Experiment Name: At_Roots__P Parameter: Tissue Value: Roots vs. Whole Plant
  misc_feature: MA Experiment ID: 20000227 Result: Up-regulated in Transcription
  misc_feature: MA Experiment 20000227 PARAMETER Experiment Name: At_Root-Tips-vs-Tops_P Parameter: Tissue Value: Root Tips vs. Root Tops
  misc_feature: MA Experiment ID: 20000269 Result: Up-regulated in Transcription
  misc_feature: MA Experiment 20000269 PARAMETER Experiment Name: At_1mM_KNO3_L-vs-H_Roots_P Parameter: Age (day) Value: 7,10,12
  misc_feature: MA Experiment 20000269 PARAMETER Experiment Name: At_1mM_KNO3_L-vs-H_Roots_P Parameter: Organism Value: A. thaliana
  misc_feature: MA Experiment 20000269 PARAMETER Experiment Name: At_1mM_KNO3_L-vs-H_Roots_P Parameter: Plant Line Value: WS
  misc_feature: MA Experiment 20000269 PARAMETER Experiment Name: At_1mM_KNO3_L-vs-H_Roots_P Parameter: Timepoint (day) Value: 7,10,12
  misc_feature: MA Experiment 20000269 PARAMETER Experiment Name: At_1mM_KNO3_L-vs-H_Roots_P Parameter: Tissue Value: Roots
  misc_feature: MA Experiment 20000269 PARAMETER Experiment Name: At_1mM_KNO3_L-vs-H_Roots_P Parameter: Treatment Value: 1mM KNO3 vs. 50mM KNO3
  misc_feature: MA Experiment ID: 20000439 Result: Up-regulated in Transcription
  misc_feature: MA Experiment 20000439 PARAMETER Experiment Name: At_Roots__P Parameter: Age (day) Value: 14 vs. 21
  misc_feature: MA Experiment 20000439 PARAMETER Experiment Name: At_Roots__P Parameter: Organism Value: A. thaliana
  misc_feature: MA Experiment 20000439 PARAMETER Experiment Name: At_Roots__P Parameter: Tissue Value: Roots vs. Whole Plant
  misc_feature: MA Experiment ID: 20000451 Result: Up-regulated in Transcription
  misc_feature: MA Experiment 20000451 PARAMETER Experiment Name: At_CS6879_Shoots-Roots_P Parameter: Age (day) Value: 14
  misc_feature: MA Experiment 20000451 PARAMETER Experiment Name: At_CS6879_Shoots-Roots_P Parameter: Organism Value: A. thaliana
  misc_feature: MA Experiment 20000451 PARAMETER Experiment Name: At_CS6879_Shoots-Roots_P Parameter: Plant Line Value: CS6879 vs. WS
  misc_feature: MA Experiment 20000451 PARAMETER Experiment Name: At_CS6879_Shoots-Roots_P Parameter: Tissue Value: Roots
  misc_feature: MA Experiment ID: 20000527 Result: Down-regulated in Transcription
  misc_feature: MA Experiment 20000527 PARAMETER Experiment Name: At_10percent_PEG_P Parameter: Age (day) Value: 20
  misc_feature: MA Experiment 20000527 PARAMETER Experiment Name: At_10percent_PEG_P Parameter: Organism Value: A. thaliana
  misc_feature: MA Experiment 20000527 PARAMETER Experiment Name: At_10percent_PEG_P Parameter: Plant Line Value: WS
  misc_feature: MA Experiment 20000527 PARAMETER Experiment Name: At_10percent_PEG_P Parameter: Timepoint (day) Value: 20
  misc_feature: MA Experiment 20000527 PARAMETER Experiment Name: At_10percent_PEG_P Parameter: Tissue Value: Whole Plant
  misc_feature: MA Experiment 20000527 PARAMETER Experiment Name: At_10percent_PEG_P Parameter: Treatment Value: 10percent PEG vs. No Treatment
atgggtcatgaatggatcgatgcagagagggagttcaaatggagcgaggatgtcaaagttgaaagtgaagtgactgagatcgttcttgttcgccatggagaaaccacttggaatgctgccggaagaatccagggacaaattgaatcagaccttaacgaggttggactaaagcaggctgttgcaatcgctgagaggttgggaaaagaggaaagacctgtagctgtgtattcatcagacctcaaacgagccaaagacactgctcttatgatcgccaaaacttgtttctgtcccgaggtgatcgaagtacctgacttaaaggagaggcacgtgggtagtctccaaggcctgtattggaaagaaggagcagagaaagaacctgaagcttactctgcctttttctcttcccaaaacgacctcgagattccgggaggaggagagagctttgaccaacttgctgatagatccatggatgctcttgagcaaattgctaagaagcacaaaggagagagagtgatagtggtgactcatggaggagtgttgagggcaatttacttaaggatcacacaagcttcctctgccggaaaactcttgaatgcttcagtgaatgtggttcatctccgtgatcaaaaatggatcatcgattcgtggagcgatgtatcacatctatcatccgttggatttcttcaacgtggctttgatggagacgccaagccctagagaacctcctcattcatatcttgtgtcgatctataaagacttctataaataagtatctatttatcttgatgtttctgtgtgctttacttaagatgcgtaatcttcttgttgatcaattcctatcatcttgtaatttgtattactctattaataagagattttcatcttt

SEQ ID NO: 100255 - protein, 238 aa, Arabidopsis thaliana
  peptide (1)..(238): Ceres Seq. ID no. 13604740
  misc_feature (25)..(216): Pfam Name: Phosphoglycerate mutase family Pfam Description: Phosphoglycerate mutase family
  misc_feature (1)..(238): Homolog of NCBI NO: 15237633 NR Description: phosphoglycerate mutase - like protein
  misc_feature (1)..(238): Homolog of NCBI NO: 9955567 NR Description: phosphoglycerate mutase-like protein [Arabidopsis
  misc_feature (89)..(238): Homolog of NCBI NO: 26450240 NR Description: putative phosphoglycerate mutase [Arabidopsis
  misc_feature (15)..(235): Homolog of NCBI NO: 15229783 NR Description: expressed protein [Arabidopsis thaliana]
  misc_feature (25)..(225): Homolog of NCBI NO: 22976134 NR Description: hypothetical protein [Ralstonia metallidurans]
  misc_feature (24)..(224): Homolog of NCBI NO: 33592552 NR Description: probable phosphoglycerate mutase 2 [Bordetella >gi|33600435|ref|NP_887995.1| probable phosphoglycerate mutase 2 bronchiseptica] >gi|33568034|emb|CAE31947.1| probable
  misc_feature (23)..(222): Homolog of NCBI NO: 17545218 NR Description: PUTATIVE PHOSPHOGLYCERATE MUTASE 2 PROTEIN solanacearum] >gi|17427509|emb|CAD14027.1| PUTATIVE
  misc_feature (24)..(224): Homolog of NCBI NO: 33596671 NR Description: probable phosphoglycerate mutase 2 [Bordetella >gi|33573372|emb|CAE37356.1| probable phosphoglycerate mutase 2
  misc_feature (23)..(225): Homolog of NCBI NO: 23021451 NR Description: hypothetical protein [Clostridium thermocellum
  misc_feature (25)..(225): Homolog of NCBI NO: 15806410 NR Description: phosphoglycerate mutase, putative [Deinococcus
MGHEWIDAEREFKWSEDVKVESEVTEIVLVRHGETTWNAAGRIQGQIESDLNEVGLKQAVAIAERLGKEERPVAVYSSDLKRAKDTALMIAKTCFCPEVIEVPDLKERHVGSLQGLYWKEGAEKEPEAYSAFFSSQNDLEIPGGGESFDQLADRSMDALEQIAKKHKGERVIVVTHGGVLRAIYLRITQASSAGKLLNASVNVVHLRDQKWIIDSWSDVSHLSSVGFLQRGFDGDAKP

SEQ ID NO: 100256 - protein, 150 aa, Arabidopsis thaliana
  peptide (1)..(150): Ceres Seq. ID no. 13604741
  misc_feature (1)..(128): Pfam Name: Phosphoglycerate mutase family Pfam Description: Phosphoglycerate mutase family
  misc_feature (1)..(150): Homolog of NCBI NO: 15237633 NR Description: phosphoglycerate mutase - like protein
  misc_feature (1)..(150): Homolog of NCBI NO: 9955567 NR Description: phosphoglycerate mutase-like protein [Arabidopsis
  misc_feature (1)..(150): Homolog of NCBI NO: 26450240 NR Description: putative phosphoglycerate mutase [Arabidopsis
  misc_feature (1)..(147): Homolog of NCBI NO: 15229783 NR Description: expressed protein [Arabidopsis thaliana]
  misc_feature (1)..(137): Homolog of NCBI NO: 22976134 NR Description: hypothetical protein [Ralstonia metallidurans]
  misc_feature (1)..(136): Homolog of NCBI NO: 33592552 NR Description: probable phosphoglycerate mutase 2 [Bordetella >gi|33600435|ref|NP_887995.1| probable phosphoglycerate mutase 2 bronchiseptica] >gi|33568034|emb|CAE31947.1| probable
  misc_feature (1)..(134): Homolog of NCBI NO: 17545218 NR Description: PUTATIVE PHOSPHOGLYCERATE MUTASE 2 PROTEIN solanacearum] >gi|17427509|emb|CAD14027.1| PUTATIVE
  misc_feature (1)..(136): Homolog of NCBI NO: 33596671 NR Description: probable phosphoglycerate mutase 2 [Bordetella >gi|33573372|emb|CAE37356.1| probable phosphoglycerate mutase 2
  misc_feature (1)..(137): Homolog of NCBI NO: 23021451 NR Description: hypothetical protein [Clostridium thermocellum
  misc_feature (1)..(137): Homolog of NCBI NO: 15806410 NR Description: phosphoglycerate mutase, putative [Deinococcus
MIAKTCFCPEVIEVPDLKERHVGSLQGLYWKEGAEKEPEAYSAFFSSQNDLEIPGGGESFDQLADRSMDALEQIAKKHKGERVIVVTHGGVLRAIYLRITQASSAGKLLNASVNVVHLRDQKWIIDSWSDVSHLSSVGFLQRGFDGDAKP

SEQ ID NO: 100257 - DNA, 948 bp, Arabidopsis thaliana
  misc_feature (1)..(948): Ceres Seq. ID no. 13604742
  misc_feature: MA Experiment ID: 20000171 Result: Up-regulated in Transcription
  misc_feature: MA Experiment 20000171 PARAMETER Experiment Name: At_42deg_Heat_P Parameter: Age (day) Value: 14
  misc_feature: MA Experiment 20000171 PARAMETER Experiment Name: At_42deg_Heat_P Parameter: Organism Value: A. thaliana
  misc_feature: MA Experiment 20000171 PARAMETER Experiment Name: At_42deg_Heat_P Parameter: Plant Line Value: WS
  misc_feature: MA Experiment 20000171 PARAMETER Experiment Name: At_42deg_Heat_P Parameter: Temperature (deg C) Value: 42 vs. 22
  misc_feature: MA Experiment 20000171 PARAMETER Experiment Name: At_42deg_Heat_P Parameter: Timepoint (hr) Value: 1
  misc_feature: MA Experiment 20000171 PARAMETER Experiment Name: At_42deg_Heat_P Parameter: Tissue Value: Aerial
  misc_feature: MA Experiment ID: 20000173 Result: Up-regulated in Transcription
  misc_feature: MA Experiment 20000173 PARAMETER Experiment Name: At_42deg_Heat_P Parameter: Age (day) Value: 14
  misc_feature: MA Experiment 20000173 PARAMETER Experiment Name: At_42deg_Heat_P Parameter: Organism Value: A. thaliana
  misc_feature: MA Experiment 20000173 PARAMETER Experiment Name: At_42deg_Heat_P Parameter: Plant Line Value: WS
  misc_feature: MA Experiment 20000173 PARAMETER Experiment Name: At_42deg_Heat_P Parameter: Temperature (deg C) Value: 42 vs. 22
  misc_feature: MA Experiment 20000173 PARAMETER Experiment Name: At_42deg_Heat_P Parameter: Timepoint (hr) Value: 6
  misc_feature: MA Experiment 20000173 PARAMETER Experiment Name: At_42deg_Heat_P Parameter: Tissue Value: Aerial
  misc_feature: MA Experiment ID: 20000179 Result: Down-regulated in Transcription
  misc_feature: MA Experiment 20000179 PARAMETER Experiment Name: At_Germinating_Seeds_P Parameter: Age (hr) Value: 6 vs. 0
  misc_feature: MA Experiment 20000179 PARAMETER Experiment Name: At_Germinating_Seeds_P Parameter: Tissue Value: Germinating Seeds
  misc_feature: MA Experiment ID: 20000182 Result: Up-regulated in Transcription
  misc_feature: MA Experiment 20000182 PARAMETER Experiment Name: At_2mM_SA_P Parameter: Age (day) Value: 14
  misc_feature: MA Experiment 20000182 PARAMETER Experiment Name: At_2mM_SA_P Parameter: Organism Value: A. thaliana
  misc_feature: MA Experiment 20000182 PARAMETER Experiment Name: At_2mM_SA_P Parameter: Plant Line Value: WS
  misc_feature: MA Experiment 20000182 PARAMETER Experiment Name: At_2mM_SA_P Parameter: Timepoint (hr) Value: 6
  misc_feature: MA Experiment 20000182 PARAMETER Experiment Name: At_2mM_SA_P Parameter: Tissue Value: Aerial
  misc_feature: MA Experiment 20000182 PARAMETER Experiment Name: At_2mM_SA_P Parameter: Treatment Value: 2mM SA vs. No Treatment
  misc_feature: MA Experiment ID: 20000184 Result: Down-regulated in Transcription
  misc_feature: MA Experiment 20000184 PARAMETER Experiment Name: At_Shoots__P Parameter: Age (day) Value: 7
  misc_feature: MA Experiment 20000184 PARAMETER Experiment Name: At_Shoots__P Parameter: Tissue Value: Shoots vs. Whole Plant
  misc_feature: MA Experiment ID: 20000185 Result: Down-regulated in Transcription
  misc_feature: MA Experiment 20000185 PARAMETER Experiment Name: At_Roots__P Parameter: Age (day) Value: 7 vs. 21
  misc_feature: MA Experiment 20000185 PARAMETER Experiment Name: At_Roots__P Parameter: Organism Value: A. thaliana
  misc_feature: MA Experiment 20000185 PARAMETER Experiment Name: At_Roots__P Parameter: Tissue Value: Roots vs. Whole Plant
  misc_feature: MA Experiment ID: 20000227 Result: Down-regulated in Transcription
  misc_feature: MA Experiment 20000227 PARAMETER Experiment Name: At_Root-Tips-vs-Tops_P Parameter: Tissue Value: Root Tips vs. Root Tops
  misc_feature: MA Experiment ID: 20000234 Result: Down-regulated in Transcription
  misc_feature: MA Experiment 20000234 PARAMETER Experiment Name: At_Siliques_P Parameter: Age (day) Value: 21
  misc_feature: MA Experiment 20000234 PARAMETER Experiment Name: At_Siliques_P Parameter: Organism Value: A. thaliana
  misc_feature: MA Experiment 20000234 PARAMETER Experiment Name: At_Siliques_P Parameter: Plant Line Value: WS
  misc_feature: MA Experiment 20000234 PARAMETER Experiment Name: At_Siliques_P Parameter: Tissue Value: Less Than 5mm Siliques vs. Whole Plant
  misc_feature: MA Experiment ID: 20000264 Result: Down-regulated in Transcription
  misc_feature: MA Experiment 20000264 PARAMETER Experiment Name: At_Open_Flower_P Parameter: Age (day) Value: 21
  misc_feature: MA Experiment 20000264 PARAMETER Experiment Name: At_Open_Flower_P Parameter: Plant Line Value: WS
  misc_feature: MA Experiment 20000264 PARAMETER Experiment Name: At_Open_Flower_P Parameter: Tissue Value: Open Flower vs. Whole Plant
  misc_feature: MA Experiment ID: 20000265 Result: Down-regulated in Transcription
  misc_feature: MA Experiment 20000265 PARAMETER Experiment Name: At_Open_Flower_P Parameter: Age (day) Value: 21
  misc_feature: MA Experiment 20000265 PARAMETER Experiment Name: At_Open_Flower_P Parameter: Plant Line Value: WS
  misc_feature: MA Experiment 20000265 PARAMETER Experiment Name: At_Open_Flower_P Parameter: Tissue Value: Closed Flower vs. Whole Plant
  misc_feature: MA Experiment ID: 20000268 Result: Up-regulated in Transcription
  misc_feature: MA Experiment 20000268 PARAMETER Experiment Name: At_100mM_NaCl__P Parameter: Age (day) Value: 14
  misc_feature: MA Experiment 20000268 PARAMETER Experiment Name: At_100mM_NaCl__P Parameter: Organism Value: A. thaliana
  misc_feature: MA Experiment 20000268 PARAMETER Experiment Name: At_100mM_NaCl__P Parameter: Plant Line Value: WS
  misc_feature: MA Experiment 20000268 PARAMETER Experiment Name: At_100mM_NaCl__P Parameter: Timepoint (hr) Value: 6
  misc_feature: MA Experiment 20000268 PARAMETER Experiment Name: At_100mM_NaCl__P Parameter: Tissue Value: Whole Plant
  misc_feature: MA Experiment 20000268 PARAMETER Experiment Name: At_100mM_NaCl__P Parameter: Treatment Value: 100mM NaCl vs. No Treatment
  misc_feature: MA Experiment ID: 20000286 Result: Down-regulated in Transcription
  misc_feature: MA Experiment 20000286 PARAMETER Experiment Name: At_Open_Flower_P Parameter: Age (day) Value: 21
  misc_feature: MA Experiment 20000286 PARAMETER Experiment Name: At_Open_Flower_P Parameter: Plant Line Value: WS
  misc_feature: MA Experiment 20000286 PARAMETER Experiment Name: At_Open_Flower_P Parameter: Tissue Value: Half Open vs. Whole Plant
  misc_feature: MA Experiment ID: 20000436 Result: Up-regulated in Transcription
  misc_feature: MA Experiment 20000436 PARAMETER Experiment Name: At_Drought_P Parameter: Age (day) Value: 7
  misc_feature: MA Experiment 20000436 PARAMETER Experiment Name: At_Drought_P Parameter: Organism Value: A. thaliana
  misc_feature: MA Experiment 20000436 PARAMETER Experiment Name: At_Drought_P Parameter: Plant Line Value: WS
  misc_feature: MA Experiment 20000436 PARAMETER Experiment Name: At_Drought_P Parameter: Timepoint (hr) Value: 12
  misc_feature: MA Experiment 20000436 PARAMETER Experiment Name: At_Drought_P Parameter: Tissue Value: Whole Plant
  misc_feature: MA Experiment 20000436 PARAMETER Experiment Name: At_Drought_P Parameter: Treatment Value: Drought vs. No Drought
  misc_feature: MA Experiment ID: 20000437 Result: Up-regulated in Transcription
  misc_feature: MA Experiment 20000437 PARAMETER Experiment Name: At_Drought_P Parameter: Age (day) Value: 8
  misc_feature: MA Experiment 20000437 PARAMETER Experiment Name: At_Drought_P Parameter: Organism Value: A. thaliana
  misc_feature: MA Experiment 20000437 PARAMETER Experiment Name: At_Drought_P Parameter: Plant Line Value: WS
  misc_feature: MA Experiment 20000437 PARAMETER Experiment Name: At_Drought_P Parameter: Timepoint (hr) Value: 24
  misc_feature: MA Experiment 20000437 PARAMETER Experiment Name: At_Drought_P Parameter: Tissue Value: Whole Plant
  misc_feature: MA Experiment 20000437 PARAMETER Experiment Name: At_Drought_P Parameter: Treatment Value: Drought vs. No Drought
  misc_feature: MA Experiment ID: 20000438 Result: Down-regulated in Transcription
  misc_feature: MA Experiment 20000438 PARAMETER Experiment Name: At_Shoots__P Parameter: Age (day) Value: 14
  misc_feature: MA Experiment 20000438 PARAMETER Experiment Name: At_Shoots__P Parameter: Tissue Value: Shoots vs. Whole Plant
  misc_feature: MA Experiment ID: 20000439 Result: Down-regulated in Transcription
  misc_feature: MA Experiment 20000439 PARAMETER Experiment Name: At_Roots__P Parameter: Age (day) Value: 14 vs. 21
  misc_feature: MA Experiment 20000439 PARAMETER Experiment Name: At_Roots__P Parameter: Organism Value: A. thaliana
  misc_feature: MA Experiment 20000439 PARAMETER Experiment Name: At_Roots__P Parameter: Tissue Value: Roots vs. Whole Plant
  misc_feature: MA Experiment ID: 20000441 Result: Up-regulated in Transcription
  misc_feature: MA Experiment 20000441 PARAMETER Experiment Name: At_1uM_BR-BRZ__P Parameter: Tissue Value: Shoot Apices
  misc_feature: MA Experiment 20000441 PARAMETER Experiment Name: At_1uM_BR-BRZ__P Parameter: Treatment Value: 1uM BR vs. No Treatment
  misc_feature: MA Experiment ID: 20000443 Result: Up-regulated in Transcription
  misc_feature: MA Experiment 20000443 PARAMETER Experiment Name: At_1uM_BR-BRZ__P Parameter: Tissue Value: Shoot Apices
  misc_feature: MA Experiment 20000443 PARAMETER Experiment Name: At_1uM_BR-BRZ__P Parameter: Treatment Value: 1uM BRZ vs. No Treatment
  misc_feature: MA Experiment ID: 20000452 Result: Up-regulated in Transcription
  misc_feature: MA Experiment 20000452 PARAMETER Experiment Name: At_CS6879_Shoots-Roots_P Parameter: Age (day) Value: 14
  misc_feature: MA Experiment 20000452 PARAMETER Experiment Name: At_CS6879_Shoots-Roots_P Parameter: Organism Value: A. thaliana
  misc_feature: MA Experiment 20000452 PARAMETER Experiment Name: At_CS6879_Shoots-Roots_P Parameter: Plant Line Value: CS6879 vs. WS
  misc_feature: MA Experiment 20000452 PARAMETER Experiment Name: At_CS6879_Shoots-Roots_P Parameter: Tissue Value: Shoots
  misc_feature: MA Experiment ID: 20000495 Result: Down-regulated in Transcription
  misc_feature: MA Experiment 20000495 PARAMETER Experiment Name: At_Guard_Cells_P Parameter: Harvest Date Value: 8/2/2002
  misc_feature: MA Experiment 20000495 PARAMETER Experiment Name: At_Guard_Cells_P Parameter: Organism Value: A. thaliana
  misc_feature: MA Experiment 20000495 PARAMETER Experiment Name: At_Guard_Cells_P Parameter: Tissue Value: Guard Cells vs. Leaves
  misc_feature: MA Experiment ID: 20000573 Result: Down-regulated in Transcription
  misc_feature: MA Experiment 20000573 PARAMETER Experiment Name: At_100uM_ABA_Mutants__P Parameter: Organism Value: A. thaliana
  misc_feature: MA Experiment 20000573 PARAMETER Experiment Name: At_100uM_ABA_Mutants__P Parameter: Plant Line Value: CS22 vs. Ler wt
  misc_feature: MA Experiment 20000573 PARAMETER Experiment Name: At_100uM_ABA_Mutants__P Parameter: Timepoint (hr) Value: N/A
  misc_feature: MA Experiment 20000573 PARAMETER Experiment Name: At_100uM_ABA_Mutants__P Parameter: Tissue Value: Whole Plant
  misc_feature: MA Experiment 20000573 PARAMETER Experiment Name: At_100uM_ABA_Mutants__P Parameter: Treatment Value: None
  misc_feature: MA Experiment ID: 20000574 Result: Down-regulated in Transcription
  misc_feature: MA Experiment 20000574 PARAMETER Experiment Name: At_100uM_ABA_Mutants__P Parameter: Organism Value: A. thaliana
  misc_feature: MA Experiment 20000574 PARAMETER Experiment Name: At_100uM_ABA_Mutants__P Parameter: Plant Line Value: CS23 vs. Ler wt
  misc_feature: MA Experiment 20000574 PARAMETER Experiment Name: At_100uM_ABA_Mutants__P Parameter: Timepoint (hr) Value: N/A
  misc_feature: MA Experiment 20000574 PARAMETER Experiment Name: At_100uM_ABA_Mutants__P Parameter: Tissue Value: Whole Plant
  misc_feature: MA Experiment 20000574 PARAMETER Experiment Name: At_100uM_ABA_Mutants__P Parameter: Treatment Value: None
  misc_feature: MA Experiment ID: 20000575 Result: Down-regulated in Transcription
  misc_feature: MA Experiment 20000575 PARAMETER Experiment Name: At_100uM_ABA_Mutants__P Parameter: Organism Value: A. thaliana
  misc_feature: MA Experiment 20000575 PARAMETER Experiment Name: At_100uM_ABA_Mutants__P Parameter: Plant Line Value: CS22
  misc_feature: MA Experiment 20000575 PARAMETER Experiment Name: At_100uM_ABA_Mutants__P Parameter: Timepoint (hr) Value: 6
  misc_feature: MA Experiment 20000575 PARAMETER Experiment Name: At_100uM_ABA_Mutants__P Parameter: Tissue Value: Whole Plant
  misc_feature: MA Experiment 20000575 PARAMETER Experiment Name: At_100uM_ABA_Mutants__P Parameter: Treatment Value: 1uM ABA vs. No Treatment
  misc_feature: MA Experiment ID: 20001554 Result: Up-regulated in Transcription
  misc_feature: MA Experiment 20001554 PARAMETER Experiment Name: At_Drought_Soil_Dry_P Parameter: Age (day) Value: 21
  misc_feature: MA Experiment 20001554 PARAMETER Experiment Name: At_Drought_Soil_Dry_P Parameter: Organism Value: A. thaliana
  misc_feature: MA Experiment 20001554 PARAMETER Experiment Name: At_Drought_Soil_Dry_P Parameter: Plant Line Value: WS
  misc_feature: MA Experiment 20001554 PARAMETER Experiment Name: At_Drought_Soil_Dry_P Parameter: Post Timepoint (hr) Value: None
  misc_feature: MA Experiment 20001554 PARAMETER Experiment Name: At_Drought_Soil_Dry_P Parameter: Post-Treatment Value: None
  misc_feature: MA Experiment 20001554 PARAMETER Experiment Name: At_Drought_Soil_Dry_P Parameter: Timepoint (day) Value: 7
  misc_feature: MA Experiment 20001554 PARAMETER Experiment Name: At_Drought_Soil_Dry_P Parameter: Treatment Value: Drought vs. No Drought
  misc_feature: MA Experiment ID: 20001557 Result: Up-regulated in Transcription
  misc_feature: MA Experiment 20001557 PARAMETER Experiment Name: At_Drought_Soil_Dry_P Parameter: Age (day) Value: 27
  misc_feature: MA Experiment 20001557 PARAMETER Experiment Name: At_Drought_Soil_Dry_P Parameter: Organism Value: A. thaliana
  misc_feature: MA Experiment 20001557 PARAMETER Experiment Name: At_Drought_Soil_Dry_P Parameter: Plant Line Value: WS
  misc_feature: MA Experiment 20001557 PARAMETER Experiment Name: At_Drought_Soil_Dry_P Parameter: Post Timepoint (hr) Value: 3
  misc_feature: MA Experiment 20001557 PARAMETER Experiment Name: At_Drought_Soil_Dry_P Parameter: Post-Treatment Value: Re-Water vs. No Drought
  misc_feature: MA Experiment 20001557 PARAMETER Experiment Name: At_Drought_Soil_Dry_P Parameter: Timepoint (day) Value: 13
  misc_feature: MA Experiment 20001557 PARAMETER Experiment Name: At_Drought_Soil_Dry_P Parameter: Treatment Value: Drought vs. No Drought
  misc_feature: MA Experiment ID: 20001761 Result: Down-regulated in Transcription
  misc_feature: MA Experiment 20001761 PARAMETER Experiment Name: At_50mM_NH4NO3_L-to-H_P Parameter: Timepoint (hr) Value: 4
  misc_feature: MA Experiment 20001761 PARAMETER Experiment Name: At_50mM_NH4NO3_L-to-H_P Parameter: Tissue Value: Siliques
  misc_feature: MA Experiment 20001761 PARAMETER Experiment Name: At_50mM_NH4NO3_L-to-H_P Parameter: Treatment Value: 50mM NH4NO3 vs 100mM Mannitol
  misc_feature: MA Experiment ID: 20001773 Result: Down-regulated in Transcription
  misc_feature: MA Experiment 20001773 PARAMETER Experiment Name: At_Far-red-enriched-adult_P Parameter: Age (day) Value: 30
  misc_feature: MA Experiment 20001773 PARAMETER Experiment Name: At_Far-red-enriched-adult_P Parameter: Light Value: Far-red enriched vs. White
  misc_feature: MA Experiment 20001773 PARAMETER Experiment Name: At_Far-red-enriched-adult_P Parameter: Organism Value: A. thaliana
  misc_feature: MA Experiment 20001773 PARAMETER Experiment Name: At_Far-red-enriched-adult_P Parameter: Plant Line Value: Columbia
  misc_feature: MA Experiment 20001773 PARAMETER Experiment Name: At_Far-red-enriched-adult_P Parameter: Timepoint (hr) Value: 48
  misc_feature: MA Experiment 20001773 PARAMETER Experiment Name: At_Far-red-enriched-adult_P Parameter: Tissue Value: Aerial
  misc_feature: MA Experiment ID: 20001774 Result: Down-regulated in Transcription
  misc_feature: MA Experiment 20001774 PARAMETER Experiment Name: At_Far-red-enriched-adult_P Parameter: Age (day) Value: 31
  misc_feature: MA Experiment 20001774 PARAMETER Experiment Name: At_Far-red-enriched-adult_P Parameter: Light Value: Far-red enriched vs. White
  misc_feature: MA Experiment 20001774 PARAMETER Experiment Name: At_Far-red-enriched-adult_P Parameter: Organism Value: A. thaliana
  misc_feature: MA Experiment 20001774 PARAMETER Experiment Name: At_Far-red-enriched-adult_P Parameter: Plant Line Value: Columbia
  misc_feature: MA Experiment 20001774 PARAMETER Experiment Name: At_Far-red-enriched-adult_P Parameter: Timepoint (hr) Value: 72
  misc_feature: MA Experiment 20001774 PARAMETER Experiment Name: At_Far-red-enriched-adult_P Parameter: Tissue Value: Aerial
  misc_feature: MA Experiment ID: 20001904 Result: Up-regulated in Transcription
  misc_feature: MA Experiment 20001904 PARAMETER Experiment Name: At_Drought_Reproduction_P Parameter: Age (day) Value: 37
  misc_feature: MA Experiment 20001904 PARAMETER Experiment Name: At_Drought_Reproduction_P Parameter: Organism Value: A. thaliana
  misc_feature: MA Experiment 20001904 PARAMETER Experiment Name: At_Drought_Reproduction_P Parameter: Plant Line Value: WS
  misc_feature: MA Experiment 20001904 PARAMETER Experiment Name: At_Drought_Reproduction_P Parameter: Timepoint (day) Value: 7
  misc_feature: MA Experiment 20001904 PARAMETER Experiment Name: At_Drought_Reproduction_P Parameter: Tissue Value: Rosettes
  misc_feature: MA Experiment 20001904 PARAMETER Experiment Name: At_Drought_Reproduction_P Parameter: Treatment Value: Drought vs. No Drought
  misc_feature: MA Experiment ID: 20001905 Result: Up-regulated in Transcription
  misc_feature: MA Experiment 20001905 PARAMETER Experiment Name: At_Drought_Reproduction_P Parameter: Age (day) Value: 40
  misc_feature: MA Experiment 20001905 PARAMETER Experiment Name: At_Drought_Reproduction_P Parameter: Organism Value: A. thaliana
  misc_feature: MA Experiment 20001905 PARAMETER Experiment Name: At_Drought_Reproduction_P Parameter: Plant Line Value: WS
  misc_feature: MA Experiment 20001905 PARAMETER Experiment Name: At_Drought_Reproduction_P Parameter: Timepoint (day) Value: 10
  misc_feature: MA Experiment 20001905 PARAMETER Experiment Name: At_Drought_Reproduction_P Parameter: Tissue Value: Rosettes
  misc_feature: MA Experiment 20001905 PARAMETER Experiment Name: At_Drought_Reproduction_P Parameter: Treatment Value: Drought vs. No Drought
  misc_feature: MA Experiment ID: 20001906 Result: Up-regulated in Transcription
  misc_feature: MA Experiment 20001906 PARAMETER Experiment Name: At_Drought_Reproduction_P Parameter: Age (day) Value: 35
  misc_feature: MA Experiment 20001906 PARAMETER Experiment Name: At_Drought_Reproduction_P Parameter: Organism Value: A. thaliana
  misc_feature: MA Experiment 20001906 PARAMETER Experiment Name: At_Drought_Reproduction_P Parameter: Plant Line Value: WS
  misc_feature: MA Experiment 20001906 PARAMETER Experiment Name: At_Drought_Reproduction_P Parameter: Timepoint (day) Value: 5
  misc_feature: MA Experiment 20001906 PARAMETER Experiment Name: At_Drought_Reproduction_P Parameter: Tissue Value: Siliques
  misc_feature: MA Experiment 20001906 PARAMETER Experiment Name: At_Drought_Reproduction_P Parameter: Treatment Value: Drought vs. No Drought
  misc_feature: MA Experiment ID: 20001910 Result: Up-regulated in Transcription
  misc_feature: MA Experiment 20001910 PARAMETER Experiment Name: At_Drought_Reproduction_P Parameter: Age (day) Value: 37
  misc_feature: MA Experiment 20001910 PARAMETER Experiment Name: At_Drought_Reproduction_P Parameter: Organism Value: A. thaliana
  misc_feature: MA Experiment 20001910 PARAMETER Experiment Name: At_Drought_Reproduction_P Parameter: Plant Line Value: WS
  misc_feature: MA Experiment 20001910 PARAMETER Experiment Name: At_Drought_Reproduction_P Parameter: Timepoint (day) Value: 7
  misc_feature: MA Experiment 20001910 PARAMETER Experiment Name: At_Drought_Reproduction_P Parameter: Tissue Value: Flowers
  misc_feature: MA Experiment 20001910 PARAMETER Experiment Name: At_Drought_Reproduction_P Parameter: Treatment Value: Drought vs. No Drought
  misc_feature: MA Experiment ID: 20001911 Result: Up-regulated in Transcription
  misc_feature: MA Experiment 20001911 PARAMETER Experiment Name: At_Drought_Reproduction_P Parameter: Age (day) Value: 40
  misc_feature: MA Experiment 20001911 PARAMETER Experiment Name: At_Drought_Reproduction_P Parameter: Organism Value: A. thaliana
  misc_feature: MA Experiment 20001911 PARAMETER Experiment Name: At_Drought_Reproduction_P Parameter: Plant Line Value: WS
  misc_feature: MA Experiment 20001911 PARAMETER Experiment Name: At_Drought_Reproduction_P Parameter: Timepoint (day) Value: 10
  misc_feature: MA Experiment 20001911 PARAMETER Experiment Name: At_Drought_Reproduction_P Parameter: Tissue Value: Flowers
  misc_feature: MA Experiment 20001911 PARAMETER Experiment Name: At_Drought_Reproduction_P Parameter: Treatment Value: Drought vs. No Drought
aaatcaaatcttttcatttacaattatctttcttctcaatttagaacttagtagctagtcttcaagataatggcacttgaaactcttacttctccaagattatcttctccgatgccgactctgtttcaagattcagcactagggtttcatggaagcaaaggcaaacgatctaagcgatcaagatctgaattcgaccgtcagagtctcacggaggatgaatatatcgctttatgtctcatgcttcttgctcgcgacggagatagaaaccgtgaccttgacctgccttcttcttcgtcttcacctcctctgcttcctcctcttcctactccgatctacaagtgtagcgtctgtgacaaggcgttttcgtcttaccaggctcttggtggacacaaggcaagtcaccggaaaagcttttcgcttactcaatctgccggaggagatgagctgtcgacatcgtcggcgataaccacgtctggtatatccggtggcgggggaggaagtgtgaagtcgcacgtttgctctatctgtcataaatcgttcgccaccggtcaagctctcggcggccacaaacggtgccactacgaaggaaagaacggaggcggtgtgagtagtagcgtgtcgaattctgaagatgtggggtctacaagccacgtcagcagtggccaccgtgggtttgacctcaacataccgccgataccggaattctcgatggtcaacggagacgaagaggtgatgagtcctatgccggcgaagaaactccggtttgacttcccggagaaaccctaaacataaacctaggaaaaactttacagaattcattttataggaaattgttttactgtatatacaaatatcgattttgattgatgttcttcttcactgaaaaattatgattctttgttgtataattgatgtttctgaaaaagatataactttttattgtttcac

SEQ ID NO: 100258 - protein, 238 aa, Arabidopsis thaliana
  peptide (1)..(238): Ceres Seq. ID no. 13604743
  misc_feature (148)..(170): Pfam Name: Zinc finger, C2H2 type Pfam Description: Zinc finger, C2H2 type
  misc_feature (1)..(238): Homolog of NCBI NO: 15237692 NR Description: c2h2 zinc finger transcription factor -related thaliana] >gi|2511546|gb|AAB80922.1| putative c2h2 zinc finger
  misc_feature (1)..(238): Homolog of NCBI NO: 26452746 NR Description: putative C2H2 zinc finger transcription factor
  misc_feature (1)..(237): Homolog of NCBI NO: 6693033 NR Description: T22C5.18 [Arabidopsis thaliana]
  misc_feature (1)..(237): Homolog of NCBI NO: 15217692 NR Description: salt-tolerance zinc finger protein [Arabidopsis
  misc_feature (1)..(237): Homolog of NCBI NO: 1418323 NR Description: zinc finger protein [Arabidopsis thaliana]
  misc_feature (1)..(237): Homolog of NCBI NO: 439493 NR Description: zinc-finger protein [Petunia x hybrida]
  misc_feature (1)..(229): Homolog of NCBI NO: 7228329 NR Description: putative TFIIIA (or kruppel)-like zinc finger
  misc_feature (1)..(231): Homolog of NCBI NO: 4666360 NR Description: zinc-finger protein 1 [Datisca glomerata]
MALETLTSPRLSSPMPTLFQDSALGFHGSKGKRSKRSRSEFDRQSLTEDEYIALCLMLLARDGDRNRDLDLPSSSSSPPLLPPLPTPIYKCSVCDKAFSSYQALGGHKASHRKSFSLTQSAGGDELSTSSAITTSGISGGGGGSVKSHVCSICHKSFATGQALGGHKRCHYEGKNGGGVSSSVSNSEDVGSTSHVSSGHRGFDLNIPPIPEFSMVNGDEEVMSPMPAKKLRFDFPEKP

SEQ ID NO: 100259 - protein, 224 aa, Arabidopsis thaliana
  peptide (1)..(224): Ceres Seq. ID no. 13604744
  misc_feature (134)..(156): Pfam Name: Zinc finger, C2H2 type Pfam Description: Zinc finger, C2H2 type
  misc_feature (1)..(224): Homolog of NCBI NO: 15237692 NR Description: c2h2 zinc finger transcription factor -related thaliana] >gi|2511546|gb|AAB80922.1| putative c2h2 zinc finger
  misc_feature (1)..(224): Homolog of NCBI NO: 26452746 NR Description: putative C2H2 zinc finger transcription factor
  misc_feature (1)..(223): Homolog of NCBI NO: 6693033 NR Description: T22C5.18 [Arabidopsis thaliana]
  misc_feature (1)..(223): Homolog of NCBI NO: 15217692 NR Description: salt-tolerance zinc finger protein [Arabidopsis
  misc_feature (1)..(223): Homolog of NCBI NO: 1418323 NR Description: zinc finger protein [Arabidopsis thaliana]
  misc_feature (1)..(223): Homolog of NCBI NO: 439493 NR Description: zinc-finger protein [Petunia x hybrida]
  misc_feature (1)..(215): Homolog of NCBI NO: 7228329 NR Description: putative TFIIIA (or kruppel)-like zinc finger
  misc_feature (1)..(217): Homolog of NCBI NO: 4666360 NR Description: zinc-finger protein 1 [Datisca glomerata]
MPTLFQDSALGFHGSKGKRSKRSRSEFDRQSLTEDEYIALCLMLLARDGDRNRDLDLPSSSSSPPLLPPLPTPIYKCSVCDKAFSSYQALGGHKASHRKSFSLTQSAGGDELSTSSAITTSGISGGGGGSVKSHVCSICHKSFATGQALGGHKRCHYEGKNGGGVSSSVSNSEDVGSTSHVSSGHRGFDLNIPPIPEFSMVNGDEEVMSPMPAKKLRFDFPEKP

SEQ ID NO: 100260 - protein, 182 aa, Arabidopsis thaliana
  peptide (1)..(182): Ceres Seq. ID no. 13604745
  misc_feature (92)..(114): Pfam Name: Zinc finger, C2H2 type Pfam Description: Zinc finger, C2H2 type
  misc_feature (1)..(182): Homolog of NCBI NO: 15237692 NR Description: c2h2 zinc finger transcription factor -related thaliana] >gi|2511546|gb|AAB80922.1| putative c2h2 zinc finger
  misc_feature (1)..(182): Homolog of NCBI NO: 26452746 NR Description: putative C2H2 zinc finger transcription factor
  misc_feature (1)..(181): Homolog of NCBI NO: 6693033 NR Description: T22C5.18 [Arabidopsis thaliana]
  misc_feature (1)..(181): Homolog of NCBI NO: 15217692 NR Description: salt-tolerance zinc finger protein [Arabidopsis
  misc_feature (1)..(181): Homolog of NCBI NO: 1418323 NR Description: zinc finger protein [Arabidopsis thaliana]
  misc_feature (1)..(181): Homolog of NCBI NO: 439493 NR Description: zinc-finger protein [Petunia x hybrida]
  misc_feature (1)..(173): Homolog of NCBI NO: 7228329 NR Description: putative TFIIIA (or kruppel)-like zinc finger
  misc_feature (1)..(175): Homolog of NCBI NO: 4666360 NR Description: zinc-finger protein 1 [Datisca glomerata]
MLLARDGDRNRDLDLPSSSSSPPLLPPLPTPIYKCSVCDKAFSSYQALGGHKASHRKSFSLTQSAGGDELSTSSAITTSGISGGGGGSVKSHVCSICHKSFATGQALGGHKRCHYEGKNGGGVSSSVSNSEDVGSTSHVSSGHRGFDLNIPPIPEFSMVNGDEEVMSPMPAKKLRFDFPEKP

SEQ ID NO: 100261 - DNA, 839 bp, Arabidopsis thaliana
  misc_feature (1)..(839): Ceres Seq. ID no. 13604760
  misc_feature: MA Experiment ID: 20000495 Result: Down-regulated in Transcription
  misc_feature: MA Experiment 20000495 PARAMETER Experiment Name: At_Guard_Cells_P Parameter: Harvest Date Value: 8/2/2002
  misc_feature: MA Experiment 20000495 PARAMETER Experiment Name: At_Guard_Cells_P Parameter: Organism Value: A. thaliana
  misc_feature: MA Experiment 20000495 PARAMETER Experiment Name: At_Guard_Cells_P Parameter: Tissue Value: Guard Cells vs. Leaves
aaagagaagaaggagcaaaaaggttttgccgaagttgagagatcaatcaaagatttgaagttccgatgaattcaggaggtggaatcgttgctgcagcagctccttcaagcggcggtggtaatgttgaatggcatgtccgaccaccgaaccctaaaaacccagttgtcttcttcgacgtctctattggtggtatccccgccggtcgtatcaagatggagctcttcgccgacattgctcccaaaaccgctgaaaacttcaggcagttctgtactggtgaactcagaaaagctggaaagccgcttggttacaaagaatgtcagtttcacagagtcatcaaagattttatggttcaaagtggtgattttcttaagaatgatggtagtggatgcatgtcaatctacggccacaagtttgaggatgagaattttactgctaaacatactggaccaggattgctctccatggcaaatagtgggccaaacacaaatgggtgccagttcttcatcacttgtgcaaaatgcgattggcttgacaacaagcatgttgtctttgggagagtgcttggagatggtttgttggttatgcggaagattgagaacgtggctattggacccaataaccggcctaaacttgcggttgtaattactgagtgtggggagatgtgaaatgttttcgaatgttatgagagcccatagcttattagttttaaacttaggcattgtgacagaagccaaatcccattgtgggttatctaaaatgtcaacttcttacggcttacaaatactacagttgaggctatctatggccgttatgattgtattttaacaaaagctatttgc

SEQ ID NO: 100262 - protein, 199 aa, Arabidopsis thaliana
  peptide (1)..(199): Ceres Seq. ID no. 13604761
  misc_feature (33)..(199): Pfam Name: Cyclophilin type peptidyl-prolyl cis-trans isomerase Pfam Description: Cyclophilin type peptidyl-prolyl cis-trans
  misc_feature (1)..(199): Homolog of NCBI NO: 15224944 NR Description: peptidyl-prolyl cis-trans isomerase -related
  misc_feature (1)..(199): Homolog of NCBI NO: 32129321 NR Description: putative cyclophilin [Oryza sativa (japonica
  misc_feature (12)..(199): Homolog of NCBI NO: 4454307 NR Description: cyclophilin [Pseudotsuga menziesii]
  misc_feature (23)..(199): Homolog of NCBI NO: 37595420 NR Description: peptidyl prolyl isomerase H [Danio rerio]
  misc_feature (28)..(199): Homolog of NCBI NO: 5454154 NR Description: peptidyl prolyl isomerase H; cyclophilin H [Homo >gi|20830368|ref|XP_132057.1| similar to cyclophilin [Mus >gi|21312022|ref|NP_082953.1| RIKEN cDNA 1100001J08; DNA segment,
  misc_feature (28)..(199): Homolog of NCBI NO: 39849992 NR Description: Unknown (protein for MGC:76244) [Silurana
  misc_feature (25)..(199): Homolog of NCBI NO: 11602709 NR Description: putative U-snRNP-associated cyclophilin
  misc_feature (28)..(199): Homolog of NCBI NO: 39597495 NR Description: Hypothetical protein CBG03161 [Caenorhabditis
  misc_feature (28)..(199): Homolog of NCBI NO: 17532643 NR Description: Peptidyl-prolyl cis-trans isomerase cyclophilin
  misc_feature (20)..(199): Homolog of NCBI NO: 24586038 NR Description: CG17266-PA [Drosophila melanogaster]
MNSGGGIVAAAAPSSGGGNVEWHVRPPNPKNPVVFFDVSIGGIPAGRIKMELFADIAPKTAENFRQFCTGELRKAGKPLGYKECQFHRVIKDFMVQSGDFLKNDGSGCMSIYGHKFEDENFTAKHTGPGLLSMANSGPNTNGCQFFITCAKCDWLDNKHVVFGRVLGDGLLVMRKIENVAIGPNNRPKLAVVITECGEM

SEQ ID NO: 100263 - protein, 173 aa, Arabidopsis thaliana
  peptide (1)..(173): Ceres Seq. ID no. 13604762
MLNGMSDHRTLKTQLSSSTSLLVVSPPVVSRWSSSPTLLPKPLKTSGSSVLVNSEKLESRLVTKNVSFTESSKILWFKVVIFLRMMVVDACQSTATSLRMRILLLNILDQDCSPWQIVGQTQMGASSSSLVQNAIGLTTSMLSLGECLEMVCWLCGRLRTWLLDPITGLNLRL

SEQ ID NO: 100264 - protein, 169 aa, Arabidopsis thaliana
  peptide (1)..(169): Ceres Seq. ID no. 13604763
MSDHRTLKTQLSSSTSLLVVSPPVVSRWSSSPTLLPKPLKTSGSSVLVNSEKLESRLVTKNVSFTESSKILWFKVVIFLRMMVVDACQSTATSLRMRILLLNILDQDCSPWQIVGQTQMGASSSSLVQNAIGLTTSMLSLGECLEMVCWLCGRLRTWLLDPITGLNLRL

SEQ ID NO: 100265 - DNA, 846 bp, Arabidopsis thaliana
  misc_feature (1)..(846): Ceres Seq. ID no. 13604768
  misc_feature: MA Experiment ID: 108577 Result: Up-regulated in Transcription
  misc_feature: MA Experiment 108577 PARAMETER Experiment Name: At_42deg_Heat_cDNA_P Parameter: Temperature (deg C) Value: 42 vs. 22
  misc_feature: MA Experiment 108577 PARAMETER Experiment Name: At_42deg_Heat_cDNA_P Parameter: Timepoint (hr) Value: 6
  misc_feature: MA Experiment 108577 PARAMETER Experiment Name: At_42deg_Heat_cDNA_P Parameter: Tissue Value: Aerial
  misc_feature: MA Experiment ID: 108595 Result: Up-regulated in Transcription
  misc_feature: MA Experiment 108595 PARAMETER Experiment Name: At_Ler-pi_Ovule_cDNA_P Parameter: Plant Line Value: null
  misc_feature: MA Experiment ID: 20000437 Result: Up-regulated in Transcription
  misc_feature: MA Experiment 20000437 PARAMETER Experiment Name: At_Drought_P Parameter: Age (day) Value: 8
  misc_feature: MA Experiment 20000437 PARAMETER Experiment Name: At_Drought_P Parameter: Organism Value: A. thaliana
  misc_feature: MA Experiment 20000437 PARAMETER Experiment Name: At_Drought_P Parameter: Plant Line Value: WS
  misc_feature: MA Experiment 20000437 PARAMETER Experiment Name: At_Drought_P Parameter: Timepoint (hr) Value: 24
  misc_feature: MA Experiment 20000437 PARAMETER Experiment Name: At_Drought_P Parameter: Tissue Value: Whole Plant
  misc_feature: MA Experiment 20000437 PARAMETER Experiment Name: At_Drought_P Parameter: Treatment Value: Drought vs. No Drought
ataaacaccagtcgcagcgtttcgtagaaaaattcgatttctctaaagccctaaaactaaaacgactatccccaattccaagttctagggtttccatcttccccaatctagtataaatggcggatacgccttcgagcccagctggagatggcggagaaagcggcggttccgttagggagcaggatcgataccttcctatagctaatatcagcaggatcatgaagaaagcgttgcctcctaatggtaagattggaaaagatgctaaggatacagttcaggaatgcgtctctgagttcatcagcttcatcactagcgaggccagtgataagtgtcaaaaagagaaaaggaaaactgtgaatggtgatgatttgttgtgggcaatggcaacattaggatttgaggattacctggaacctctaaagatatacctagcgaggtacagggagttggagggtgataataagggatcaggaaagagtggagatggatcaaatagagatgctggtggcggtgtttctggtgaagaaatgccgagctggtaaaagaagttgcaagtagtgattaagaacaatcgccaaatgatcaagggaaattagagatcagtgagttgtttatagttgagctgatcgacaactatttcgggtttactctcaatttcggttatgttagtttgaacgtttggtttattgtttccggtttagttggttgtatttaaagatttctctgttagatgttgagaacacttgaatgaaggaaaaatttgtccacatcctgttgttattttcgattcactttcggaatttcatagctaatttattctcatttaatacaaaatccttaaattaa

SEQ ID NO: 100266 - protein, 141 aa, Arabidopsis thaliana; identical to SEQ ID NO: 27889
  peptide (1)..(141): Ceres Seq. ID no. 13604769
  misc_feature (1)..(141): Homolog of NCBI NO: 18404885 NR Description: CCAAT-binding transcription factor subunit [Arabidopsis thaliana] >gi|2398527|emb|CAA74051.1| Transcription [Arabidopsis thaliana] >gi|20197447|gb|AAC79602.2| putative
  misc_feature (1)..(139): Homolog of NCBI NO: 25299604 NR Description: hypothetical protein At2g38880 [imported] -
  misc_feature (1)..(111): Homolog of NCBI NO: 30687688 NR Description: CCAAT-binding transcription factor subunit
  misc_feature (1)..(133): Homolog of NCBI NO: 22380 NR Description: CAAT-box DNA binding protein subunit B (NF-YB)
  misc_feature (1)..(133): Homolog of NCBI NO: 115840 NR Description: CCAAT-BINDING TRANSCRIPTION FACTOR SUBUNIT A
  misc_feature (10)..(135): Homolog of NCBI NO: 30409461 NR Description: NF-YB [Oryza sativa (japonica cultivar-group)]
  misc_feature (1)..(136): Homolog of NCBI NO: 17979253 NR Description: At2g37060/T2N18.18 [Arabidopsis thaliana]
  misc_feature (1)..(128): Homolog of NCBI NO: 15231796 NR Description: transcription factor NF-Y, CCAAT-binding - like
  misc_feature (1)..(140): Homolog of NCBI NO: 30409459 NR Description: NF-YB [Oryza sativa (japonica cultivar-group)]
  misc_feature (1)..(140): Homolog of NCBI NO: 34908028 NR Description: putative CAAT-box DNA binding protein [Oryza

SEQ ID NO: 100267 - protein, 107 aa, Arabidopsis thaliana; identical to SEQ ID NO: 27890
  peptide (1)..(107): Ceres Seq. ID no. 13604770
  misc_feature (1)..(107): Homolog of NCBI NO: 18404885 NR Description: CCAAT-binding transcription factor subunit [Arabidopsis thaliana] >gi|2398527|emb|CAA74051.1| Transcription [Arabidopsis thaliana] >gi|20197447|gb|AAC79602.2| putative
  misc_feature (1)..(105): Homolog of NCBI NO: 25299604 NR Description: hypothetical protein At2g38880 [imported] -
  misc_feature (1)..(77): Homolog of NCBI NO: 30687688 NR Description: CCAAT-binding transcription factor subunit
  misc_feature (1)..(99): Homolog of NCBI NO: 22380 NR Description: CAAT-box DNA binding protein subunit B (NF-YB)
  misc_feature (1)..(99): Homolog of NCBI NO: 115840 NR Description: CCAAT-BINDING TRANSCRIPTION FACTOR SUBUNIT A
  misc_feature (1)..(101): Homolog of NCBI NO: 30409461 NR Description: NF-YB [Oryza sativa (japonica cultivar-group)]
  misc_feature (1)..(102): Homolog of NCBI NO: 17979253 NR Description: At2g37060/T2N18.18 [Arabidopsis thaliana]
  misc_feature (1)..(94): Homolog of NCBI NO: 15231796 NR Description: transcription factor NF-Y, CCAAT-binding - like
  misc_feature (1)..(106): Homolog of NCBI NO: 30409459 NR Description: NF-YB [Oryza sativa (japonica cultivar-group)]
  misc_feature (1)..(106): Homolog of NCBI NO: 34908028 NR Description: putative CAAT-box DNA binding protein [Oryza

SEQ ID NO: 100268 - DNA, 863 bp, Arabidopsis thaliana
  misc_feature (1)..(863): Ceres Seq. ID no. 13604771
  misc_feature: MA Experiment ID: 20000166 Result: Up-regulated in Transcription
  misc_feature: MA Experiment 20000166 PARAMETER Experiment Name: At_100uM_ABA_P Parameter: Age (day) Value: 14
  misc_feature: MA Experiment 20000166 PARAMETER Experiment Name: At_100uM_ABA_P Parameter: Organism Value: A. thaliana
  misc_feature: MA Experiment 20000166 PARAMETER Experiment Name: At_100uM_ABA_P Parameter: Plant Line Value: WS
  misc_feature: MA Experiment 20000166 PARAMETER Experiment Name: At_100uM_ABA_P Parameter: Timepoint (hr) Value: 1
  misc_feature: MA Experiment 20000166 PARAMETER Experiment Name: At_100uM_ABA_P Parameter: Tissue Value: Aerial
  misc_feature: MA Experiment 20000166 PARAMETER Experiment Name: At_100uM_ABA_P Parameter: Treatment Value: 100uM ABA vs. No Treatment
  misc_feature: MA Experiment ID: 20000169 Result: Up-regulated in Transcription
  misc_feature: MA Experiment 20000169 PARAMETER Experiment Name: At_100uM_ABA_P Parameter: Age (day) Value: 14
  misc_feature: MA Experiment 20000169 PARAMETER Experiment Name: At_100uM_ABA_P Parameter: Organism Value: A. thaliana
  misc_feature: MA Experiment 20000169 PARAMETER Experiment Name: At_100uM_ABA_P Parameter: Plant Line Value: WS
  misc_feature: MA Experiment 20000169 PARAMETER Experiment Name: At_100uM_ABA_P Parameter: Timepoint (hr) Value: 6
  misc_feature: MA Experiment 20000169 PARAMETER Experiment Name: At_100uM_ABA_P Parameter: Tissue Value: Aerial
  misc_feature: MA Experiment 20000169 PARAMETER Experiment Name: At_100uM_ABA_P Parameter: Treatment Value: 100uM ABA vs. No Treatment
  misc_feature: MA Experiment ID: 20000184 Result: Up-regulated in Transcription
  misc_feature: MA Experiment 20000184 PARAMETER Experiment Name: At_Shoots__P Parameter: Age (day) Value: 7
  misc_feature: MA Experiment 20000184 PARAMETER Experiment Name: At_Shoots__P Parameter: Tissue Value: Shoots vs. Whole Plant
  misc_feature: MA Experiment ID: 20000267 Result: Up-regulated in Transcription
  misc_feature: MA Experiment 20000267 PARAMETER Experiment Name: At_Drought_P Parameter: Age (day) Value: 7
  misc_feature: MA Experiment 20000267 PARAMETER Experiment Name: At_Drought_P Parameter: Organism Value: A. thaliana
  misc_feature: MA Experiment 20000267 PARAMETER Experiment Name: At_Drought_P Parameter: Plant Line Value: WS
  misc_feature: MA Experiment 20000267 PARAMETER Experiment Name: At_Drought_P Parameter: Timepoint (hr) Value: 6
  misc_feature: MA Experiment 20000267 PARAMETER Experiment Name: At_Drought_P Parameter: Tissue Value: Whole Plant
  misc_feature: MA Experiment 20000267 PARAMETER Experiment Name: At_Drought_P Parameter: Treatment Value: Drought vs. No Drought
  misc_feature: MA Experiment ID: 20000288 Result: Up-regulated in Transcription
  misc_feature: MA Experiment 20000288 PARAMETER Experiment Name: At_Drought_P Parameter: Age (day) Value: 7
  misc_feature: MA Experiment 20000288 PARAMETER Experiment Name: At_Drought_P Parameter: Organism Value: A. thaliana
  misc_feature: MA Experiment 20000288 PARAMETER Experiment Name: At_Drought_P Parameter: Plant Line Value: WS
  misc_feature: MA Experiment 20000288 PARAMETER Experiment Name: At_Drought_P Parameter: Timepoint (hr) Value: 1
  misc_feature: MA Experiment 20000288 PARAMETER Experiment Name: At_Drought_P Parameter: Tissue Value: Whole Plant
  misc_feature: MA Experiment 20000288 PARAMETER Experiment Name: At_Drought_P Parameter: Treatment Value: Drought vs. No Drought
  misc_feature: MA Experiment ID: 20000436 Result: Up-regulated in Transcription
  misc_feature: MA Experiment 20000436 PARAMETER Experiment Name: At_Drought_P Parameter: Age (day) Value: 7
  misc_feature: MA Experiment 20000436 PARAMETER Experiment Name: At_Drought_P Parameter: Organism Value: A. thaliana
  misc_feature: MA Experiment 20000436 PARAMETER Experiment Name: At_Drought_P Parameter: Plant Line Value: WS
  misc_feature: MA Experiment 20000436 PARAMETER Experiment Name: At_Drought_P Parameter: Timepoint (hr) Value: 12
  misc_feature: MA Experiment 20000436 PARAMETER Experiment Name: At_Drought_P Parameter: Tissue Value: Whole Plant
  misc_feature: MA Experiment 20000436 PARAMETER Experiment Name: At_Drought_P Parameter: Treatment Value: Drought vs. No Drought
  misc_feature: MA Experiment ID: 20000437 Result: Up-regulated in Transcription
  misc_feature: MA Experiment 20000437 PARAMETER Experiment Name: At_Drought_P Parameter: Age (day) Value: 8
  misc_feature: MA Experiment 20000437 PARAMETER Experiment Name: At_Drought_P Parameter: Organism Value: A. thaliana
  misc_feature: MA Experiment 20000437 PARAMETER Experiment Name: At_Drought_P Parameter: Plant Line Value: WS
  misc_feature: MA Experiment 20000437 PARAMETER Experiment Name: At_Drought_P Parameter: Timepoint (hr) Value: 24
  misc_feature: MA Experiment 20000437 PARAMETER Experiment Name: At_Drought_P Parameter: Tissue Value: Whole Plant
  misc_feature: MA Experiment 20000437 PARAMETER Experiment Name: At_Drought_P Parameter: Treatment Value: Drought vs. No Drought
  misc_feature: MA Experiment ID: 20000453 Result: Up-regulated in Transcription
  misc_feature: MA Experiment 20000453 PARAMETER Experiment Name: At_100uM_ABA_P Parameter: Age (day) Value: 15
  misc_feature: MA Experiment 20000453 PARAMETER Experiment Name: At_100uM_ABA_P Parameter: Organism Value: A. thaliana
  misc_feature: MA Experiment 20000453 PARAMETER Experiment Name: At_100uM_ABA_P Parameter: Plant Line Value: WS
  misc_feature: MA Experiment 20000453 PARAMETER Experiment Name: At_100uM_ABA_P Parameter: Timepoint (hr) Value: 24
  misc_feature: MA Experiment 20000453 PARAMETER Experiment Name: At_100uM_ABA_P Parameter: Tissue Value: Aerial
  misc_feature: MA Experiment 20000453 PARAMETER Experiment Name: At_100uM_ABA_P Parameter: Treatment Value: 100uM ABA vs. No Treatment
  misc_feature: MA Experiment ID: 20001248 Result: Up-regulated in Transcription
  misc_feature: MA Experiment 20001248 PARAMETER Experiment Name: At_Far-red-induction_P Parameter: Age (day) Value: 7
  misc_feature: MA Experiment 20001248 PARAMETER Experiment Name: At_Far-red-induction_P Parameter: Light Value: Far-red vs. White
  misc_feature: MA Experiment 20001248 PARAMETER Experiment Name: At_Far-red-induction_P Parameter: Organism Value: A. thaliana
  misc_feature: MA Experiment 20001248 PARAMETER Experiment Name: At_Far-red-induction_P Parameter: Plant Line Value: Columbia
  misc_feature: MA Experiment 20001248 PARAMETER Experiment Name: At_Far-red-induction_P Parameter: Timepoint (hr) Value: 4
  misc_feature: MA Experiment 20001248 PARAMETER Experiment Name: At_Far-red-induction_P Parameter: Tissue Value: Whole Plant
  misc_feature: MA Experiment ID: 20001450 Result: Up-regulated in Transcription
  misc_feature: MA Experiment 20001450 PARAMETER Experiment Name: At_Far-red-induction_P Parameter: Age (day) Value: 7
  misc_feature: MA Experiment 20001450 PARAMETER Experiment Name: At_Far-red-induction_P Parameter: Light Value: Far-red vs. White
  misc_feature: MA Experiment 20001450 PARAMETER Experiment Name: At_Far-red-induction_P Parameter: Organism Value: A. thaliana
  misc_feature: MA Experiment 20001450 PARAMETER Experiment Name: At_Far-red-induction_P Parameter: Plant Line Value: Columbia
  misc_feature: MA Experiment 20001450 PARAMETER Experiment Name: At_Far-red-induction_P Parameter: Timepoint (hr) Value: 8
  misc_feature: MA Experiment 20001450 PARAMETER Experiment Name: At_Far-red-induction_P Parameter: Tissue Value: Whole Plant
  misc_feature: MA Experiment ID: 20001554 Result: Up-regulated in Transcription
  misc_feature: MA Experiment 20001554 PARAMETER Experiment Name: At_Drought_Soil_Dry_P Parameter: Age (day) Value: 21
  misc_feature: MA Experiment 20001554 PARAMETER Experiment Name: At_Drought_Soil_Dry_P Parameter: Organism Value: A. thaliana
  misc_feature: MA Experiment 20001554 PARAMETER Experiment Name: At_Drought_Soil_Dry_P Parameter: Plant Line Value: WS
  misc_feature: MA Experiment 20001554 PARAMETER Experiment Name: At_Drought_Soil_Dry_P Parameter: Post Timepoint (hr) Value: None
  misc_feature: MA Experiment 20001554 PARAMETER Experiment Name: At_Drought_Soil_Dry_P Parameter: Post-Treatment Value: None
  misc_feature: MA Experiment 20001554 PARAMETER Experiment Name: At_Drought_Soil_Dry_P Parameter: Timepoint (day) Value: 7
  misc_feature: MA Experiment 20001554 PARAMETER Experiment Name: At_Drought_Soil_Dry_P Parameter: Treatment Value: Drought vs. No Drought
  misc_feature: MA Experiment ID: 20001556 Result: Up-regulated in Transcription
  misc_feature: MA Experiment 20001556 PARAMETER Experiment Name: At_Drought_Soil_Dry_P Parameter: Age (day) Value: 26
  misc_feature: MA Experiment 20001556 PARAMETER Experiment Name: At_Drought_Soil_Dry_P Parameter: Organism Value: A. thaliana
  misc_feature: MA Experiment 20001556 PARAMETER Experiment Name: At_Drought_Soil_Dry_P Parameter: Plant Line Value: WS
  misc_feature: MA Experiment 20001556 PARAMETER Experiment Name: At_Drought_Soil_Dry_P Parameter: Post Timepoint (hr) Value: None
  misc_feature: MA Experiment 20001556 PARAMETER Experiment Name: At_Drought_Soil_Dry_P Parameter: Post-Treatment Value: None
  misc_feature: MA Experiment 20001556 PARAMETER Experiment Name: At_Drought_Soil_Dry_P Parameter: Timepoint (day) Value: 12
  misc_feature: MA Experiment 20001556 PARAMETER Experiment Name: At_Drought_Soil_Dry_P Parameter: Treatment Value: Drought vs. No Drought
  misc_feature: MA Experiment ID: 20001770 Result: Up-regulated in Transcription
  misc_feature: MA Experiment 20001770 PARAMETER Experiment Name: At_Far-red-enriched-adult_P Parameter: Age (day) Value: 28
  misc_feature: MA Experiment 20001770 PARAMETER Experiment Name: At_Far-red-enriched-adult_P Parameter: Light Value: Far-red enriched vs. White
  misc_feature: MA Experiment 20001770 PARAMETER Experiment Name: At_Far-red-enriched-adult_P Parameter: Organism Value: A. thaliana
  misc_feature: MA Experiment 20001770 PARAMETER Experiment Name: At_Far-red-enriched-adult_P Parameter: Plant Line Value: Columbia
  misc_feature: MA Experiment 20001770 PARAMETER Experiment Name: At_Far-red-enriched-adult_P Parameter: Timepoint (hr) Value: 8
  misc_feature: MA Experiment 20001770 PARAMETER Experiment Name: At_Far-red-enriched-adult_P Parameter: Tissue Value: Aerial
  misc_feature: MA Experiment ID: 20001904 Result: Up-regulated in Transcription
  misc_feature: MA Experiment 20001904 PARAMETER Experiment Name: At_Drought_Reproduction_P Parameter: Age (day) Value: 37
  misc_feature: MA Experiment 20001904 PARAMETER Experiment Name: At_Drought_Reproduction_P Parameter: Organism Value: A. thaliana
  misc_feature: MA Experiment 20001904 PARAMETER Experiment Name: At_Drought_Reproduction_P Parameter: Plant Line Value: WS
  misc_feature: MA Experiment 20001904 PARAMETER Experiment Name: At_Drought_Reproduction_P Parameter: Timepoint (day) Value: 7
  misc_feature: MA Experiment 20001904 PARAMETER Experiment Name: At_Drought_Reproduction_P Parameter: Tissue Value: Rosettes
  misc_feature: MA Experiment 20001904 PARAMETER Experiment Name: At_Drought_Reproduction_P Parameter: Treatment Value: Drought vs. No Drought
ggctgtggcgggacccaagtctttgacaatggctgaagatgaaatagtagtcgaagaagagcaatcacagccacaggagattactccagttccaccatcttcttcgtcttcgccttcgttagtggtggaagacgacgatgagatgaagctcaagcacttggaattcattcaagtcgcggcggtttacttcgccgcctgtttctcgaccctctacgagttggctaaagacaacgctggtccactcaaactcggcgtcgagaacattgaagattgcgttcgaaccgtgcttgctccattatacgaaaaattccacgacgttcctttcaagcttctccttttcgtcgatcgtaaggtggacgatgtgttcttcgatgttgagacatatgttccgtcattggtgaagcaagcttctagccaagcgctcacggtggccacggaggtgcagcgcaccggcgttgtggacactaccaagagcattgcaagaagcgtccgggacaagtacgagccagcggcagagtattacgcagcgacgctgtggcgtttactgaatcaactgccgttgttccctgaagttgcgcatttagtgatccccacggcgttttactggtcagagaagtacaacgatgcggttcgttacgttggcgacagagactactttggggcagagtatctacccatgattcctattgagaagatctctgatattttggaacaagatcagtgtcgagctgattgactatttactcttctgaagccaaagattccttcttctatagagtatatatactgtatgtactctgtttttctttcctttctgcaatttgctatcccaagagatgtaatctttcttcaatatttcattt

SEQ ID NO: 100269 - protein, 244 aa, Arabidopsis thaliana
  peptide (1)..(244): Ceres Seq. ID no. 13604772
  misc_feature (41)..(240): Pfam Name: Rubber elongation factor protein (REF) Pfam Description: Rubber elongation factor protein (REF)
  misc_feature (10)..(244): Homolog of NCBI NO: 15227131 NR Description: expressed protein [Arabidopsis thaliana]
  misc_feature (41)..(235): Homolog of NCBI NO: 14423933 NR Description: Small rubber particle protein (SRPP) (22 kDa particle protein) (22 kDa RPP) (Latex allergen Hev b 3) (27 kDa
  misc_feature (70)..(235): Homolog of NCBI NO: 15214302 NR Description: Stress-related protein (PvSRP)
  misc_feature (46)..(172): Homolog of NCBI NO: 15214303 NR Description: Stress-related protein
  misc_feature (46)..(235): Homolog of NCBI NO: 15214353 NR Description: Hypothetical protein from PAC P0001A07 similar to Arabidopsis thaliana putative stress related protein
  misc_feature (36)..(175): Homolog of NCBI NO: 15230002 NR Description: stress related protein -related [Arabidopsis >gi|14424101|sp|Q9MA63|Y350_ARATH Hypothetical protein At3g05500 stress related protein, putative [Arabidopsis thaliana]
  misc_feature (43)..(242): Homolog of NCBI NO: 15220426 NR Description: stress related protein -related [Arabidopsis
  misc_feature (131)..(237): Homolog of NCBI NO: 15214303 NR Description: Stress-related protein
  misc_feature (32)..(172): Homolog of NCBI NO: 33332330 NR Description: rubber synthesis protein [Parthenium argentatum]
  misc_feature (32)..(198): Homolog of NCBI NO: 22831130 NR Description: putative stress-related protein [Oryza sativa
AVAGPKSLTMAEDEIVVEEEQSQPQEITPVPPSSSSSPSLVVEDDDEMKLKHLEFIQVAAVYFAACFSTLYELAKDNAGPLKLGVENIEDCVRTVLAPLYEKFHDVPFKLLLFVDRKVDDVFFDVETYVPSLVKQASSQALTVATEVQRTGVVDTTKSIARSVRDKYEPAAEYYAATLWRLLNQLPLFPEVAHLVIPTAFYWSEKYNDAVRYVGDRDYFGAEYLPMIPIEKISDILEQDQCRAD

SEQ ID NO: 100270 - protein, 235 aa, Arabidopsis thaliana
  peptide (1)..(235): Ceres Seq. ID no. 13604773
  misc_feature (32)..(231): Pfam Name: Rubber elongation factor protein (REF) Pfam Description: Rubber elongation factor protein (REF)
  misc_feature (1)..(235): Homolog of NCBI NO: 15227131 NR Description: expressed protein [Arabidopsis thaliana]
  misc_feature (32)..(226): Homolog of NCBI NO: 14423933 NR Description: Small rubber particle protein (SRPP) (22 kDa particle protein) (22 kDa RPP) (Latex allergen Hev b 3) (27 kDa
  misc_feature (61)..(226): Homolog of NCBI NO: 15214302 NR Description: Stress-related protein (PvSRP)
  misc_feature (37)..(163): Homolog of NCBI NO: 15214303 NR Description: Stress-related protein
  misc_feature (37)..(226): Homolog of NCBI NO: 15214353 NR Description: Hypothetical protein from PAC P0001A07 similar to Arabidopsis thaliana putative stress related protein
  misc_feature (27)..(166): Homolog of NCBI NO: 15230002 NR Description: stress related protein -related [Arabidopsis >gi|14424101|sp|Q9MA63|Y350_ARATH Hypothetical protein At3g05500 stress related protein, putative [Arabidopsis thaliana]
  misc_feature (34)..(233): Homolog of NCBI NO: 15220426 NR Description: stress related protein -related [Arabidopsis
  misc_feature (122)..(228): Homolog of NCBI NO: 15214303 NR Description: Stress-related protein
  misc_feature (23)..(163): Homolog of NCBI NO: 33332330 NR Description: rubber synthesis protein [Parthenium argentatum]
  misc_feature (23)..(189): Homolog of NCBI NO: 22831130 NR Description: putative stress-related protein [Oryza sativa
MAEDEIVVEEEQSQPQEITPVPPSSSSSPSLVVEDDDEMKLKHLEFIQVAAVYFAACFSTLYELAKDNAGPLKLGVENIEDCVRTVLAPLYEKFHDVPFKLLLFVDRKVDDVFFDVETYVPSLVKQASSQALTVATEVQRTGVVDTTKSIARSVRDKYEPAAEYYAATLWRLLNQLPLFPEVAHLVIPTAFYWSEKYNDAVRYVGDRDYFGAEYLPMIPIEKISDILEQDQCRAD

SEQ ID NO: 100271 - protein, 197 aa, Arabidopsis thaliana
  peptide (1)..(197): Ceres Seq. ID no. 13604774
  misc_feature (1)..(193): Pfam Name: Rubber elongation factor protein (REF) Pfam Description: Rubber elongation factor protein (REF)
  misc_feature (1)..(197): Homolog of NCBI NO: 15227131 NR Description: expressed protein [Arabidopsis thaliana]
  misc_feature (1)..(188): Homolog of NCBI NO: 14423933 NR Description: Small rubber particle protein (SRPP) (22 kDa particle protein) (22 kDa RPP) (Latex allergen Hev b 3) (27 kDa
  misc_feature (23)..(188): Homolog of NCBI NO: 15214302 NR Description: Stress-related protein (PvSRP)
  misc_feature (1)..(125): Homolog of NCBI NO: 15214303 NR Description: Stress-related protein
  misc_feature (1)..(188): Homolog of NCBI NO: 15214353 NR Description: Hypothetical protein from PAC P0001A07 similar to Arabidopsis thaliana putative stress related protein
  misc_feature (1)..(128): Homolog of NCBI NO: 15230002 NR Description: stress related protein -related [Arabidopsis >gi|14424101|sp|Q9MA63|Y350_ARATH Hypothetical protein At3g05500 stress related protein, putative [Arabidopsis thaliana]
  misc_feature (1)..(195): Homolog of NCBI NO: 15220426 NR Description: stress related protein -related [Arabidopsis
  misc_feature (84)..(190): Homolog of NCBI NO: 15214303 NR Description: Stress-related protein
  misc_feature (1)..(125): Homolog of NCBI NO: 33332330 NR Description: rubber synthesis protein [Parthenium argentatum]
  misc_feature (1)..(151): Homolog of NCBI NO: 22831130 NR Description: putative stress-related protein [Oryza sativa
MKLKHLEFIQVAAVYFAACFSTLYELAKDNAGPLKLGVENIEDCVRTVLAPLYEKFHDVPFKLLLFVDRKVDDVFFDVETYVPSLVKQASSQALTVATEVQRTGVVDTTKSIARSVRDKYEPAAEYYAATLWRLLNQLPLFPEVAHLVIPTAFYWSEKYNDAVRYVGDRDYFGAEYLPMIPIEKISDILEQDQCRAD

SEQ ID NO: 100272 - DNA, 869 bp, Arabidopsis thaliana
  misc_feature (1)..(869): Ceres Seq. ID no. 13604775
  misc_feature: MA Experiment ID: 20000437 Result: Up-regulated in Transcription
  misc_feature: MA Experiment 20000437 PARAMETER Experiment Name: At_Drought_P Parameter: Age (day) Value: 8
  misc_feature: MA Experiment 20000437 PARAMETER Experiment Name: At_Drought_P Parameter: Organism Value: A. thaliana
  misc_feature: MA Experiment 20000437 PARAMETER Experiment Name: At_Drought_P Parameter: Plant Line Value: WS
  misc_feature: MA Experiment 20000437 PARAMETER Experiment Name: At_Drought_P Parameter: Timepoint (hr) Value: 24
  misc_feature: MA Experiment 20000437 PARAMETER Experiment Name: At_Drought_P Parameter: Tissue Value: Whole Plant
  misc_feature: MA Experiment 20000437 PARAMETER Experiment Name: At_Drought_P Parameter: Treatment Value: Drought vs. No Drought
  misc_feature: MA Experiment ID: 20000439 Result: Up-regulated in Transcription
  misc_feature: MA Experiment 20000439 PARAMETER Experiment Name: At_Roots__P Parameter: Age (day) Value: 14 vs. 21
  misc_feature: MA Experiment 20000439 PARAMETER Experiment Name: At_Roots__P Parameter: Organism Value: A. thaliana
  misc_feature: MA Experiment 20000439 PARAMETER Experiment Name: At_Roots__P Parameter: Tissue Value: Roots vs. Whole Plant
ctgtcaaaacgaatatttttttagatgtatacataataaacacatttatgttaaaacctctcctttttctgtgtgccatatagtttggcaaattacatatcttcgttctatatcatcattcgttgttgtgaatcatactgaaacgaacccctcaccaaacaagatttatagatcctctgctttaattataagattctgatggcggggaattatcattcgttccaaaatccaatccctcgataccagaattacaacttcgggagcagctcatctaatcatcaacatgaacatgatgggttagtggtggtggtggaggatcaacagcaagaagaaagcatgatggtaaaagaacaagacaggctacttccgatagcaaacgtaggaaggatcatgaagaacatcctcccagcaaacgcaaaggtctctaaagaagccaaagagactatgcaagaatgtgtgtccgagttcattagcttcgtcacgggagaagcatccgataaatgccacaaggagaagcgaaagaccgttaatggagacgatatctgttgggctatggctaatctagggtttgatgattacgccgcccagctcaagaagtacttacatcgttaccgagttctcgaaggtgagaaacctaatcatcacggcaaaggaggacctaaatcctcgccagataattaaaattcttccatcgctttttgattttccttgattaatctccatgtcatcatcttcctctttaggaccagctatctttttctatcttctcatatattgttctacatatataaataaattttatgtatatgatgatataacatgtatgtggtgtgaggtactgaacaaatctgtgttaattcttccagctg

SEQ ID NO: 100273 - protein, 160 aa, Arabidopsis thaliana
  peptide (1)..(160): Ceres Seq. ID no. 13604776
  misc_feature (1)..(160): Homolog of NCBI NO: 15227134 NR Description: CCAAT-box binding trancription factor -related
  misc_feature (17)..(160): Homolog of NCBI NO: 34907184 NR Description: putative CCAAT-binding transcription factor
  misc_feature (40)..(156): Homolog of NCBI NO: 2398529 NR Description: Transcription factor [Arabidopsis thaliana]
  misc_feature (40)..(156): Homolog of NCBI NO: 15238156 NR Description: expressed protein [Arabidopsis thaliana]
  misc_feature (50)..(155): Homolog of NCBI NO: 15233475 NR Description: CCAAT-binding transcription factor subunit
  misc_feature (50)..(147): Homolog of NCBI NO: 15225440 NR Description: CCAAT-box binding trancription factor -related
  misc_feature (42)..(157): Homolog of NCBI NO: 15231796 NR Description: transcription factor NF-Y, CCAAT-binding - like
  misc_feature (42)..(160): Homolog of NCBI NO: 17979253 NR Description: At2g37060/T2N18.18 [Arabidopsis thaliana]
  misc_feature (44)..(159): Homolog of NCBI NO: 18404885 NR Description: CCAAT-binding transcription factor subunit [Arabidopsis thaliana] >gi|2398527|emb|CAA74051.1| Transcription [Arabidopsis thaliana] >gi|20197447|gb|AAC79602.2| putative
  misc_feature (42)..(160): Homolog of NCBI NO: 25408527 NR Description: probable CCAAT-box binding trancription factor
MAGNYHSFQNPIPRYQNYNFGSSSSNHQHEHDGLVVVVEDQQQEESMMVKEQDRLLPIANVGRIMKNILPANAKVSKEAKETMQECVSEFISFVTGEASDKCHKEKRKTVNGDDICWAMANLGFDDYAAQLKKYLHRYRVLEGEKPNHHGKGGPKSSPDN

SEQ ID NO: 100274 - protein, 114 aa, Arabidopsis thaliana
  peptide (1)..(114): Ceres Seq. ID no. 13604777
  misc_feature (1)..(114): Homolog of NCBI NO: 15227134 NR Description: CCAAT-box binding trancription factor -related
  misc_feature (1)..(114): Homolog of NCBI NO: 34907184 NR Description: putative CCAAT-binding transcription factor
  misc_feature (1)..(110): Homolog of NCBI NO: 2398529 NR Description: Transcription factor [Arabidopsis thaliana]
  misc_feature (1)..(110): Homolog of NCBI NO: 15238156 NR Description: expressed protein [Arabidopsis thaliana]
  misc_feature (4)..(109): Homolog of NCBI NO: 15233475 NR Description: CCAAT-binding transcription factor subunit
  misc_feature (4)..(101): Homolog of NCBI NO: 15225440 NR Description: CCAAT-box binding trancription factor -related
  misc_feature (1)..(111): Homolog of NCBI NO: 15231796 NR Description: transcription factor NF-Y, CCAAT-binding - like
  misc_feature (1)..(114): Homolog of NCBI NO: 17979253 NR Description: At2g37060/T2N18.18 [Arabidopsis thaliana]
  misc_feature (1)..(113): Homolog of NCBI NO: 18404885 NR Description: CCAAT-binding transcription factor subunit [Arabidopsis thaliana] >gi|2398527|emb|CAA74051.1| Transcription [Arabidopsis thaliana] >gi|20197447|gb|AAC79602.2| putative
  misc_feature (1)..(114): Homolog of NCBI NO: 25408527 NR Description: probable CCAAT-box binding trancription factor
MMVKEQDRLLPIANVGRIMKNILPANAKVSKEAKETMQECVSEFISFVTGEASDKCHKEKRKTVNGDDICWAMANLGFDDYAAQLKKYLHRYRVLEGEKPNHHGKGGPKSSPDN

SEQ ID NO: 100275 - protein, 113 aa, Arabidopsis thaliana
  peptide (1)..(113): Ceres Seq. ID no. 13604778
  misc_feature (1)..(113): Homolog of NCBI NO: 15227134 NR Description: CCAAT-box binding trancription factor -related
  misc_feature (1)..(113): Homolog of NCBI NO: 34907184 NR Description: putative CCAAT-binding transcription factor
  misc_feature (1)..(109): Homolog of NCBI NO: 2398529 NR Description: Transcription factor [Arabidopsis thaliana]
  misc_feature (1)..(109): Homolog of NCBI NO: 15238156 NR Description: expressed protein [Arabidopsis thaliana]
  misc_feature (3)..(108): Homolog of NCBI NO: 15233475 NR Description: CCAAT-binding transcription factor subunit
  misc_feature (3)..(100): Homolog of NCBI NO: 15225440 NR Description: CCAAT-box binding trancription factor -related
  misc_feature (1)..(110): Homolog of NCBI NO: 15231796 NR Description: transcription factor NF-Y, CCAAT-binding - like
  misc_feature (1)..(113): Homolog of NCBI NO: 17979253 NR Description: At2g37060/T2N18.18 [Arabidopsis thaliana]
  misc_feature (1)..(112): Homolog of NCBI NO: 18404885 NR Description: CCAAT-binding transcription factor subunit [Arabidopsis thaliana] >gi|2398527|emb|CAA74051.1| Transcription [Arabidopsis thaliana] >gi|20197447|gb|AAC79602.2| putative
  misc_feature (1)..(113): Homolog of NCBI NO: 25408527 NR Description: probable CCAAT-box binding trancription factor
MVKEQDRLLPIANVGRIMKNILPANAKVSKEAKETMQECVSEFISFVTGEASDKCHKEKRKTVNGDDICWAMANLGFDDYAAQLKKYLHRYRVLEGEKPNHHGKGGPKSSPDN

SEQ ID NO: 100276 - DNA, 1792 bp, Arabidopsis thaliana
  misc_feature (1)..(1792): Ceres Seq. ID no. 13604779
  misc_feature: MA Experiment ID: 20000180 Result: Down-regulated in Transcription
  misc_feature: MA Experiment 20000180 PARAMETER Experiment Name: At_Germinating_Seeds_P Parameter: Age (hr) Value: 24 vs. 0
  misc_feature: MA Experiment 20000180 PARAMETER Experiment Name: At_Germinating_Seeds_P Parameter: Tissue Value: Germinating Seeds
  misc_feature: MA Experiment ID: 20000227 Result: Down-regulated in Transcription
  misc_feature: MA Experiment 20000227 PARAMETER Experiment Name: At_Root-Tips-vs-Tops_P Parameter: Tissue Value: Root Tips vs. Root Tops
atgacggatgtgtccccactttcggaccagaccactttactccccgagttagcaagtgaagtgagaaaactgtctgtgtgtcacatgttggccactcgcgcgctatccccgcccaaggaccttaccgtcattttggttggaaactatttggtgagaggagtttttactagtatcttttttactgtacaccaaatccctaaatttaaggacatgtatgctcgcaatcctcccctcaatggctcacaatctgctcaagctcccgactggacccctgcagatgccgataccggactccaaggtctcgcatgcgctttgattctcagcaactggttgggtagcgactcgtaccctgagagaccaggtgctcctgactgtgcctactacatgcgaactggtgtctgtggctacggtaatagatgtcgttacaatcaccctcgcgatcgtgcctcggttgaagcaactgttagagctaccgggcagtatcctgaacgttttggtgaacccccatgccagttttacttgaaaactggaacttgtaaatttggggcgtcatgcaaattccaccatccaaagaatgcaggtggatccatgagccacgttccactaaatatatatggataccctgtacgagagggtgataacgaatgctcctactatttgaaaacggggcaatgcaaatttggtataacctgtaaatttcatcatcctcagcctgctggtactactgtcccaccaccaccagcatctgcacctcagttttatccatcggtgcagtcacttatgcctgaccagtatggaggtccatcttctagcttgagagttgcaagaactcttcttcctggttcttatatgcaaggcgcctatggtccaatgctattaacccccggggtcgttcctattccaggctggagtccttactcgtctcttactgtctcacttttgcttttgcttcaggcacctgtgagccctgctctatctcctggtgcgcagcacgctgttggggcaacttctttatatggagttacacagctcacttccaccactccttcgcttcccggggtttatccatctctgtcctctcctacaggtgttatacagaaagaacaggcctttccagagagacctggtgaaccagagtgccaatactatttgaaaacaggagattgtaagtttggaacatcttgtaagtttcatcatcctcgagatcgggttccaccaagagcgaattgcgtcctcagccccattggtcttcctctacgcccgggtgtgcaacggtgcactttctacgtacaaaacggcttctgtaagtttggatcaacatgtaagtttgatcatccaatgggaacgatcagatacaatccttctgcgtcctctctagctgatgcaccggtggctccttacccagtgagctctctcttgggtgctctggcagctgccccttcttcttcatcgacagagctcatagcaggcggtgcaaaagatgcttacatgaccggtgtgcctacatcaagaagcacatcaaacatctcggcaggtttgattttctcccagagcggtgggtcaattccattctcagagctgcaactctcgagccagagctctcttcctctaacaggtagcagaatcacaagacaagggcgtgaaattcgtcgatccttttgaatagatcacctcagaaaagggtacgcatacgcaggtcctctggatcaccttttagcaattcttaatctatatgactattattatatagaagcatgtgatgtgaatttatatatataatcttcgtaccttg

SEQ ID NO: 100277 - protein, 553 aa, Arabidopsis thaliana
  peptide (1)..(553): Ceres Seq. ID no. 13604780
  misc_feature (120)..(146): Pfam Name: Zinc finger C-x8-C-x5-C-x3-H type (and similar) Pfam Description: Zinc finger C-x8-C-x5-C-x3-H type (and similar)
  misc_feature (1)..(553): Homolog of NCBI NO: 25409067 NR Description: hypothetical protein At2g47850 [imported] - thaliana >gi|3738297|gb|AAC63639.1| unknown protein [Arabidopsis
  misc_feature (71)..(553): Homolog of NCBI NO: 30690809 NR Description: expressed protein [Arabidopsis thaliana]
  misc_feature (81)..(523): Homolog of NCBI NO: 38603838 NR Description: At5g18550 [Arabidopsis thaliana]
  misc_feature (81)..(523): Homolog of NCBI NO: 15238861 NR Description: zinc finger -related protein [Arabidopsis
  misc_feature (112)..(513): Homolog of NCBI NO: 15230715 NR Description: expressed protein [Arabidopsis thaliana]
  misc_feature (117)..(536): Homolog of NCBI NO: 34902926 NR Description: putative zinc finger protein [Oryza sativa
  misc_feature (108)..(491): Homolog of NCBI NO: 11288368 NR Description: zinc finger protein [imported] - garden pea
  misc_feature (111)..(271): Homolog of NCBI NO: 21536865 NR Description: zinc finger protein 3 [Arabidopsis thaliana]
  misc_feature (111)..(271): Homolog of NCBI NO: 30685903 NR Description: zinc finger protein 3 (gb|AAD27875.1)
  misc_feature (353)..(508): Homolog of NCBI NO: 21536865 NR Description: zinc finger protein 3 [Arabidopsis thaliana]
MTDVSPLSDQTTLLPELASEVRKLSVCHMLATRALSPPKDLTVILVGNYLVRGVFTSIFFTVHQIPKFKDMYARNPPLNGSQSAQAPDWTPADADTGLQGLACALILSNWLGSDSYPERPGAPDCAYYMRTGVCGYGNRCRYNHPRDRASVEATVRATGQYPERFGEPPCQFYLKTGTCKFGASCKFHHPKNAGGSMSHVPLNIYGYPVREGDNECSYYLKTGQCKFGITCKFHHPQPAGTTVPPPPASAPQFYPSVQSLMPDQYGGPSSSLRVARTLLPGSYMQGAYGPMLLTPGVVPIPGWSPYSSLTVSLLLLLQAPVSPALSPGAQHAVGATSLYGVTQLTSTTPSLPGVYPSLSSPTGVIQKEQAFPERPGEPECQYYLKTGDCKFGTSCKFHHPRDRVPPRANCVLSPIGLPLRPGVQRCTFYVQNGFCKFGSTCKFDHPMGTIRYNPSASSLADAPVAPYPVSSLLGALAAAPSSSSTELIAGGAKDAYMTGVPTSRSTSNISAGLIFSQSGGSIPFSELQLSSQSSLPLTGSRITRQGREIRRSF

SEQ ID NO: 100278 - protein, 525 aa, Arabidopsis thaliana
  peptide (1)..(525): Ceres Seq. ID no. 13604781
  misc_feature (92)..(118): Pfam Name: Zinc finger C-x8-C-x5-C-x3-H type (and similar) Pfam Description: Zinc finger C-x8-C-x5-C-x3-H type (and similar)
  misc_feature (1)..(525): Homolog of NCBI NO: 25409067 NR Description: hypothetical protein At2g47850 [imported] - thaliana >gi|3738297|gb|AAC63639.1| unknown protein [Arabidopsis
  misc_feature (43)..(525): Homolog of NCBI NO: 30690809 NR Description: expressed protein [Arabidopsis thaliana]
  misc_feature (53)..(495): Homolog of NCBI NO: 38603838 NR Description: At5g18550 [Arabidopsis thaliana]
  misc_feature (53)..(495): Homolog of NCBI NO: 15238861 NR Description: zinc finger -related protein [Arabidopsis
  misc_feature (84)..(485): Homolog of NCBI NO: 15230715 NR Description: expressed protein [Arabidopsis thaliana]
  misc_feature (89)..(508): Homolog of NCBI NO: 34902926 NR Description: putative zinc finger protein [Oryza sativa
  misc_feature (80)..(463): Homolog of NCBI NO: 11288368 NR Description: zinc finger protein [imported] - garden pea
  misc_feature (83)..(243): Homolog of NCBI NO: 21536865 NR Description: zinc finger protein 3 [Arabidopsis thaliana]
  misc_feature (83)..(243): Homolog of NCBI NO: 30685903 NR Description: zinc finger protein 3 (gb|AAD27875.1)
  misc_feature (325)..(480): Homolog of NCBI NO: 21536865 NR Description: zinc finger protein 3 [Arabidopsis thaliana]
MLATRALSPPKDLTVILVGNYLVRGVFTSIFFTVHQIPKFKDMYARNPPLNGSQSAQAPDWTPADADTGLQGLACALILSNWLGSDSYPERPGAPDCAYYMRTGVCGYGNRCRYNHPRDRASVEATVRATGQYPERFGEPPCQFYLKTGTCKFGASCKFHHPKNAGGSMSHVPLNIYGYPVREGDNECSYYLKTGQCKFGITCKFHHPQPAGTTVPPPPASAPQFYPSVQSLMPDQYGGPSSSLRVARTLLPGSYMQGAYGPMLLTPGVVPIPGWSPYSSLTVSLLLLLQAPVSPALSPGAQHAVGATSLYGVTQLTSTTPSLPGVYPSLSSPTGVIQKEQAFPERPGEPECQYYLKTGDCKFGTSCKFHHPRDRVPPRANCVLSPIGLPLRPGVQRCTFYVQNGFCKFGSTCKFDHPMGTIRYNPSASSLADAPVAPYPVSSLLGALAAAPSSSSTELIAGGAKDAYMTGVPTSRSTSNISAGLIFSQSGGSIPFSELQLSSQSSLPLTGSRITRQGREIRRSF

SEQ ID NO: 100279 - protein, 483 aa, Arabidopsis thaliana
  peptide (1)..(483): Ceres Seq. ID no. 13604782
  misc_feature (50)..(76): Pfam Name: Zinc finger C-x8-C-x5-C-x3-H type (and similar) Pfam Description: Zinc finger C-x8-C-x5-C-x3-H type (and similar)
  misc_feature (1)..(483): Homolog of NCBI NO: 25409067 NR Description: hypothetical protein At2g47850 [imported] - thaliana >gi|3738297|gb|AAC63639.1| unknown protein [Arabidopsis
  misc_feature (1)..(483): Homolog of NCBI NO: 30690809 NR Description: expressed protein [Arabidopsis thaliana]
  misc_feature (11)..(453): Homolog of NCBI NO: 38603838 NR Description: At5g18550 [Arabidopsis thaliana]
  misc_feature (11)..(453): Homolog of NCBI NO: 15238861 NR Description: zinc finger -related protein [Arabidopsis
  misc_feature (42)..(443): Homolog of NCBI NO: 15230715 NR Description: expressed protein [Arabidopsis thaliana]
  misc_feature (47)..(466): Homolog of NCBI NO: 34902926 NR Description: putative zinc finger protein [Oryza sativa
  misc_feature (38)..(421): Homolog of NCBI NO: 11288368 NR Description: zinc finger protein [imported] - garden pea
  misc_feature (41)..(201): Homolog of NCBI NO: 21536865 NR Description: zinc finger protein 3 [Arabidopsis thaliana]
  misc_feature (41)..(201): Homolog of NCBI NO: 30685903 NR Description: zinc finger protein 3 (gb|AAD27875.1)
  misc_feature (283)..(438): Homolog of NCBI NO: 21536865 NR Description: zinc finger protein 3 [Arabidopsis thaliana]
MYARNPPLNGSQSAQAPDWTPADADTGLQGLACALILSNWLGSDSYPERPGAPDCAYYMRTGVCGYGNRCRYNHPRDRASVEATVRATGQYPERFGEPPCQFYLKTGTCKFGASCKFHHPKNAGGSMSHVPLNIYGYPVREGDNECSYYLKTGQCKFGITCKFHHPQPAGTTVPPPPASAPQFYPSVQSLMPDQYGGPSSSLRVARTLLPGSYMQGAYGPMLLTPGVVPIPGWSPYSSLTVSLLLLLQAPVSPALSPGAQHAVGATSLYGVTQLTSTTPSLPGVYPSLSSPTGVIQKEQAFPERPGEPECQYYLKTGDCKFGTSCKFHHPRDRVPPRANCVLSPIGLPLRPGVQRCTFYVQNGFCKFGSTCKFDHPMGTIRYNPSASSLADAPVAPYPVSSLLGALAAAPSSSSTELIAGGAKDAYMTGVPTSRSTSNISAGLIFSQSGGSIPFSELQLSSQSSLPLTGSRITRQGREIRRSF

SEQ ID NO: 100280 - DNA, 1561 bp, Arabidopsis thaliana
  misc_feature (1)..(1561): Ceres Seq. ID no. 13604808
  misc_feature: MA Experiment ID: 108595 Result: Down-regulated in Transcription
  misc_feature: MA Experiment 108595 PARAMETER Experiment Name: At_Ler-pi_Ovule_cDNA_P Parameter: Plant Line Value: null
tgtttgggctcaatttgggctctgtctgttatccacaaattaagagacgcaaacctaaaacgacgccgttccatagttttcctttgaagaagagagagacgtcacaaaggaaagcactcaatcgtcatttcctcggtatctcctcctcgaaagaagaatgcctggaattagaggtccttcggaatactcgcaggaaccacctcgtcacccttctctcaaggtcaacgccaaggaacctttcaacgccgagcctccccgctcggccttagtctcatcttatgtcactcccgtcgaccttttctacaagcgaaatcatggtcccatccccattgttgatcaccttcaaagctactccgtcacccttactggattgatccagaacccgagaaagctctttatcaaagacatcaggtccctcccaaagtacaatgttactgctactcttcagtgtgccggtaacagaaggactgccatgagcaaagttaggaatgttagaggtgttggatgggatgtttctgctattggcaacgctgtctggggtggggcgaaactggccgatgttcttgagcttgtggggataccaaagctgactgcttctaccaatttaggagccagacatgttgagttcgttagtgttgatcgctgtaaggaggaaaatgggggcccttataaggcgtcaatcactctaagtcaagccacaaatcctgaagcggatgttctactcgcttatgagatgaatggagagaccctgaacagggatcacggatttccgttaagggtggttgtccctggtgtgattggtgctcgttcggtcaaatggcttgattccatcaatgtcatcgctgaagaaagccagggattcttcatgcaaaaagattacaaaatgtttccaccctctgtcaattgggataatatcaactggtcctctaggagaccgcaaatggatttccctgttcagagtgcaatctgctctgtggaggatgtgcaaatggtgaagcctggaaaggtaagtatcaaaggatatgcggtttcaggaggtggacgcgggatagaaagagtggacatatccctggatggaggcaaaaactgggtggaagcttctagaacgcaggaaccaggaaagcagtacatctcagaacacagctccagtgacaaatgggcatgggtgttgtttgaagccaccattgatgtttcacagactacagaggtcatcgccaaagcggttgattcggcggcgaatgttcaaccggaaaatgtggagtcggtgtggaacctaagaggggttctcaacacttcgtggcaccgtgtccttctccggcttggccactctaacttgtagaccaagttaccactatgcgtctggtctctctttatcttttctttaagaactaaaacatccttgaatatgcttgtccttgtggatctgtgagagcaaaatactgtttatagttaaataaaatgggaaaacccatctgttgtcatgtggtggattataaattatttatttatatgatagaactgttattcattattatatattaatgaaatcatatggttgagc

SEQ ID NO: 100281 - protein, 393 aa, Arabidopsis thaliana; identical to SEQ ID NO: 26544
  peptide (1)..(393): Ceres Seq. ID no. 13604809
  misc_feature (3)..(237): Pfam Name: Oxidoreductase molybdopterin binding domain Pfam Description: Oxidoreductase molybdopterin binding domain
  misc_feature (1)..(393): Homolog of NCBI NO: 15232230 NR Description: sulfite oxidase, putative [Arabidopsis thaliana] putative sulfite oxidase [Arabidopsis thaliana]
  misc_feature (1)..(393): Homolog of NCBI NO: 6468008 NR Description: sulfite oxidase [Arabidopsis thaliana]
  misc_feature (1)..(387): Homolog of NCBI NO: 22759584 NR Description: Moco containing protein [Oryza sativa (japonica
  misc_feature (2)..(384): Homolog of NCBI NO: 3212610 NR Description: Chain A, Sulfite Oxidase From Chicken Liver
  misc_feature (2)..(383): Homolog of NCBI NO: 28558813 NR Description: Sulfite oxidase
  misc_feature (2)..(383): Homolog of NCBI NO: 86440 NR Description: sulfite oxidase (EC 1.8.3.1), hepatic - chicken
  misc_feature (2)..(384): Homolog of NCBI NO: 30424565 NR Description: sulfite oxidase [Mus musculus] Sulfite oxidase, mitochondrial precursor
  misc_feature (1)..(384): Homolog of NCBI NO: 586053 NR Description: Sulfite oxidase, mitochondrial precursor
  misc_feature (1)..(384): Homolog of NCBI NO: 40254758 NR Description: sulfite oxidase [Rattus norvegicus]
  misc_feature (2)..(384): Homolog of NCBI NO: 4557867 NR Description: SUOX gene product [Homo sapiens] Sulfite oxidase, mitochondrial precursor >gi|1362942|pir||S55874

SEQ ID NO: 100282 - protein, 288 aa, Arabidopsis thaliana; identical to SEQ ID NO: 26545
  peptide (1)..(288): Ceres Seq. ID no. 13604810
  misc_feature (1)..(132): Pfam Name: Oxidoreductase molybdopterin binding domain Pfam Description: Oxidoreductase molybdopterin binding domain
  misc_feature (1)..(288): Homolog of NCBI NO: 15232230 NR Description: sulfite oxidase, putative [Arabidopsis thaliana] putative sulfite oxidase [Arabidopsis thaliana]
  misc_feature (1)..(288): Homolog of NCBI NO: 6468008 NR Description: sulfite oxidase [Arabidopsis thaliana]
  misc_feature (1)..(282): Homolog of NCBI NO: 22759584 NR Description: Moco containing protein [Oryza sativa (japonica
  misc_feature (1)..(279): Homolog of NCBI NO: 3212610 NR Description: Chain A, Sulfite Oxidase From Chicken Liver
  misc_feature (1)..(278): Homolog of NCBI NO: 28558813 NR Description: Sulfite oxidase
  misc_feature (1)..(278): Homolog of NCBI NO: 86440 NR Description: sulfite oxidase (EC 1.8.3.1), hepatic - chicken
  misc_feature (1)..(279): Homolog of NCBI NO: 30424565 NR Description: sulfite oxidase [Mus musculus] Sulfite oxidase, mitochondrial precursor
  misc_feature (1)..(279): Homolog of NCBI NO: 586053 NR Description: Sulfite oxidase, mitochondrial precursor
  misc_feature (1)..(279): Homolog of NCBI NO: 40254758 NR Description: sulfite oxidase [Rattus norvegicus]
  misc_feature (1)..(279): Homolog of NCBI NO: 4557867 NR Description: SUOX gene product [Homo sapiens] Sulfite oxidase, mitochondrial precursor >gi|1362942|pir||S55874

SEQ ID NO: 100283 - protein, 201 aa, Arabidopsis thaliana; identical to SEQ ID NO: 26546
  peptide (1)..(201): Ceres Seq. ID no. 13604811
  misc_feature (66)..(197): Pfam Name: Mo-co oxidoreductase dimerisation domain Pfam Description: Mo-co oxidoreductase dimerisation domain
  misc_feature (1)..(201): Homolog of NCBI NO: 15232230 NR Description: sulfite oxidase, putative [Arabidopsis thaliana] putative sulfite oxidase [Arabidopsis thaliana]
  misc_feature (1)..(201): Homolog of NCBI NO: 6468008 NR Description: sulfite oxidase [Arabidopsis thaliana]
  misc_feature (1)..(195): Homolog of NCBI NO: 22759584 NR Description: Moco containing protein [Oryza sativa (japonica
  misc_feature (1)..(192): Homolog of NCBI NO: 3212610 NR Description: Chain A, Sulfite Oxidase From Chicken Liver
  misc_feature (1)..(191): Homolog of NCBI NO: 28558813 NR Description: Sulfite oxidase
  misc_feature (1)..(191): Homolog of NCBI NO: 86440 NR Description: sulfite oxidase (EC 1.8.3.1), hepatic - chicken
  misc_feature (1)..(192): Homolog of NCBI NO: 30424565 NR Description: sulfite oxidase [Mus musculus] Sulfite oxidase, mitochondrial precursor
  misc_feature (1)..(192): Homolog of NCBI NO: 586053 NR Description: Sulfite oxidase, mitochondrial precursor
  misc_feature (1)..(192): Homolog of NCBI NO: 40254758 NR Description: sulfite oxidase [Rattus norvegicus]
  misc_feature (1)..(192): Homolog of NCBI NO: 4557867 NR Description: SUOX gene product [Homo sapiens] Sulfite oxidase, mitochondrial precursor >gi|1362942|pir||S55874

SEQ ID NO: 100284 - DNA, 1671 bp, Arabidopsis thaliana
  misc_feature (1)..(1671): Ceres Seq. ID no. 13604820
  misc_feature: MA Experiment ID: 108576 Result: Down-regulated in Transcription
  misc_feature: MA Experiment 108576 PARAMETER Experiment Name: At_42deg_Heat_cDNA_P Parameter: Temperature (deg C) Value: 42 vs. 22
  misc_feature: MA Experiment 108576 PARAMETER Experiment Name: At_42deg_Heat_cDNA_P Parameter: Timepoint (hr) Value: 1
  misc_feature: MA Experiment 108576 PARAMETER Experiment Name: At_42deg_Heat_cDNA_P Parameter: Tissue Value: Aerial
  misc_feature: MA Experiment ID: 20000179 Result: Up-regulated in Transcription
  misc_feature: MA Experiment 20000179 PARAMETER Experiment Name: At_Germinating_Seeds_P Parameter: Age (hr) Value: 6 vs. 0
  misc_feature: MA Experiment 20000179 PARAMETER Experiment Name: At_Germinating_Seeds_P Parameter: Tissue Value: Germinating Seeds
  misc_feature: MA Experiment ID: 20000180 Result: Up-regulated in Transcription
  misc_feature: MA Experiment 20000180 PARAMETER Experiment Name: At_Germinating_Seeds_P Parameter: Age (hr) Value: 24 vs. 0
  misc_feature: MA Experiment 20000180 PARAMETER Experiment Name: At_Germinating_Seeds_P Parameter: Tissue Value: Germinating Seeds
  misc_feature: MA Experiment ID: 20000794 Result: Down-regulated in Transcription
  misc_feature: MA Experiment 20000794 PARAMETER Experiment Name: At_Petals_P Parameter: Age (day) Value: 23-25 days
  misc_feature: MA Experiment 20000794 PARAMETER Experiment Name: At_Petals_P Parameter: Plant Line Value: WS
  misc_feature: MA Experiment 20000794 PARAMETER Experiment Name: At_Petals_P Parameter: Tissue Value: Petals vs. Whole plant
  misc_feature: MA Experiment ID: 20001554 Result: Down-regulated in Transcription
  misc_feature: MA Experiment 20001554 PARAMETER Experiment Name: At_Drought_Soil_Dry_P Parameter: Age (day) Value: 21
  misc_feature: MA Experiment 20001554 PARAMETER Experiment Name: At_Drought_Soil_Dry_P Parameter: Organism Value: A. thaliana
  misc_feature: MA Experiment 20001554 PARAMETER Experiment Name: At_Drought_Soil_Dry_P Parameter: Plant Line Value: WS
  misc_feature: MA Experiment 20001554 PARAMETER Experiment Name: At_Drought_Soil_Dry_P Parameter: Post Timepoint (hr) Value: None
  misc_feature: MA Experiment 20001554 PARAMETER Experiment Name: At_Drought_Soil_Dry_P Parameter: Post-Treatment Value: None
  misc_feature: MA Experiment 20001554 PARAMETER Experiment Name: At_Drought_Soil_Dry_P Parameter: Timepoint (day) Value: 7
  misc_feature: MA Experiment 20001554 PARAMETER Experiment Name: At_Drought_Soil_Dry_P Parameter: Treatment Value: Drought vs. No Drought
  misc_feature: MA Experiment ID: 20001555 Result: Down-regulated in Transcription
  misc_feature: MA Experiment 20001555 PARAMETER Experiment Name: At_Drought_Soil_Dry_P Parameter: Age (day) Value: 24
  misc_feature: MA Experiment 20001555 PARAMETER Experiment Name: At_Drought_Soil_Dry_P Parameter: Organism Value: A. thaliana
  misc_feature: MA Experiment 20001555 PARAMETER Experiment Name: At_Drought_Soil_Dry_P Parameter: Plant Line Value: WS
  misc_feature: MA Experiment 20001555 PARAMETER Experiment Name: At_Drought_Soil_Dry_P Parameter: Post Timepoint (hr) Value: None
  misc_feature: MA Experiment 20001555 PARAMETER Experiment Name: At_Drought_Soil_Dry_P Parameter: Post-Treatment Value: None
  misc_feature: MA Experiment 20001555 PARAMETER Experiment Name: At_Drought_Soil_Dry_P Parameter: Timepoint (day) Value: 10
  misc_feature: MA Experiment 20001555 PARAMETER Experiment Name: At_Drought_Soil_Dry_P Parameter: Treatment Value: Drought vs. No Drought
  misc_feature: MA Experiment ID: 20001556 Result: Down-regulated in Transcription
  misc_feature: MA Experiment 20001556 PARAMETER Experiment Name: At_Drought_Soil_Dry_P Parameter: Age (day) Value: 26
  misc_feature: MA Experiment 20001556 PARAMETER Experiment Name: At_Drought_Soil_Dry_P Parameter: Organism Value: A. thaliana
  misc_feature: MA Experiment 20001556 PARAMETER Experiment Name: At_Drought_Soil_Dry_P Parameter: Plant Line Value: WS
  misc_feature: MA Experiment 20001556 PARAMETER Experiment Name: At_Drought_Soil_Dry_P Parameter: Post Timepoint (hr) Value: None
  misc_feature: MA Experiment 20001556 PARAMETER Experiment Name: At_Drought_Soil_Dry_P Parameter: Post-Treatment Value: None
  misc_feature: MA Experiment 20001556 PARAMETER Experiment Name: At_Drought_Soil_Dry_P Parameter: Timepoint (day) Value: 12
  misc_feature: MA Experiment 20001556 PARAMETER Experiment Name: At_Drought_Soil_Dry_P Parameter: Treatment Value: Drought vs. No Drought
  misc_feature: MA Experiment ID: 20001559 Result: Down-regulated in Transcription
  misc_feature: MA Experiment 20001559 PARAMETER Experiment Name: At_Drought_Soil_Dry_P Parameter: Age (day) Value: 28
  misc_feature: MA Experiment 20001559 PARAMETER Experiment Name: At_Drought_Soil_Dry_P Parameter: Organism Value: A. thaliana
  misc_feature: MA Experiment 20001559 PARAMETER Experiment Name: At_Drought_Soil_Dry_P Parameter: Plant Line Value: WS
  misc_feature: MA Experiment 20001559 PARAMETER Experiment Name: At_Drought_Soil_Dry_P Parameter: Post Timepoint (hr) Value: 29
  misc_feature: MA Experiment 20001559 PARAMETER Experiment Name: At_Drought_Soil_Dry_P Parameter: Post-Treatment Value: Re-Water vs. No Drought
  misc_feature: MA Experiment 20001559 PARAMETER Experiment Name: At_Drought_Soil_Dry_P Parameter: Timepoint (day) Value: 14
  misc_feature: MA Experiment 20001559 PARAMETER Experiment Name: At_Drought_Soil_Dry_P Parameter: Treatment Value: Drought vs. No Drought
  misc_feature: MA Experiment ID: 20001560 Result: Up-regulated in Transcription
  misc_feature: MA Experiment 20001560 PARAMETER Experiment Name: At_Drought_Soil_Dry_P Parameter: Age (day) Value: 28
  misc_feature: MA Experiment 20001560 PARAMETER Experiment Name: At_Drought_Soil_Dry_P Parameter: Organism Value: A. thaliana
  misc_feature: MA Experiment 20001560 PARAMETER Experiment Name: At_Drought_Soil_Dry_P Parameter: Plant Line Value: WS
  misc_feature: MA Experiment 20001560 PARAMETER Experiment Name: At_Drought_Soil_Dry_P Parameter: Post Timepoint (hr) Value: None
  misc_feature: MA Experiment 20001560 PARAMETER Experiment Name: At_Drought_Soil_Dry_P Parameter: Post-Treatment Value: None
  misc_feature: MA Experiment 20001560 PARAMETER Experiment Name: At_Drought_Soil_Dry_P Parameter: Timepoint (day) Value: 14
  misc_feature: MA Experiment 20001560 PARAMETER Experiment Name: At_Drought_Soil_Dry_P Parameter: Treatment Value: Drought vs. No Drought
  misc_feature: MA Experiment ID: 20001911 Result: Down-regulated in Transcription
  misc_feature: MA Experiment 20001911 PARAMETER Experiment Name: At_Drought_Reproduction_P Parameter: Age (day) Value: 40
  misc_feature: MA Experiment 20001911 PARAMETER Experiment Name: At_Drought_Reproduction_P Parameter: Organism Value: A. thaliana
  misc_feature: MA Experiment 20001911 PARAMETER Experiment Name: At_Drought_Reproduction_P Parameter: Plant Line Value: WS
  misc_feature: MA Experiment 20001911 PARAMETER Experiment Name: At_Drought_Reproduction_P Parameter: Timepoint (day) Value: 10
  misc_feature: MA Experiment 20001911 PARAMETER Experiment Name: At_Drought_Reproduction_P Parameter: Tissue Value: Flowers
  misc_feature: MA Experiment 20001911 PARAMETER Experiment Name: At_Drought_Reproduction_P Parameter: Treatment Value: Drought vs. No Drought
tagaaatcgaaaaaatcagatctagatctaaaagaagagcgtcttcataaacgcccttcttcttcttcgtcttcttccctgcaaatctagtttctagatcttttctttcttccgcgaaacgaaaatgagagagtgcatttcgatccacattggtcaggccggtatccaggtcggaaatgcttgctgggagctttactgtcttgaacatggcattcagcctgatggccagatgccgagtgacaagactgttggcggaggtgacgatgctttcaacaccttcttcagtgagaccggtgcagggaagcacgtcccacgtgctgtctttgttgatcttgagccaactgtgatcgatgaggtcaggactggtacttaccgtcagcttttccaccctgagcaactcatcagcggtaaagaagacgcagctaacaatttcgcccgtgggcattacaccattgggaaagagattgttgatctgtgcttggaccgtatcagaaagctcgctgataactgtactggtctccaaggattcctcgtcttcaacgctgttggtggagggactggatctggtcttggatctctcctccttgagagactttctgttgactacgggaaaaagtccaagttgggtttcacagtttacccatctccacaggtctccacctctgttgttgagccttacaacagtgtcctctccactcactcactcttggaacacactgatgtctctatcctcctcgacaatgaagctatctatgacatctgcagacgttccctaagcattgagagacccacctacaccaacctcaaccgtctcgtctctcaggttatctcatccttgactgcttctctgaggttcgatggtgccttgaatgttgatgtgactgagttccaaaccaacttggtcccatacccaagaatccacttcatgctttcctcctatgccccagtcatctccgcagagaaggccttccatgagcagctctcggttgctgagatcacaaacagtgcttttgagccagcatccatgatggcaaagtgtgaccctcgtcacggaaagtacatggcttgctgtttgatgtaccgtggtgatgtcgtccccaaggatgtgaacgcagctgttggcaccatcaagaccaagcgtactattcagtttgtggactggtgtcctactggattcaagtgtggaatcaactaccagccaccaactgttgttccaggaggtgatcttgctaaagtccagagagctgtgtgtatgatctcaaactccaccagtgttgctgaggtgttctcccgtattgatcacaagtttgatcttatgtacgcaaaacgtgctttcgttcactggtatgtgggtgagggtatggaagaaggagaattttcagaggctcgtgaggatcttgcagcattggagaaggattacgaagaggttggtgctgaaggtggtgacgatgaggatgatgaaggagaggagtactaagaaggttgtcggttttatgtgggatttctattatctcgtgtttgtgtgaataggctcgaaactcttacgagtcgtacttgtgttttcaaaaaccatatttctatctcttgcttgtggcggtagccatttgttctagttcgtttgtttctgataatattttcatctccaagaactgaatttaagctgggtttggt

SEQ ID NO: 100285 - protein, 450 aa, Arabidopsis thaliana; identical to SEQ ID NO: 24489
  peptide (1)..(450): Ceres Seq. ID no. 13604821
  misc_feature (49)..(246): Pfam Name: Tubulin/FtsZ family, GTPase domain Pfam Description: Tubulin/FtsZ family, GTPase domain
  misc_feature (1)..(450): Homolog of NCBI NO: 15220329 NR Description: tubulin alpha-2/alpha-4 chain (TUA4) [Arabidopsis
  misc_feature (1)..(450): Homolog of NCBI NO: 15233627 NR Description: tubulin alpha-6 chain (TUA6) [Arabidopsis
  misc_feature (1)..(450): Homolog of NCBI NO: 16226462 NR Description: AT4g14960/dl3520c [Arabidopsis thaliana]
  misc_feature (1)..(450): Homolog of NCBI NO: 464849 NR Description: TUBULIN ALPHA CHAIN >gi|486847|pir||S36232
  misc_feature (1)..(450): Homolog of NCBI NO: 29124983 NR Description: alpha-tubulin 1 [Populus tremuloides]
  misc_feature (1)..(450): Homolog of NCBI NO: 15029368 NR Description: alpha tubulin subunit [Rosa hybrid cultivar]
  misc_feature (1)..(449): Homolog of NCBI NO: 1174592 NR Description: TUBULIN ALPHA-1 CHAIN >gi|2119270|pir||S60233
  misc_feature (1)..(450): Homolog of NCBI NO: 464840 NR Description: Tubulin alpha-1 chain >gi|421781|pir||S32666
  misc_feature (1)..(450): Homolog of NCBI NO: 6723478 NR Description: alpha-tubulin [Betula pendula]
  misc_feature (1)..(450): Homolog of NCBI NO: 25396550 NR Description: alpha tubulin [Physcomitrella patens]

SEQ ID NO: 100286 - protein, 415 aa, Arabidopsis thaliana; identical to SEQ ID NO: 24490
  peptide (1)..(415): Ceres Seq. ID no. 13604822
  misc_feature (14)..(211): Pfam Name: Tubulin/FtsZ family, GTPase domain Pfam Description: Tubulin/FtsZ family, GTPase domain
  misc_feature (1)..(415): Homolog of NCBI NO: 15220329 NR Description: tubulin alpha-2/alpha-4 chain (TUA4) [Arabidopsis
  misc_feature (1)..(415): Homolog of NCBI NO: 15233627 NR Description: tubulin alpha-6 chain (TUA6) [Arabidopsis
  misc_feature (1)..(415): Homolog of NCBI NO: 16226462 NR Description: AT4g14960/dl3520c [Arabidopsis thaliana]
  misc_feature (1)..(415): Homolog of NCBI NO: 464849 NR Description: TUBULIN ALPHA CHAIN >gi|486847|pir||S36232
  misc_feature (1)..(415): Homolog of NCBI NO: 29124983 NR Description: alpha-tubulin 1 [Populus tremuloides]
  misc_feature (1)..(415): Homolog of NCBI NO: 15029368 NR Description: alpha tubulin subunit [Rosa hybrid cultivar]
  misc_feature (1)..(414): Homolog of NCBI NO: 1174592 NR Description: TUBULIN ALPHA-1 CHAIN >gi|2119270|pir||S60233
  misc_feature (1)..(415): Homolog of NCBI NO: 464840 NR Description: Tubulin alpha-1 chain >gi|421781|pir||S32666
  misc_feature (1)..(415): Homolog of NCBI NO: 6723478 NR Description: alpha-tubulin [Betula pendula]
  misc_feature (1)..(415): Homolog of NCBI NO: 25396550 NR Description: alpha tubulin [Physcomitrella patens]

SEQ ID NO: 100287 - DNA, 1732 bp, Arabidopsis thaliana
  misc_feature (1)..(1732): Ceres Seq. ID no. 13604823
  misc_feature: MA Experiment ID: 20000180 Result: Up-regulated in Transcription
  misc_feature: MA Experiment 20000180 PARAMETER Experiment Name: At_Germinating_Seeds_P Parameter: Age (hr) Value: 24 vs. 0
  misc_feature: MA Experiment 20000180 PARAMETER Experiment Name: At_Germinating_Seeds_P Parameter: Tissue Value: Germinating Seeds
  misc_feature: MA Experiment ID: 20000185 Result: Up-regulated in Transcription
  misc_feature: MA Experiment 20000185 PARAMETER Experiment Name: At_Roots__P Parameter: Age (day) Value: 7 vs. 21
  misc_feature: MA Experiment 20000185 PARAMETER Experiment Name: At_Roots__P Parameter: Organism Value: A. thaliana
  misc_feature: MA Experiment 20000185 PARAMETER Experiment Name: At_Roots__P Parameter: Tissue Value: Roots vs. Whole Plant
  misc_feature: MA Experiment ID: 20000439 Result: Up-regulated in Transcription
  misc_feature: MA Experiment 20000439 PARAMETER Experiment Name: At_Roots__P Parameter: Age (day) Value: 14 vs. 21
  misc_feature: MA Experiment 20000439 PARAMETER Experiment Name: At_Roots__P Parameter: Organism Value: A. thaliana
  misc_feature: MA Experiment 20000439 PARAMETER Experiment Name: At_Roots__P Parameter: Tissue Value: Roots vs. Whole Plant
  misc_feature: MA Experiment ID: 20000451 Result: Up-regulated in Transcription
  misc_feature: MA Experiment 20000451 PARAMETER Experiment Name: At_CS6879_Shoots-Roots_P Parameter: Age (day) Value: 14
  misc_feature: MA Experiment 20000451 PARAMETER Experiment Name: At_CS6879_Shoots-Roots_P Parameter: Organism Value: A. thaliana
  misc_feature: MA Experiment 20000451 PARAMETER Experiment Name: At_CS6879_Shoots-Roots_P Parameter: Plant Line Value: CS6879 vs. WS
  misc_feature: MA Experiment 20000451 PARAMETER Experiment Name: At_CS6879_Shoots-Roots_P Parameter: Tissue Value: Roots
atggcagcaatcaccgttgactttcagctctgcttcatcttcatcctcctaggaatcttctcactcttctgtctctctgctttcttcttcaagaaaccaaaagacccacaacttcaaggctgtggtctacctccgagcccaccctctctaccggtcataggtcatcttcaccttctcctctctgttccatgtcacaaatcctttcagaaactctcctccaagtatggtcccctccttcaccttcgtgcattcaatatcccaatagttatagtctcttccggctccatggccaacgaagttttgaggacccaagacctgaactttgctacccgtcaacgtgaggtttctataatggaaaaatcattactttttggatcttttggctttgtctcagctccttatggagattactggagattcatgaagaagctcttagtcacaaaccttttcgggtctcattccctcgagcagacacggctcattcgtgagaaagaactcaagactttccgtactatgttgttcgataaggcggcaaagaaggggacagttgatgttggtaaagagatgatgaagctaacgaataacagcatttgcaggatgataatggggaggaggtgttcagaggagaacagtgaagcagagaaagtcgaagacttggtgatcaaatcatttagtttggtgaagaaggtccttatagctaacacggttggtcgacttctcaagaagtttgggatctctctgtttgagaaggaaatcatggaggtctcgcagaggtacgatgaattgctggaaaaaattattaaagaacacgaagaggatccgaacaagaaagaggatagagacatgatggatgttctgttggaagtttgtgcagacgacaaggctgaggttaagattaccaggaaccaaatcaaagcgcttattgtggagcttttccttggaggcactgatacttcagcacaaacaatacagtggataatggccgaactcattaaccatcccgagattcttaaaatattaagagaagagatagaatctgttgtcggaacaacgaggtttattcaagaaacagatctctcaaacctgccgtatttgcaggctgtgatgaaagaaggacaaagactacacccacattcgccaatgttggtgaggaatgcaaccaaaggatgcaagattggagggtactacataccgcagaacacaacgatgctaataaacacctatgcgatgatgatagatccagattcatgggaaaatccagacaagtttcagcccgagaggttcatggtgtctccttcaaaagggaaagacgatgagagagaacagctagctttgaacttcattcctttcgggagcggaagaagagcatgtccaggagaaaaattgggctatctcttcactggagtagccattggaacaatggtacagtgttttgactggataatcgatggagataaggttaacgtggaagaggctggagaaatgacgctgaccatggctcatccacttaaatgcactcctgtgactcgagttaacccattagctagctttgaatctgaagatcctaagtggttgatggaggagtttgatatgtattgttgaagttgcagacatatgtctgaaactaataatggaacatgctgtctttgttttttcatatggagtttgatcactaatattgttgtttcataacagaacttgttgtctttatgtatttctgctgtttcacaac

SEQ ID NO: 100288 - protein, 533 aa, Arabidopsis thaliana
  peptide (1)..(533): Ceres Seq. ID no. 13604824
  misc_feature (1)..(533): Homolog of NCBI NO: 15223580 NR Description: cytochrome P450 family [Arabidopsis thaliana]
  misc_feature (1)..(518): Homolog of NCBI NO: 15223584 NR Description: cytochrome P450, putative [Arabidopsis thaliana]
  misc_feature (5)..(510): Homolog of NCBI NO: 15231049 NR Description: cytochrome P450 family [Arabidopsis thaliana]
  misc_feature (5)..(510): Homolog of NCBI NO: 21553521 NR Description: cytochrome P450, putative [Arabidopsis thaliana]
  misc_feature (1)..(511): Homolog of NCBI NO: 15225585 NR Description: cytochrome P450 family [Arabidopsis thaliana]
  misc_feature (2)..(514): Homolog of NCBI NO: 15231052 NR Description: cytochrome P450 family [Arabidopsis thaliana]
  misc_feature (1)..(522): Homolog of NCBI NO: 9294003 NR Description: cytochrome P450-like protein [Arabidopsis
  misc_feature (1)..(514): Homolog of NCBI NO: 9293969 NR Description: cytochrome P450-like protein [Arabidopsis
  misc_feature (1)..(510): Homolog of NCBI NO: 15231053 NR Description: cytochrome P450 family [Arabidopsis thaliana]
  misc_feature (4)..(519): Homolog of NCBI NO: 15231047 NR Description: cytochrome P450 family [Arabidopsis thaliana]
MAAITVDFQLCFIFILLGIFSLFCLSAFFFKKPKDPQLQGCGLPPSPPSLPVIGHLHLLLSVPCHKSFQKLSSKYGPLLHLRAFNIPIVIVSSGSMANEVLRTQDLNFATRQREVSIMEKSLLFGSFGFVSAPYGDYWRFMKKLLVTNLFGSHSLEQTRLIREKELKTFRTMLFDKAAKKGTVDVGKEMMKLTNNSICRMIMGRRCSEENSEAEKVEDLVIKSFSLVKKVLIANTVGRLLKKFGISLFEKEIMEVSQRYDELLEKIIKEHEEDPNKKEDRDMMDVLLEVCADDKAEVKITRNQIKALIVELFLGGTDTSAQTIQWIMAELINHPEILKILREEIESVVGTTRFIQETDLSNLPYLQAVMKEGQRLHPHSPMLVRNATKGCKIGGYYIPQNTTMLINTYAMMIDPDSWENPDKFQPERFMVSPSKGKDDEREQLALNFIPFGSGRRACPGEKLGYLFTGVAIGTMVQCFDWIIDGDKVNVEEAGEMTLTMAHPLKCTPVTRVNPLASFESEDPKWLMEEFDMYC

SEQ ID NO: 100289 - protein, 438 aa, Arabidopsis thaliana
  peptide (1)..(438): Ceres Seq. ID no. 13604825
  misc_feature (1)..(438): Homolog of NCBI NO: 15223580 NR Description: cytochrome P450 family [Arabidopsis thaliana]
  misc_feature (1)..(423): Homolog of NCBI NO: 15223584 NR Description: cytochrome P450, putative [Arabidopsis thaliana]
  misc_feature (1)..(415): Homolog of NCBI NO: 15231049 NR Description: cytochrome P450 family [Arabidopsis thaliana]
  misc_feature (1)..(415): Homolog of NCBI NO: 21553521 NR Description: cytochrome P450, putative [Arabidopsis thaliana]
  misc_feature (1)..(416): Homolog of NCBI NO: 15225585 NR Description: cytochrome P450 family [Arabidopsis thaliana]
  misc_feature (1)..(419): Homolog of NCBI NO: 15231052 NR Description: cytochrome P450 family [Arabidopsis thaliana]
  misc_feature (1)..(427): Homolog of NCBI NO: 9294003 NR Description: cytochrome P450-like protein [Arabidopsis
  misc_feature (1)..(419): Homolog of NCBI NO: 9293969 NR Description: cytochrome P450-like protein [Arabidopsis
  misc_feature (1)..(415): Homolog of NCBI NO: 15231053 NR Description: cytochrome P450 family [Arabidopsis thaliana]
  misc_feature (1)..(424): Homolog of NCBI NO: 15231047 NR Description: cytochrome P450 family [Arabidopsis thaliana]
MANEVLRTQDLNFATRQREVSIMEKSLLFGSFGFVSAPYGDYWRFMKKLLVTNLFGSHSLEQTRLIREKELKTFRTMLFDKAAKKGTVDVGKEMMKLTNNSICRMIMGRRCSEENSEAEKVEDLVIKSFSLVKKVLIANTVGRLLKKFGISLFEKEIMEVSQRYDELLEKIIKEHEEDPNKKEDRDMMDVLLEVCADDKAEVKITRNQIKALIVELFLGGTDTSAQTIQWIMAELINHPEILKILREEIESVVGTTRFIQETDLSNLPYLQAVMKEGQRLHPHSPMLVRNATKGCKIGGYYIPQNTTMLINTYAMMIDPDSWENPDKFQPERFMVSPSKGKDDEREQLALNFIPFGSGRRACPGEKLGYLFTGVAIGTMVQCFDWIIDGDKVNVEEAGEMTLTMAHPLKCTPVTRVNPLASFESEDPKWLMEEFDMYC

SEQ ID NO: 100290 - protein, 416 aa, Arabidopsis thaliana
  peptide (1)..(416): Ceres Seq. ID no. 13604826
  misc_feature (1)..(416): Homolog of NCBI NO: 15223580 NR Description: cytochrome P450 family [Arabidopsis thaliana]
  misc_feature (1)..(401): Homolog of NCBI NO: 15223584 NR Description: cytochrome P450, putative [Arabidopsis thaliana]
  misc_feature (1)..(393): Homolog of NCBI NO: 15231049 NR Description: cytochrome P450 family [Arabidopsis thaliana]
  misc_feature (1)..(393): Homolog of NCBI NO: 21553521 NR Description: cytochrome P450, putative [Arabidopsis thaliana]
  misc_feature (1)..(394): Homolog of NCBI NO: 15225585 NR Description: cytochrome P450 family [Arabidopsis thaliana]
  misc_feature (1)..(397): Homolog of NCBI NO: 15231052 NR Description: cytochrome P450 family [Arabidopsis thaliana]
  misc_feature (1)..(405): Homolog of NCBI NO: 9294003 NR Description: cytochrome P450-like protein [Arabidopsis
  misc_feature (1)..(397): Homolog of NCBI NO: 9293969 NR Description: cytochrome P450-like protein [Arabidopsis
  misc_feature (1)..(393): Homolog of NCBI NO: 15231053 NR Description: cytochrome P450 family [Arabidopsis thaliana]
  misc_feature (1)..(402): Homolog of NCBI NO: 15231047 NR Description: cytochrome P450 family [Arabidopsis thaliana]
MEKSLLFGSFGFVSAPYGDYWRFMKKLLVTNLFGSHSLEQTRLIREKELKTFRTMLFDKAAKKGTVDVGKEMMKLTNNSICRMIMGRRCSEENSEAEKVEDLVIKSFSLVKKVLIANTVGRLLKKFGISLFEKEIMEVSQRYDELLEKIIKEHEEDPNKKEDRDMMDVLLEVCADDKAEVKITRNQIKALIVELFLGGTDTSAQTIQWIMAELINHPEILKILREEIESVVGTTRFIQETDLSNLPYLQAVMKEGQRLHPHSPMLVRNATKGCKIGGYYIPQNTTMLINTYAMMIDPDSWENPDKFQPERFMVSPSKGKDDEREQLALNFIPFGSGRRACPGEKLGYLFTGVAIGTMVQCFDWIIDGDKVNVEEAGEMTLTMAHPLKCTPVTRVNPLASFESEDPKWLMEEFDMYC

SEQ ID NO: 100291 - DNA, 2018 bp, Arabidopsis thaliana
  misc_feature (1)..(2018): Ceres Seq. ID no. 13604831
  misc_feature: MA Experiment ID: 20001450 Result: Down-regulated in Transcription
  misc_feature: MA Experiment 20001450 PARAMETER Experiment Name: At_Far-red-induction_P Parameter: Age (day) Value: 7
  misc_feature: MA Experiment 20001450 PARAMETER Experiment Name: At_Far-red-induction_P Parameter: Light Value: Far-red vs. White
  misc_feature: MA Experiment 20001450 PARAMETER Experiment Name: At_Far-red-induction_P Parameter: Organism Value: A. thaliana
  misc_feature: MA Experiment 20001450 PARAMETER Experiment Name: At_Far-red-induction_P Parameter: Plant Line Value: Columbia
  misc_feature: MA Experiment 20001450 PARAMETER Experiment Name: At_Far-red-induction_P Parameter: Timepoint (hr) Value: 8
  misc_feature: MA Experiment 20001450 PARAMETER Experiment Name: At_Far-red-induction_P Parameter: Tissue Value: Whole Plant
  misc_feature: MA Experiment ID: 20001451 Result: Down-regulated in Transcription
  misc_feature: MA Experiment 20001451 PARAMETER Experiment Name: At_Far-red-induction_P Parameter: Age (day) Value: 7
  misc_feature: MA Experiment 20001451 PARAMETER Experiment Name: At_Far-red-induction_P Parameter: Light Value: Far-red vs. White
  misc_feature: MA Experiment 20001451 PARAMETER Experiment Name: At_Far-red-induction_P Parameter: Organism Value: A. thaliana
  misc_feature: MA Experiment 20001451 PARAMETER Experiment Name: At_Far-red-induction_P Parameter: Plant Line Value: Columbia
  misc_feature: MA Experiment 20001451 PARAMETER Experiment Name: At_Far-red-induction_P Parameter: Timepoint (hr) Value: 24
  misc_feature: MA Experiment 20001451 PARAMETER Experiment Name: At_Far-red-induction_P Parameter: Tissue Value: Whole Plant
aaaaagaagtcttcttccatagttactagttagagctgcgaaacgaaaatcgtaacgatagtgcatcaatggcttatgcgtcacgcatcattaatcattccaagaagttgaaggatgtttccactttactacgccgtgagaatgctgcaacgatccgctactactcgaatactaatcgagctcctctgaacagagaagatactttcaattcccgtcttggttatcccccactggagaggatttccatatgtagcaccagcactttaccggtgtccattattttttcaactacgagatcaaatctaagcagtgcaatgggaaggccaatatttggaaaagaattttcatgtttgatgcaatcagctagaggattttcatcgggttcagatctgcctcctcatcaagagatcgggatgccttctctctcgccaacaatgactgagggtaacatcgccaggtggctgaaaaaagaaggtgataaagttgctcctggggaagtactctgtgaagttgaaactgacaaagcaactgtcgaaatggaatgcatggaagagggctatctcgccaagattgtaaaggcggaaggttcaaaagaaattcaagtcggcgaggtaattgctattacagttgaagatgaagaggacattggaaagttcaaagattacaccccatcatctactgctgatgccgctcctacaaaagcagaaccaactcctgccccaccaaaggaagagaaggtcaaacagccatcatcgcctcctgaaccgaaggcctccaagcctagcacacctcccacaggagatcgtgtttttgctagtcctcttgcaagaaagttggctgaagataataacgtgcctctctcagacatcgaaggcacaggtcctgaaggacggatagtgaaggcagatatcgatgagtatttagcttcaagtggtaaaggagctactgcgaagccatctaagtcaactgattctaaggccccagctttggactatgttgacatccctcattctcagatacgaaaggtcacagcctcacgtttggcattctcaaagcaaactatccctcactattacttaaccgtcgatacatgtgttgacaaacttatggctctgaggagtcagcttaattcattcaaagaggcttctggtgggaaacggatatctgtcaatgatcttgttgttaaggctgctgcattagctctcagaaaagttcctcagtgcaatagttcatggactgacgattacatccgccagtttaaaaatgtgaacatcaacgtcgcggtgcagacagaaaacgggctgtatgtccctgttgtgaaggacgcagacaggaagggtctgtccacaattggagaagaagttcggttattagctcaaaaagcaaaagagaacagcttaaagccagaagattatgagggaggaacatttactgtctctaacttgggaggaccttttggcatcaagcaattctgtgcagtcgttaatccacctcaagccgccattctagcagttggatccgctgaaaagagagttgtccctggtaacggtccagatcaattcaactttgcttcttacatgcctgttacactgagctgtgaccatcgcgtagtagacggtgccattggagctgaatggttgaaagcatttaagggatacatcgagaaccctaaatctatgttactctaaaagagaaccaaccacgcaatggaaaaaaacacatcaaaagctgtcgtaagagtctctgtaccaattagattttctttgttttcctctgtttctttcgggtttttctaaaaaagacttttgttgttttctgaataaatatggtgtgagggattcagcatttccactgtaaactggattttaggatattctttgctggttctggttgttcaatgttcattgaggagggctgtgaaataaaactcccattattttgtcatgtgaagtactaccctatatgggatgggttttgtaaccatgcttgatagttgatacaagtggatggatttgagt

SEQ ID NO: 100292 - protein, 539 aa, Arabidopsis thaliana
  peptide (1)..(539): Ceres Seq. ID no. 13604832
  misc_feature (306)..(539): Pfam Name: 2-oxoacid dehydrogenases acyltransferase Pfam Description: 2-oxoacid dehydrogenases acyltransferase
  misc_feature (1)..(539): Homolog of NCBI NO: 18404837 NR Description: dihydrolipoamide S-acetyltransferase -related
  misc_feature (1)..(539): Homolog of NCBI NO: 22531144 NR Description: dihydrolipoamide S-acetyltransferase, putative
  misc_feature (1)..(539): Homolog of NCBI NO: 14161722 NR Description: mono-lipoyl E2 [Arabidopsis thaliana]
  misc_feature (105)..(539): Homolog of NCBI NO: 25286447 NR Description: hypothetical protein F20D21.4 [imported] - thaliana >gi|4585966|gb|AAD25602.1|AC005287_4 Putative
  misc_feature (1)..(45): Homolog of NCBI NO: 25286447 NR Description: hypothetical protein F20D21.4 [imported] - thaliana >gi|4585966|gb|AAD25602.1|AC005287_4 Putative
  misc_feature (4)..(539): Homolog of NCBI NO: 18400212 NR Description: acetyltransferase -related [Arabidopsis thaliana] AT3g13930/MDC16_5 [Arabidopsis thaliana] AT3g13930/MDC16_5 [Arabidopsis thaliana] acetyltransferase
  misc_feature (4)..(539): Homolog of NCBI NO: 20260138 NR Description: dihydrolipoamide acetyltransferase [Arabidopsis
  misc_feature (4)..(539): Homolog of NCBI NO: 11994364 NR Description: dihydrolipoamide acetyltransferase [Arabidopsis
  misc_feature (4)..(539): Homolog of NCBI NO: 5669871 NR Description: dihydrolipoamide S-acetyltransferase [Zea mays]
  misc_feature (4)..(539): Homolog of NCBI NO: 33354212 NR Description: unknown protein [Oryza sativa (japonica
MAYASRIINHSKKLKDVSTLLRRENAATIRYYSNTNRAPLNREDTFNSRLGYPPLERISICSTSTLPVSIIFSTTRSNLSSAMGRPIFGKEFSCLMQSARGFSSGSDLPPHQEIGMPSLSPTMTEGNIARWLKKEGDKVAPGEVLCEVETDKATVEMECMEEGYLAKIVKAEGSKEIQVGEVIAITVEDEEDIGKFKDYTPSSTADAAPTKAEPTPAPPKEEKVKQPSSPPEPKASKPSTPPTGDRVFASPLARKLAEDNNVPLSDIEGTGPEGRIVKADIDEYLASSGKGATAKPSKSTDSKAPALDYVDIPHSQIRKVTASRLAFSKQTIPHYYLTVDTCVDKLMALRSQLNSFKEASGGKRISVNDLVVKAAALALRKVPQCNSSWTDDYIRQFKNVNINVAVQTENGLYVPVVKDADRKGLSTIGEEVRLLAQKAKENSLKPEDYEGGTFTVSNLGGPFGIKQFCAVVNPPQAAILAVGSAEKRVVPGNGPDQFNFASYMPVTLSCDHRVVDGAIGAEWLKAFKGYIENPKSMLL

SEQ ID NO: 100293 - protein, 457 aa, Arabidopsis thaliana
  peptide (1)..(457): Ceres Seq. ID no. 13604833
  misc_feature (224)..(457): Pfam Name: 2-oxoacid dehydrogenases acyltransferase Pfam Description: 2-oxoacid dehydrogenases acyltransferase
  misc_feature (1)..(457): Homolog of NCBI NO: 18404837 NR Description: dihydrolipoamide S-acetyltransferase -related
  misc_feature (1)..(457): Homolog of NCBI NO: 22531144 NR Description: dihydrolipoamide S-acetyltransferase, putative
  misc_feature (1)..(457): Homolog of NCBI NO: 14161722 NR Description: mono-lipoyl E2 [Arabidopsis thaliana]
  misc_feature (23)..(457): Homolog of NCBI NO: 25286447 NR Description: hypothetical protein F20D21.4 [imported] - thaliana >gi|4585966|gb|AAD25602.1|AC005287_4 Putative
  misc_feature (1)..(457): Homolog of NCBI NO: 18400212 NR Description: acetyltransferase -related [Arabidopsis thaliana] AT3g13930/MDC16_5 [Arabidopsis thaliana] AT3g13930/MDC16_5 [Arabidopsis thaliana] acetyltransferase
  misc_feature (1)..(457): Homolog of NCBI NO: 20260138 NR Description: dihydrolipoamide acetyltransferase [Arabidopsis
  misc_feature (1)..(457): Homolog of NCBI NO: 11994364 NR Description: dihydrolipoamide acetyltransferase [Arabidopsis
  misc_feature (1)..(457): Homolog of NCBI NO: 5669871 NR Description: dihydrolipoamide S-acetyltransferase [Zea mays]
  misc_feature (1)..(457): Homolog of NCBI NO: 33354212 NR Description: unknown protein [Oryza sativa (japonica
  misc_feature (1)..(457): Homolog of NCBI NO: 34902684 NR Description: contains ESTs
MGRPIFGKEFSCLMQSARGFSSGSDLPPHQEIGMPSLSPTMTEGNIARWLKKEGDKVAPGEVLCEVETDKATVEMECMEEGYLAKIVKAEGSKEIQVGEVIAITVEDEEDIGKFKDYTPSSTADAAPTKAEPTPAPPKEEKVKQPSSPPEPKASKPSTPPTGDRVFASPLARKLAEDNNVPLSDIEGTGPEGRIVKADIDEYLASSGKGATAKPSKSTDSKAPALDYVDIPHSQIRKVTASRLAFSKQTIPHYYLTVDTCVDKLMALRSQLNSFKEASGGKRISVNDLVVKAAALALRKVPQCNSSWTDDYIRQFKNVNINVAVQTENGLYVPVVKDADRKGLSTIGEEVRLLAQKAKENSLKPEDYEGGTFTVSNLGGPFGIKQFCAVVNPPQAAILAVGSAEKRVVPGNGPDQFNFASYMPVTLSCDHRVVDGAIGAEWLKAFKGYIENPKSMLL

SEQ ID NO: 100294 - protein, 444 aa, Arabidopsis thaliana
  peptide (1)..(444): Ceres Seq. ID no. 13604834
  misc_feature (211)..(444): Pfam Name: 2-oxoacid dehydrogenases acyltransferase Pfam Description: 2-oxoacid dehydrogenases acyltransferase
  misc_feature (1)..(444): Homolog of NCBI NO: 18404837 NR Description: dihydrolipoamide S-acetyltransferase -related
  misc_feature (1)..(444): Homolog of NCBI NO: 22531144 NR Description: dihydrolipoamide S-acetyltransferase, putative
  misc_feature (1)..(444): Homolog of NCBI NO: 14161722 NR Description: mono-lipoyl E2 [Arabidopsis thaliana]
  misc_feature (10)..(444): Homolog of NCBI NO: 25286447 NR Description: hypothetical protein F20D21.4 [imported] - thaliana >gi|4585966|gb|AAD25602.1|AC005287_4 Putative
  misc_feature (1)..(444): Homolog of NCBI NO: 18400212 NR Description: acetyltransferase -related [Arabidopsis thaliana] AT3g13930/MDC16_5 [Arabidopsis thaliana] AT3g13930/MDC16_5 [Arabidopsis thaliana] acetyltransferase
  misc_feature (1)..(444): Homolog of NCBI NO: 20260138 NR Description: dihydrolipoamide acetyltransferase [Arabidopsis
  misc_feature (1)..(444): Homolog of NCBI NO: 11994364 NR Description: dihydrolipoamide acetyltransferase [Arabidopsis
  misc_feature (1)..(444): Homolog of NCBI NO: 5669871 NR Description: dihydrolipoamide S-acetyltransferase [Zea mays]
  misc_feature (1)..(444): Homolog of NCBI NO: 33354212 NR Description: unknown protein [Oryza sativa (japonica
  misc_feature (1)..(444): Homolog of NCBI NO: 34902684 NR Description: contains ESTs
MQSARGFSSGSDLPPHQEIGMPSLSPTMTEGNIARWLKKEGDKVAPGEVLCEVETDKATVEMECMEEGYLAKIVKAEGSKEIQVGEVIAITVEDEEDIGKFKDYTPSSTADAAPTKAEPTPAPPKEEKVKQPSSPPEPKASKPSTPPTGDRVFASPLARKLAEDNNVPLSDIEGTGPEGRIVKADIDEYLASSGKGATAKPSKSTDSKAPALDYVDIPHSQIRKVTASRLAFSKQTIPHYYLTVDTCVDKLMALRSQLNSFKEASGGKRISVNDLVVKAAALALRKVPQCNSSWTDDYIRQFKNVNINVAVQTENGLYVPVVKDADRKGLSTIGEEVRLLAQKAKENSLKPEDYEGGTFTVSNLGGPFGIKQFCAVVNPPQAAILAVGSAEKRVVPGNGPDQFNFASYMPVTLSCDHRVVDGAIGAEWLKAFKGYIENPKSMLL

SEQ ID NO: 100295 - DNA, 2117 bp, Arabidopsis thaliana
  misc_feature (1)..(2117): Ceres Seq. ID no. 13604839
  misc_feature: MA Experiment ID: 20000184 Result: Down-regulated in Transcription
  misc_feature: MA Experiment 20000184 PARAMETER Experiment Name: At_Shoots__P Parameter: Age (day) Value: 7
  misc_feature: MA Experiment 20000184 PARAMETER Experiment Name: At_Shoots__P Parameter: Tissue Value: Shoots vs. Whole Plant
  misc_feature: MA Experiment ID: 20000235 Result: Down-regulated in Transcription
  misc_feature: MA Experiment 20000235 PARAMETER Experiment Name: At_Siliques_P Parameter: Age (day) Value: 21
  misc_feature: MA Experiment 20000235 PARAMETER Experiment Name: At_Siliques_P Parameter: Organism Value: A. thaliana
  misc_feature: MA Experiment 20000235 PARAMETER Experiment Name: At_Siliques_P Parameter: Plant Line Value: WS
  misc_feature: MA Experiment 20000235 PARAMETER Experiment Name: At_Siliques_P Parameter: Tissue Value: 5-10mm Siliques vs. Whole Plant
  misc_feature: MA Experiment ID: 20001451 Result: Down-regulated in Transcription
  misc_feature: MA Experiment 20001451 PARAMETER Experiment Name: At_Far-red-induction_P Parameter: Age (day) Value: 7
  misc_feature: MA Experiment 20001451 PARAMETER Experiment Name: At_Far-red-induction_P Parameter: Light Value: Far-red vs. White
  misc_feature: MA Experiment 20001451 PARAMETER Experiment Name: At_Far-red-induction_P Parameter: Organism Value: A. thaliana
  misc_feature: MA Experiment 20001451 PARAMETER Experiment Name: At_Far-red-induction_P Parameter: Plant Line Value: Columbia
  misc_feature: MA Experiment 20001451 PARAMETER Experiment Name: At_Far-red-induction_P Parameter: Timepoint (hr) Value: 24
  misc_feature: MA Experiment 20001451 PARAMETER Experiment Name: At_Far-red-induction_P Parameter: Tissue Value: Whole Plant
agcttagcaaaattcttctgaatgaataatcggcgattatgtctttgaaaaacgatgcgagtagtagccacgacggtggaagcaacagagaaagcgtaatcgatgatcatggccgccgtaaaagcacttgcggctactgtaaatccccagctcggtccagtatctctcacggtttatcagcacagactcttaccgtttatgactaccaagctcttattgaccgaggctggagaagatctggtacttatctttacaaacatgagatggataaaacgtgttgccctccttatacgatacgtttgaaagcaagtgattttgttcctactaaagagcagcagcgagtttctagaagactagaaaggttcttggatggcaaactagatgtgcagcccagggaacaaagaggtgcttcttcctctggtgatgtttcagatacaaggagaaaaacacttggagctgctaaaagtgaagagaataagaaagttgaagcagttatggatgatttgtctaaaaatattgaccaagctgtgcaattatgcatacggagtggggaattcccgtctaatatgcagataccaaaagcttcagtgaagaaggttttctgtgctagaagaaagaaactagctgaaggaacagaacaaatcttatacaccagcaacattgcttttccaatagcagctgcaataaaacgcatccagacatctgagaaagaggggataaatagtgcagaaggaaatagattatcacctgaaactatttctgagatgttgttgagtgcaatgcataaggtgggggaaactcctgatgtgtctatcaaagtctgtaagggccatatcaatttcctttcatctgccaaagattctttttctgatagagatgttgtacctaatggtaacatctcgagaggagccaattctttagatggaagtgaaacccttcacgctaagaaggattcagaaaaccatcaggcaagaaagcgaaagctggagatacatttgaaaaggtctagttttgatcctgaagaacatgagttatacaaacggtatcagctgaaagtgcacaatgataagccagggcacgttgtagaaagttcatacagaaggtttttggtcgactctcctttaatagatgttcaaccttcaggtgatgaaaaggttccgccttgtggcttcggctctttccaccaacaatatagaattgatggccgcctaattgccgtcggggttgtagacattcttcctaaatgtttgtcaagtgtatacttattctgggatccagactatgcattcttatcgctcggaaaatattctgccattcaagaaattaattgggttatagagaaccaagctcgctgcccttctcttcagtattactatcttggttattatatacattcctgcagcaagatgagatataaagcagcctatcgtccatctgagcttctatgtcctctccgtttccagtgggttccatttgaagtagcaaggccgatgcttgataaaaagccatatgtcatattgtccgatattgctatttcacataatcaatgttctttactagctggtgcttctgaaactctcgtggaaccagcagcaagtgaacatgaagacatggaacaaggggagacgaatgataactttatgggctgcagtgatgaggatgaagatgaggatgaggatgatgatgatgatgatgatgatgatgaggaaatgtatgagactgaatcagaggactctcatattgagtcagaccctggatccaaagataacgacattaacaacatccttatcggtctttatggatcccaatatagatacaaggaaatgcggcagatcataactcccgtaggcaggaagcaactggaaccgatgttacaaagctaccgcaaggttgtgggcgctgagctttcagagagaatggtgtatgaaatcaactgaagcttcaacaataccaagctccattgagctttggtaccattagtcattagataaaactcaaaattgtttgtattcatgtttcagttgttgtatatctatgactatgagacttgtacatggtgtctttctttaagtttgtattttctgattacctttatattgaaaaaatttctgtccaag

SEQ ID NO: 100296 - protein, 632 aa, Arabidopsis thaliana
  peptide (1)..(632): Ceres Seq. ID no. 13604840
  misc_feature (322)..(478): Pfam Name: Arginine-tRNA-protein transferase, C terminus Pfam Description: Arginine-tRNA-protein transferase, C terminus
  misc_feature (4)..(568): Homolog of NCBI NO: 15229703 NR Description: arginine-tRNA-protein transferase -related
  misc_feature (542)..(631): Homolog of NCBI NO: 15229703 NR Description: arginine-tRNA-protein transferase -related
  misc_feature (322)..(491): Homolog of NCBI NO: 31542151 NR Description: arginine-tRNA-protein transferase 1 [Mus musculus]
  misc_feature (25)..(110): Homolog of NCBI NO: 31542151 NR Description: arginine-tRNA-protein transferase 1 [Mus musculus]
  misc_feature (315)..(491): Homolog of NCBI NO: 22002033 NR Description: Arginine-tRNA-protein transferase 1
  misc_feature (13)..(165): Homolog of NCBI NO: 22002033 NR Description: Arginine-tRNA-protein transferase 1
  misc_feature (315)..(491): Homolog of NCBI NO: 3806094 NR Description: arginine-tRNA-protein transferase 1-1p; ATE1-1p
  misc_feature (31)..(165): Homolog of NCBI NO: 3806094 NR Description: arginine-tRNA-protein transferase 1-1p; ATE1-1p
  misc_feature (322)..(491): Homolog of NCBI NO: 13123998 NR Description: Arginine-tRNA-protein transferase 1
  misc_feature (25)..(110): Homolog of NCBI NO: 13123998 NR Description: Arginine-tRNA-protein transferase 1
MSLKNDASSSHDGGSNRESVIDDHGRRKSTCGYCKSPARSSISHGLSAQTLTVYDYQALIDRGWRRSGTYLYKHEMDKTCCPPYTIRLKASDFVPTKEQQRVSRRLERFLDGKLDVQPREQRGASSSGDVSDTRRKTLGAAKSEENKKVEAVMDDLSKNIDQAVQLCIRSGEFPSNMQIPKASVKKVFCARRKKLAEGTEQILYTSNIAFPIAAAIKRIQTSEKEGINSAEGNRLSPETISEMLLSAMHKVGETPDVSIKVCKGHINFLSSAKDSFSDRDVVPNGNISRGANSLDGSETLHAKKDSENHQARKRKLEIHLKRSSFDPEEHELYKRYQLKVHNDKPGHVVESSYRRFLVDSPLIDVQPSGDEKVPPCGFGSFHQQYRIDGRLIAVGVVDILPKCLSSVYLFWDPDYAFLSLGKYSAIQEINWVIENQARCPSLQYYYLGYYIHSCSKMRYKAAYRPSELLCPLRFQWVPFEVARPMLDKKPYVILSDIAISHNQCSLLAGASETLVEPAASEHEDMEQGETNDNFMGCSDEDEDEDEDDDDDDDDDEEMYETESEDSHIESDPGSKDNDINNILIGLYGSQYRYKEMRQIITPVGRKQLEPMLQSYRKVVGAELSERMVYEIN

SEQ ID NO: 100297 - protein, 557 aa, Arabidopsis thaliana
  peptide (1)..(557): Ceres Seq. ID no. 13604841
  misc_feature (247)..(403): Pfam Name: Arginine-tRNA-protein transferase, C terminus Pfam Description: Arginine-tRNA-protein transferase, C terminus
  misc_feature (1)..(493): Homolog of NCBI NO: 15229703 NR Description: arginine-tRNA-protein transferase -related
  misc_feature (467)..(556): Homolog of NCBI NO: 15229703 NR Description: arginine-tRNA-protein transferase -related
  misc_feature (247)..(416): Homolog of NCBI NO: 31542151 NR Description: arginine-tRNA-protein transferase 1 [Mus musculus]
  misc_feature (1)..(35): Homolog of NCBI NO: 31542151 NR Description: arginine-tRNA-protein transferase 1 [Mus musculus]
  misc_feature (240)..(416): Homolog of NCBI NO: 22002033 NR Description: Arginine-tRNA-protein transferase 1
  misc_feature (1)..(90): Homolog of NCBI NO: 22002033 NR Description: Arginine-tRNA-protein transferase 1
  misc_feature (240)..(416): Homolog of NCBI NO: 3806094 NR Description: arginine-tRNA-protein transferase 1-1p; ATE1-1p
  misc_feature (1)..(90): Homolog of NCBI NO: 3806094 NR Description: arginine-tRNA-protein transferase 1-1p; ATE1-1p
  misc_feature (247)..(416): Homolog of NCBI NO: 13123998 NR Description: Arginine-tRNA-protein transferase 1
  misc_feature (1)..(35): Homolog of NCBI NO: 13123998 NR Description: Arginine-tRNA-protein transferase 1
MDKTCCPPYTIRLKASDFVPTKEQQRVSRRLERFLDGKLDVQPREQRGASSSGDVSDTRRKTLGAAKSEENKKVEAVMDDLSKNIDQAVQLCIRSGEFPSNMQIPKASVKKVFCARRKKLAEGTEQILYTSNIAFPIAAAIKRIQTSEKEGINSAEGNRLSPETISEMLLSAMHKVGETPDVSIKVCKGHINFLSSAKDSFSDRDVVPNGNISRGANSLDGSETLHAKKDSENHQARKRKLEIHLKRSSFDPEEHELYKRYQLKVHNDKPGHVVESSYRRFLVDSPLIDVQPSGDEKVPPCGFGSFHQQYRIDGRLIAVGVVDILPKCLSSVYLFWDPDYAFLSLGKYSAIQEINWVIENQARCPSLQYYYLGYYIHSCSKMRYKAAYRPSELLCPLRFQWVPFEVARPMLDKKPYVILSDIAISHNQCSLLAGASETLVEPAASEHEDMEQGETNDNFMGCSDEDEDEDEDDDDDDDDDEEMYETESEDSHIESDPGSKDNDINNILIGLYGSQYRYKEMRQIITPVGRKQLEPMLQSYRKVVGAELSERMVYEIN

SEQ ID NO: 100298 - protein, 480 aa, Arabidopsis thaliana
  peptide (1)..(480): Ceres Seq. ID no. 13604842
  misc_feature (170)..(326): Pfam Name: Arginine-tRNA-protein transferase, C terminus Pfam Description: Arginine-tRNA-protein transferase, C terminus
  misc_feature (1)..(416): Homolog of NCBI NO: 15229703 NR Description: arginine-tRNA-protein transferase -related
  misc_feature (390)..(479): Homolog of NCBI NO: 15229703 NR Description: arginine-tRNA-protein transferase -related
  misc_feature (170)..(339): Homolog of NCBI NO: 31542151 NR Description: arginine-tRNA-protein transferase 1 [Mus musculus]
  misc_feature (163)..(339): Homolog of NCBI NO: 22002033 NR Description: Arginine-tRNA-protein transferase 1
  misc_feature (1)..(13): Homolog of NCBI NO: 22002033 NR Description: Arginine-tRNA-protein transferase 1
  misc_feature (163)..(339): Homolog of NCBI NO: 3806094 NR Description: arginine-tRNA-protein transferase 1-1p; ATE1-1p
  misc_feature (1)..(13): Homolog of NCBI NO: 3806094 NR Description: arginine-tRNA-protein transferase 1-1p; ATE1-1p
  misc_feature (170)..(339): Homolog of NCBI NO: 13123998 NR Description: Arginine-tRNA-protein transferase 1
  misc_feature (64)..(344): Homolog of NCBI NO: 24656066 NR Description: CG9204-PB [Drosophila melanogaster]
  misc_feature (64)..(344): Homolog of NCBI NO: 25012280 NR Description: LD33682p [Drosophila melanogaster]
MDDLSKNIDQAVQLCIRSGEFPSNMQIPKASVKKVFCARRKKLAEGTEQILYTSNIAFPIAAAIKRIQTSEKEGINSAEGNRLSPETISEMLLSAMHKVGETPDVSIKVCKGHINFLSSAKDSFSDRDVVPNGNISRGANSLDGSETLHAKKDSENHQARKRKLEIHLKRSSFDPEEHELYKRYQLKVHNDKPGHVVESSYRRFLVDSPLIDVQPSGDEKVPPCGFGSFHQQYRIDGRLIAVGVVDILPKCLSSVYLFWDPDYAFLSLGKYSAIQEINWVIENQARCPSLQYYYLGYYIHSCSKMRYKAAYRPSELLCPLRFQWVPFEVARPMLDKKPYVILSDIAISHNQCSLLAGASETLVEPAASEHEDMEQGETNDNFMGCSDEDEDEDEDDDDDDDDDEEMYETESEDSHIESDPGSKDNDINNILIGLYGSQYRYKEMRQIITPVGRKQLEPMLQSYRKVVGAELSERMVYEIN

SEQ ID NO: 100299 - DNA, 951 bp, Arabidopsis thaliana
  misc_feature (1)..(951): Ceres Seq. ID no. 13604843
  misc_feature: MA Experiment ID: 20000180 Result: Down-regulated in Transcription
  misc_feature: MA Experiment 20000180 PARAMETER Experiment Name: At_Germinating_Seeds_P Parameter: Age (hr) Value: 24 vs. 0
  misc_feature: MA Experiment 20000180 PARAMETER Experiment Name: At_Germinating_Seeds_P Parameter: Tissue Value: Germinating Seeds
  misc_feature: MA Experiment ID: 20000227 Result: Up-regulated in Transcription
  misc_feature: MA Experiment 20000227 PARAMETER Experiment Name: At_Root-Tips-vs-Tops_P Parameter: Tissue Value: Root Tips vs. Root Tops
  misc_feature: MA Experiment ID: 20001557 Result: Up-regulated in Transcription
  misc_feature: MA Experiment 20001557 PARAMETER Experiment Name: At_Drought_Soil_Dry_P Parameter: Age (day) Value: 27
  misc_feature: MA Experiment 20001557 PARAMETER Experiment Name: At_Drought_Soil_Dry_P Parameter: Organism Value: A. thaliana
  misc_feature: MA Experiment 20001557 PARAMETER Experiment Name: At_Drought_Soil_Dry_P Parameter: Plant Line Value: WS
  misc_feature: MA Experiment 20001557 PARAMETER Experiment Name: At_Drought_Soil_Dry_P Parameter: Post Timepoint (hr) Value: 3
  misc_feature: MA Experiment 20001557 PARAMETER Experiment Name: At_Drought_Soil_Dry_P Parameter: Post-Treatment Value: Re-Water vs. No Drought
  misc_feature: MA Experiment 20001557 PARAMETER Experiment Name: At_Drought_Soil_Dry_P Parameter: Timepoint (day) Value: 13
  misc_feature: MA Experiment 20001557 PARAMETER Experiment Name: At_Drought_Soil_Dry_P Parameter: Treatment Value: Drought vs. No Drought
  misc_feature: MA Experiment ID: 20001558 Result: Up-regulated in Transcription
  misc_feature: MA Experiment 20001558 PARAMETER Experiment Name: At_Drought_Soil_Dry_P Parameter: Age (day) Value: 27
  misc_feature: MA Experiment 20001558 PARAMETER Experiment Name: At_Drought_Soil_Dry_P Parameter: Organism Value: A. thaliana
  misc_feature: MA Experiment 20001558 PARAMETER Experiment Name: At_Drought_Soil_Dry_P Parameter: Plant Line Value: WS
  misc_feature: MA Experiment 20001558 PARAMETER Experiment Name: At_Drought_Soil_Dry_P Parameter: Post Timepoint (hr) Value: 6
  misc_feature: MA Experiment 20001558 PARAMETER Experiment Name: At_Drought_Soil_Dry_P Parameter: Post-Treatment Value: Re-Water vs. No Drought
  misc_feature: MA Experiment 20001558 PARAMETER Experiment Name: At_Drought_Soil_Dry_P Parameter: Timepoint (day) Value: 13
  misc_feature: MA Experiment 20001558 PARAMETER Experiment Name: At_Drought_Soil_Dry_P Parameter: Treatment Value: Drought vs. No Drought
  misc_feature: MA Experiment ID: 20001560 Result: Up-regulated in Transcription
  misc_feature: MA Experiment 20001560 PARAMETER Experiment Name: At_Drought_Soil_Dry_P Parameter: Age (day) Value: 28
  misc_feature: MA Experiment 20001560 PARAMETER Experiment Name: At_Drought_Soil_Dry_P Parameter: Organism Value: A. thaliana
  misc_feature: MA Experiment 20001560 PARAMETER Experiment Name: At_Drought_Soil_Dry_P Parameter: Plant Line Value: WS
  misc_feature: MA Experiment 20001560 PARAMETER Experiment Name: At_Drought_Soil_Dry_P Parameter: Post Timepoint (hr) Value: None
  misc_feature: MA Experiment 20001560 PARAMETER Experiment Name: At_Drought_Soil_Dry_P Parameter: Post-Treatment Value: None
  misc_feature: MA Experiment 20001560 PARAMETER Experiment Name: At_Drought_Soil_Dry_P Parameter: Timepoint (day) Value: 14
  misc_feature: MA Experiment 20001560 PARAMETER Experiment Name: At_Drought_Soil_Dry_P Parameter: Treatment Value: Drought vs. No Drought
  misc_feature: MA Experiment ID: 20001757 Result: Up-regulated in Transcription
  misc_feature: MA Experiment 20001757 PARAMETER Experiment Name: At_50mM_NH4NO3_L-to-H_P Parameter: Timepoint (hr) Value: 6
  misc_feature: MA Experiment 20001757 PARAMETER Experiment Name: At_50mM_NH4NO3_L-to-H_P Parameter: Tissue Value: Leaf
  misc_feature: MA Experiment 20001757 PARAMETER Experiment Name: At_50mM_NH4NO3_L-to-H_P Parameter: Treatment Value: 50mM NH4NO3 vs 100mM Mannitol
  misc_feature: MA Experiment ID: 20001911 Result: Down-regulated in Transcription
  misc_feature: MA Experiment 20001911 PARAMETER Experiment Name: At_Drought_Reproduction_P Parameter: Age (day) Value: 40
  misc_feature: MA Experiment 20001911 PARAMETER Experiment Name: At_Drought_Reproduction_P Parameter: Organism Value: A. thaliana
  misc_feature: MA Experiment 20001911 PARAMETER Experiment Name: At_Drought_Reproduction_P Parameter: Plant Line Value: WS
  misc_feature: MA Experiment 20001911 PARAMETER Experiment Name: At_Drought_Reproduction_P Parameter: Timepoint (day) Value: 10
  misc_feature: MA Experiment 20001911 PARAMETER Experiment Name: At_Drought_Reproduction_P Parameter: Tissue Value: Flowers
  misc_feature: MA Experiment 20001911 PARAMETER Experiment Name: At_Drought_Reproduction_P Parameter: Treatment Value: Drought vs. No Drought
atggcgattgatacgatacaaaaaacaaaaaagcttcggtggggagaaattgacgaagaagaaggcgactatgatttccttcttccgcctaagcagatgattagtccggaccagaacggtgtaaagaaggtgattgagtacaaattcaacgaagaggacaaaaaggtcaaaatcactaccacgacccgtgttcagaagcgagctctcaccaaacaagccgtggagcgacggagctggaataagttcggagacgcagctcatgaagaatccagtagttacctcacaatgcgttcaacagaggatatcatcttggaacgaattagagctcctggtagcaacgcggaacagtcgaccgtatcaggagatagcatgtctcagttgggcaaaccgggtgcggtcctcatggtctgcaggttatgccaaaagaaaggtgaccactggacatcaagatgcccacagaaggatctcttatccttaatggacgagcctttaacagcagaaacttctacatcgaccataactggaactggcagggcggcttatgtcccgccaagcatgagagaaggtgcagacagaaaagctggtggttcagacatgaggagtagacatgatgagaactctgtccgtgtgactaatttgtctgaagatacccgtggaccagatttgatggagttgtttcgtccgtttggtgctgtaacccgttgtcatgtagccattgatcagaagacaagcatgagcagaggatttggttttgtcagttttgtgagcagggaagatgcacagcgagcaatcaacaaattgaatggctatggttatgataacctcattcttagggttgaatggtccactcctaaaacccaattagatccgttttcattcgctgattataataatctttgtaagttgttgaatatatgtcattcatgattataagttctcgcgaagggtggg

SEQ ID NO: 100300 - protein, 308 aa, Arabidopsis thaliana
  peptide (1)..(308): Ceres Seq. ID no. 13604844
  misc_feature (208)..(279): Pfam Name: RNA recognition motif. (a.k.a. RRM, RBD, or RNP domain) Pfam Description: RNA recognition motif. (a.k.a. RRM, RBD, or RNP
  misc_feature (1)..(308): Homolog of NCBI NO: 10177573 NR Description: eukaryotic translation initiation factor 3
  misc_feature (33)..(308): Homolog of NCBI NO: 30681225 NR Description: eukaryotic translation initiation factor 3, [Arabidopsis thaliana] >gi|18252945|gb|AAL62399.1| eukaryotic
  misc_feature (1)..(285): Homolog of NCBI NO: 15229743 NR Description: eukaryotic translation initiation factor 3 g (eIF3g) [Arabidopsis thaliana] >gi|9755847|emb|CAC01929.1| initiation factor 3, subunit g (eIF3g) [Arabidopsis thaliana]
  misc_feature (1)..(285): Homolog of NCBI NO: 12407751 NR Description: initiation factor 3g [Arabidopsis thaliana] putative eukaryotic translation initiation factor 3 subunit
  misc_feature (27)..(288): Homolog of NCBI NO: 30583983 NR Description: Homo sapiens eukaryotic translation initiation
  misc_feature (25)..(286): Homolog of NCBI NO: 31980808 NR Description: eukaryotic translation initiation factor 3,
  misc_feature (27)..(286): Homolog of NCBI NO: 23503064 NR Description: Eukaryotic translation initiation factor 3
  misc_feature (11)..(284): Homolog of NCBI NO: 29124629 NR Description: Similar to eukaryotic translation initiation
  misc_feature (27)..(286): Homolog of NCBI NO: 4503517 NR Description: eukaryotic translation initiation factor 3,
  misc_feature (25)..(286): Homolog of NCBI NO: 4097873 NR Description: eIF3-p44 [Mus musculus]
MAIDTIQKTKKLRWGEIDEEEGDYDFLLPPKQMISPDQNGVKKVIEYKFNEEDKKVKITTTTRVQKRALTKQAVERRSWNKFGDAAHEESSSYLTMRSTEDIILERIRAPGSNAEQSTVSGDSMSQLGKPGAVLMVCRLCQKKGDHWTSRCPQKDLLSLMDEPLTAETSTSTITGTGRAAYVPPSMREGADRKAGGSDMRSRHDENSVRVTNLSEDTRGPDLMELFRPFGAVTRCHVAIDQKTSMSRGFGFVSFVSREDAQRAINKLNGYGYDNLILRVEWSTPKTQLDPFSFADYNNLCKLLNICHS

SEQ ID NO: 100301 - protein, 276 aa, Arabidopsis thaliana; identical to SEQ ID NO: 75813
  peptide (1)..(276): Ceres Seq. ID no. 13604845
  misc_feature (176)..(247): Pfam Name: RNA recognition motif. (a.k.a. RRM, RBD, or RNP domain) Pfam Description: RNA recognition motif. (a.k.a. RRM, RBD, or RNP
  misc_feature (1)..(276): Homolog of NCBI NO: 10177573 NR Description: eukaryotic translation initiation factor 3
  misc_feature (1)..(276): Homolog of NCBI NO: 30681225 NR Description: eukaryotic translation initiation factor 3, [Arabidopsis thaliana] >gi|18252945|gb|AAL62399.1| eukaryotic
  misc_feature (1)..(253): Homolog of NCBI NO: 15229743 NR Description: eukaryotic translation initiation factor 3 g (eIF3g) [Arabidopsis thaliana] >gi|9755847|emb|CAC01929.1| initiation factor 3, subunit g (eIF3g) [Arabidopsis thaliana]
  misc_feature (1)..(253): Homolog of NCBI NO: 12407751 NR Description: initiation factor 3g [Arabidopsis thaliana] putative eukaryotic translation initiation factor 3 subunit
  misc_feature (1)..(256): Homolog of NCBI NO: 30583983 NR Description: Homo sapiens eukaryotic translation initiation
  misc_feature (1)..(254): Homolog of NCBI NO: 31980808 NR Description: eukaryotic translation initiation factor 3,
  misc_feature (1)..(254): Homolog of NCBI NO: 23503064 NR Description: Eukaryotic translation initiation factor 3
  misc_feature (1)..(252): Homolog of NCBI NO: 29124629 NR Description: Similar to eukaryotic translation initiation
  misc_feature (1)..(254): Homolog of NCBI NO: 4503517 NR Description: eukaryotic translation initiation factor 3,
  misc_feature (1)..(254): Homolog of NCBI NO: 4097873 NR Description: eIF3-p44 [Mus musculus]

SEQ ID NO: 100302 - protein, 213 aa, Arabidopsis thaliana; identical to SEQ ID NO: 75814
  peptide (1)..(213): Ceres Seq. ID no. 13604846
  misc_feature (113)..(184): Pfam Name: RNA recognition motif. (a.k.a. RRM, RBD, or RNP domain) Pfam Description: RNA recognition motif. (a.k.a. RRM, RBD, or RNP
  misc_feature (1)..(213): Homolog of NCBI NO: 10177573 NR Description: eukaryotic translation initiation factor 3
  misc_feature (1)..(213): Homolog of NCBI NO: 30681225 NR Description: eukaryotic translation initiation factor 3, [Arabidopsis thaliana] >gi|18252945|gb|AAL62399.1| eukaryotic
  misc_feature (1)..(190): Homolog of NCBI NO: 15229743 NR Description: eukaryotic translation initiation factor 3 g (eIF3g) [Arabidopsis thaliana] >gi|9755847|emb|CAC01929.1| initiation factor 3, subunit g (eIF3g) [Arabidopsis thaliana]
  misc_feature (1)..(190): Homolog of NCBI NO: 12407751 NR Description: initiation factor 3g [Arabidopsis thaliana] putative eukaryotic translation initiation factor 3 subunit
  misc_feature (1)..(193): Homolog of NCBI NO: 30583983 NR Description: Homo sapiens eukaryotic translation initiation
  misc_feature (1)..(191): Homolog of NCBI NO: 31980808 NR Description: eukaryotic translation initiation factor 3,
  misc_feature (1)..(191): Homolog of NCBI NO: 23503064 NR Description: Eukaryotic translation initiation factor 3
  misc_feature (1)..(189): Homolog of NCBI NO: 29124629 NR Description: Similar to eukaryotic translation initiation
  misc_feature (1)..(191): Homolog of NCBI NO: 4503517 NR Description: eukaryotic translation initiation factor 3,
  misc_feature (1)..(191): Homolog of NCBI NO: 4097873 NR Description: eIF3-p44 [Mus musculus]

SEQ ID NO: 100303 - DNA, 1103 bp, Arabidopsis thaliana
  misc_feature (1)..(1103): Ceres Seq. ID no. 13604847
  misc_feature: MA Experiment ID: 20000169 Result: Down-regulated in Transcription
  misc_feature: MA Experiment 20000169 PARAMETER Experiment Name: At_100uM_ABA_P Parameter: Age (day) Value: 14
  misc_feature: MA Experiment 20000169 PARAMETER Experiment Name: At_100uM_ABA_P Parameter: Organism Value: A. thaliana
  misc_feature: MA Experiment 20000169 PARAMETER Experiment Name: At_100uM_ABA_P Parameter: Plant Line Value: WS
  misc_feature: MA Experiment 20000169 PARAMETER Experiment Name: At_100uM_ABA_P Parameter: Timepoint (hr) Value: 6
  misc_feature: MA Experiment 20000169 PARAMETER Experiment Name: At_100uM_ABA_P Parameter: Tissue Value: Aerial
  misc_feature: MA Experiment 20000169 PARAMETER Experiment Name: At_100uM_ABA_P Parameter: Treatment Value: 100uM ABA vs. No Treatment
  misc_feature: MA Experiment ID: 20000173 Result: Down-regulated in Transcription
  misc_feature: MA Experiment 20000173 PARAMETER Experiment Name: At_42deg_Heat_P Parameter: Age (day) Value: 14
  misc_feature: MA Experiment 20000173 PARAMETER Experiment Name: At_42deg_Heat_P Parameter: Organism Value: A. thaliana
  misc_feature: MA Experiment 20000173 PARAMETER Experiment Name: At_42deg_Heat_P Parameter: Plant Line Value: WS
  misc_feature: MA Experiment 20000173 PARAMETER Experiment Name: At_42deg_Heat_P Parameter: Temperature (deg C) Value: 42 vs. 22
  misc_feature: MA Experiment 20000173 PARAMETER Experiment Name: At_42deg_Heat_P Parameter: Timepoint (hr) Value: 6
  misc_feature: MA Experiment 20000173 PARAMETER Experiment Name: At_42deg_Heat_P Parameter: Tissue Value: Aerial
  misc_feature: MA Experiment ID: 20000179 Result: Down-regulated in Transcription
  misc_feature: MA Experiment 20000179 PARAMETER Experiment Name: At_Germinating_Seeds_P Parameter: Age (hr) Value: 6 vs. 0
  misc_feature: MA Experiment 20000179 PARAMETER Experiment Name: At_Germinating_Seeds_P Parameter: Tissue Value: Germinating Seeds
  misc_feature: MA Experiment ID: 20000180 Result: Down-regulated in Transcription
  misc_feature: MA Experiment 20000180 PARAMETER Experiment Name: At_Germinating_Seeds_P Parameter: Age (hr) Value: 24 vs. 0
  misc_feature: MA Experiment 20000180 PARAMETER Experiment Name: At_Germinating_Seeds_P Parameter: Tissue Value: Germinating Seeds
  misc_feature: MA Experiment ID: 20000182 Result: Up-regulated in Transcription
  misc_feature: MA Experiment 20000182 PARAMETER Experiment Name: At_2mM_SA_P Parameter: Age (day) Value: 14
  misc_feature: MA Experiment 20000182 PARAMETER Experiment Name: At_2mM_SA_P Parameter: Organism Value: A. thaliana
  misc_feature: MA Experiment 20000182 PARAMETER Experiment Name: At_2mM_SA_P Parameter: Plant Line Value: WS
  misc_feature: MA Experiment 20000182 PARAMETER Experiment Name: At_2mM_SA_P Parameter: Timepoint (hr) Value: 6
  misc_feature: MA Experiment 20000182 PARAMETER Experiment Name: At_2mM_SA_P Parameter: Tissue Value: Aerial
  misc_feature: MA Experiment 20000182 PARAMETER Experiment Name: At_2mM_SA_P Parameter: Treatment Value: 2mM SA vs. No Treatment
  misc_feature: MA Experiment ID: 20000184 Result: Down-regulated in Transcription
  misc_feature: MA Experiment 20000184 PARAMETER Experiment Name: At_Shoots__P Parameter: Age (day) Value: 7
  misc_feature: MA Experiment 20000184 PARAMETER Experiment Name: At_Shoots__P Parameter: Tissue Value: Shoots vs. Whole Plant
  misc_feature: MA Experiment ID: 20000185 Result: Up-regulated in Transcription
  misc_feature: MA Experiment 20000185 PARAMETER Experiment Name: At_Roots__P Parameter: Age (day) Value: 7 vs. 21
  misc_feature: MA Experiment 20000185 PARAMETER Experiment Name: At_Roots__P Parameter: Organism Value: A. thaliana
  misc_feature: MA Experiment 20000185 PARAMETER Experiment Name: At_Roots__P Parameter: Tissue Value: Roots vs. Whole Plant
  misc_feature: MA Experiment ID: 20000227 Result: Down-regulated in Transcription
  misc_feature: MA Experiment 20000227 PARAMETER Experiment Name: At_Root-Tips-vs-Tops_P Parameter: Tissue Value: Root Tips vs. Root Tops
  misc_feature: MA Experiment ID: 20000234 Result: Down-regulated in Transcription
  misc_feature: MA Experiment 20000234 PARAMETER Experiment Name: At_Siliques_P Parameter: Age (day) Value: 21
  misc_feature: MA Experiment 20000234 PARAMETER Experiment Name: At_Siliques_P Parameter: Organism Value: A. thaliana
  misc_feature: MA Experiment 20000234 PARAMETER Experiment Name: At_Siliques_P Parameter: Plant Line Value: WS
  misc_feature: MA Experiment 20000234 PARAMETER Experiment Name: At_Siliques_P Parameter: Tissue Value: Less Than 5mm Siliques vs. Whole Plant
  misc_feature: MA Experiment ID: 20000264 Result: Down-regulated in Transcription
  misc_feature: MA Experiment 20000264 PARAMETER Experiment Name: At_Open_Flower_P Parameter: Age (day) Value: 21
  misc_feature: MA Experiment 20000264 PARAMETER Experiment Name: At_Open_Flower_P Parameter: Plant Line Value: WS
  misc_feature: MA Experiment 20000264 PARAMETER Experiment Name: At_Open_Flower_P Parameter: Tissue Value: Open Flower vs. Whole Plant
  misc_feature: MA Experiment ID: 20000308 Result: Up-regulated in Transcription
  misc_feature: MA Experiment 20000308 PARAMETER Experiment Name: At_100mM_NaCl__P Parameter: Age (day) Value: 17
  misc_feature: MA Experiment 20000308 PARAMETER Experiment Name: At_100mM_NaCl__P Parameter: Organism Value: A. thaliana
  misc_feature: MA Experiment 20000308 PARAMETER Experiment Name: At_100mM_NaCl__P Parameter: Plant Line Value: WS
  misc_feature: MA Experiment 20000308 PARAMETER Experiment Name: At_100mM_NaCl__P Parameter: Timepoint (hr) Value: 72
  misc_feature: MA Experiment 20000308 PARAMETER Experiment Name: At_100mM_NaCl__P Parameter: Tissue Value: Whole Plant
  misc_feature: MA Experiment 20000308 PARAMETER Experiment Name: At_100mM_NaCl__P Parameter: Treatment Value: 100mM NaCl vs. No Treatment
  misc_feature: MA Experiment ID: 20000436 Result: Down-regulated in Transcription
  misc_feature: MA Experiment 20000436 PARAMETER Experiment Name: At_Drought_P Parameter: Age (day) Value: 7
  misc_feature: MA Experiment 20000436 PARAMETER Experiment Name: At_Drought_P Parameter: Organism Value: A. thaliana
  misc_feature: MA Experiment 20000436 PARAMETER Experiment Name: At_Drought_P Parameter: Plant Line Value: WS
  misc_feature: MA Experiment 20000436 PARAMETER Experiment Name: At_Drought_P Parameter: Timepoint (hr) Value: 12
  misc_feature: MA Experiment 20000436 PARAMETER Experiment Name: At_Drought_P Parameter: Tissue Value: Whole Plant
  misc_feature: MA Experiment 20000436 PARAMETER Experiment Name: At_Drought_P Parameter: Treatment Value: Drought vs. No Drought
  misc_feature: MA Experiment ID: 20000438 Result: Down-regulated in Transcription
  misc_feature: MA Experiment 20000438 PARAMETER Experiment Name: At_Shoots__P Parameter: Age (day) Value: 14
  misc_feature: MA Experiment 20000438 PARAMETER Experiment Name: At_Shoots__P Parameter: Tissue Value: Shoots vs. Whole Plant
  misc_feature: MA Experiment ID: 20000439 Result: Up-regulated in Transcription
  misc_feature: MA Experiment 20000439 PARAMETER Experiment Name: At_Roots__P Parameter: Age (day) Value: 14 vs. 21
  misc_feature: MA Experiment 20000439 PARAMETER Experiment Name: At_Roots__P Parameter: Organism Value: A. thaliana
  misc_feature: MA Experiment 20000439 PARAMETER Experiment Name: At_Roots__P Parameter: Tissue Value: Roots vs. Whole Plant
  misc_feature: MA Experiment ID: 20000451 Result: Down-regulated in Transcription
  misc_feature: MA Experiment 20000451 PARAMETER Experiment Name: At_CS6879_Shoots-Roots_P Parameter: Age (day) Value: 14
  misc_feature: MA Experiment 20000451 PARAMETER Experiment Name: At_CS6879_Shoots-Roots_P Parameter: Organism Value: A. thaliana
  misc_feature: MA Experiment 20000451 PARAMETER Experiment Name: At_CS6879_Shoots-Roots_P Parameter: Plant Line Value: CS6879 vs. WS
  misc_feature: MA Experiment 20000451 PARAMETER Experiment Name: At_CS6879_Shoots-Roots_P Parameter: Tissue Value: Roots
  misc_feature: MA Experiment ID: 20000456 Result: Up-regulated in Transcription
  misc_feature: MA Experiment 20000456 PARAMETER Experiment Name: At_100uM_BA_P Parameter: Age (day) Value: 14
  misc_feature: MA Experiment 20000456 PARAMETER Experiment Name: At_100uM_BA_P Parameter: Organism Value: A. thaliana
  misc_feature: MA Experiment 20000456 PARAMETER Experiment Name: At_100uM_BA_P Parameter: Plant Line Value: WS
  misc_feature: MA Experiment 20000456 PARAMETER Experiment Name: At_100uM_BA_P Parameter: Timepoint (hr) Value: 6
  misc_feature: MA Experiment 20000456 PARAMETER Experiment Name: At_100uM_BA_P Parameter: Tissue Value: Aerial
  misc_feature: MA Experiment 20000456 PARAMETER Experiment Name: At_100uM_BA_P Parameter: Treatment Value: 100uM BA vs. No Treatment
  misc_feature: MA Experiment ID: 20000794 Result: Down-regulated in Transcription
  misc_feature: MA Experiment 20000794 PARAMETER Experiment Name: At_Petals_P Parameter: Age (day) Value: 23-25 days
  misc_feature: MA Experiment 20000794 PARAMETER Experiment Name: At_Petals_P Parameter: Plant Line Value: WS
  misc_feature: MA Experiment 20000794 PARAMETER Experiment Name: At_Petals_P Parameter: Tissue Value: Petals vs. Whole plant
  misc_feature: MA Experiment ID: 20001450 Result: Up-regulated in Transcription
  misc_feature: MA Experiment 20001450 PARAMETER Experiment Name: At_Far-red-induction_P Parameter: Age (day) Value: 7
  misc_feature: MA Experiment 20001450 PARAMETER Experiment Name: At_Far-red-induction_P Parameter: Light Value: Far-red vs. White
  misc_feature: MA Experiment 20001450 PARAMETER Experiment Name: At_Far-red-induction_P Parameter: Organism Value: A. thaliana
  misc_feature: MA Experiment 20001450 PARAMETER Experiment Name: At_Far-red-induction_P Parameter: Plant Line Value: Columbia
  misc_feature: MA Experiment 20001450 PARAMETER Experiment Name: At_Far-red-induction_P Parameter: Timepoint (hr) Value: 8
  misc_feature: MA Experiment 20001450 PARAMETER Experiment Name: At_Far-red-induction_P Parameter: Tissue Value: Whole Plant
  misc_feature: MA Experiment ID: 20001457 Result: Up-regulated in Transcription
  misc_feature: MA Experiment 20001457 PARAMETER Experiment Name: At_50mM_NH4NO3_L-to-H_P Parameter: Age (day) Value: Undefined
  misc_feature: MA Experiment 20001457 PARAMETER Experiment Name: At_50mM_NH4NO3_L-to-H_P Parameter: Organism Value: Undefined
  misc_feature: MA Experiment 20001457 PARAMETER Experiment Name: At_50mM_NH4NO3_L-to-H_P Parameter: Plant Line Value: Undefined
  misc_feature: MA Experiment 20001457 PARAMETER Experiment Name: At_50mM_NH4NO3_L-to-H_P Parameter: Timepoint (hr) Value: 0.5
  misc_feature: MA Experiment 20001457 PARAMETER Experiment Name: At_50mM_NH4NO3_L-to-H_P Parameter: Tissue Value: Siliques
  misc_feature: MA Experiment 20001457 PARAMETER Experiment Name: At_50mM_NH4NO3_L-to-H_P Parameter: Treatment Value: 50mM NH4NO3 vs. 100mM Manitol
  misc_feature: MA Experiment ID: 20001459 Result: Up-regulated in Transcription
  misc_feature: MA Experiment 20001459 PARAMETER Experiment Name: At_50mM_NH4NO3_L-to-H_P Parameter: Age (day) Value: Undefined
  misc_feature: MA Experiment 20001459 PARAMETER Experiment Name: At_50mM_NH4NO3_L-to-H_P Parameter: Organism Value: Undefined
  misc_feature: MA Experiment 20001459 PARAMETER Experiment Name: At_50mM_NH4NO3_L-to-H_P Parameter: Plant Line Value: Undefined
  misc_feature: MA Experiment 20001459 PARAMETER Experiment Name: At_50mM_NH4NO3_L-to-H_P Parameter: Timepoint (hr) Value: 4
  misc_feature: MA Experiment 20001459 PARAMETER Experiment Name: At_50mM_NH4NO3_L-to-H_P Parameter: Tissue Value: Siliques
  misc_feature: MA Experiment 20001459 PARAMETER Experiment Name: At_50mM_NH4NO3_L-to-H_P Parameter: Treatment Value: 50mM NH4NO3 vs. 100mM Manitol
  misc_feature: MA Experiment ID: 20001555 Result: Down-regulated in Transcription
  misc_feature: MA Experiment 20001555 PARAMETER Experiment Name: At_Drought_Soil_Dry_P Parameter: Age (day) Value: 24
  misc_feature: MA Experiment 20001555 PARAMETER Experiment Name: At_Drought_Soil_Dry_P Parameter: Organism Value: A. thaliana
  misc_feature: MA Experiment 20001555 PARAMETER Experiment Name: At_Drought_Soil_Dry_P Parameter: Plant Line Value: WS
  misc_feature: MA Experiment 20001555 PARAMETER Experiment Name: At_Drought_Soil_Dry_P Parameter: Post Timepoint (hr) Value: None
  misc_feature: MA Experiment 20001555 PARAMETER Experiment Name: At_Drought_Soil_Dry_P Parameter: Post-Treatment Value: None
  misc_feature: MA Experiment 20001555 PARAMETER Experiment Name: At_Drought_Soil_Dry_P Parameter: Timepoint (day) Value: 10
  misc_feature: MA Experiment 20001555 PARAMETER Experiment Name: At_Drought_Soil_Dry_P Parameter: Treatment Value: Drought vs. No Drought
  misc_feature: MA Experiment ID: 20001556 Result: Down-regulated in Transcription
  misc_feature: MA Experiment 20001556 PARAMETER Experiment Name: At_Drought_Soil_Dry_P Parameter: Age (day) Value: 26
  misc_feature: MA Experiment 20001556 PARAMETER Experiment Name: At_Drought_Soil_Dry_P Parameter: Organism Value: A. thaliana
  misc_feature: MA Experiment 20001556 PARAMETER Experiment Name: At_Drought_Soil_Dry_P Parameter: Plant Line Value: WS
  misc_feature: MA Experiment 20001556 PARAMETER Experiment Name: At_Drought_Soil_Dry_P Parameter: Post Timepoint (hr) Value: None
  misc_feature: MA Experiment 20001556 PARAMETER Experiment Name: At_Drought_Soil_Dry_P Parameter: Post-Treatment Value: None
  misc_feature: MA Experiment 20001556 PARAMETER Experiment Name: At_Drought_Soil_Dry_P Parameter: Timepoint (day) Value: 12
  misc_feature: MA Experiment 20001556 PARAMETER Experiment Name: At_Drought_Soil_Dry_P Parameter: Treatment Value: Drought vs. No Drought
  misc_feature: MA Experiment ID: 20001560 Result: Down-regulated in Transcription
  misc_feature: MA Experiment 20001560 PARAMETER Experiment Name: At_Drought_Soil_Dry_P Parameter: Age (day) Value: 28
  misc_feature: MA Experiment 20001560 PARAMETER Experiment Name: At_Drought_Soil_Dry_P Parameter: Organism Value: A. thaliana
  misc_feature: MA Experiment 20001560 PARAMETER Experiment Name: At_Drought_Soil_Dry_P Parameter: Plant Line Value: WS
  misc_feature: MA Experiment 20001560 PARAMETER Experiment Name: At_Drought_Soil_Dry_P Parameter: Post Timepoint (hr) Value: None
  misc_feature: MA Experiment 20001560 PARAMETER Experiment Name: At_Drought_Soil_Dry_P Parameter: Post-Treatment Value: None
  misc_feature: MA Experiment 20001560 PARAMETER Experiment Name: At_Drought_Soil_Dry_P Parameter: Timepoint (day) Value: 14
  misc_feature: MA Experiment 20001560 PARAMETER Experiment Name: At_Drought_Soil_Dry_P Parameter: Treatment Value: Drought vs. No Drought
  misc_feature: MA Experiment ID: 20001755 Result: Up-regulated in Transcription
  misc_feature: MA Experiment 20001755 PARAMETER Experiment Name: At_50mM_NH4NO3_L-to-H_P Parameter: Timepoint (hr) Value: 2
  misc_feature: MA Experiment 20001755 PARAMETER Experiment Name: At_50mM_NH4NO3_L-to-H_P Parameter: Tissue Value: Leaf
  misc_feature: MA Experiment 20001755 PARAMETER Experiment Name: At_50mM_NH4NO3_L-to-H_P Parameter: Treatment Value: 50mM NH4NO3 vs 100mM Mannitol
  misc_feature: MA Experiment ID: 20001756 Result: Up-regulated in Transcription
  misc_feature: MA Experiment 20001756 PARAMETER Experiment Name: At_50mM_NH4NO3_L-to-H_P Parameter: Timepoint (hr) Value: 4
  misc_feature: MA Experiment 20001756 PARAMETER Experiment Name: At_50mM_NH4NO3_L-to-H_P Parameter: Tissue Value: Leaf
  misc_feature: MA Experiment 20001756 PARAMETER Experiment Name: At_50mM_NH4NO3_L-to-H_P Parameter: Treatment Value: 50mM NH4NO3 vs 100mM Mannitol
  misc_feature: MA Experiment ID: 20001757 Result: Up-regulated in Transcription
  misc_feature: MA Experiment 20001757 PARAMETER Experiment Name: At_50mM_NH4NO3_L-to-H_P Parameter: Timepoint (hr) Value: 6
  misc_feature: MA Experiment 20001757 PARAMETER Experiment Name: At_50mM_NH4NO3_L-to-H_P Parameter: Tissue Value: Leaf
  misc_feature: MA Experiment 20001757 PARAMETER Experiment Name: At_50mM_NH4NO3_L-to-H_P Parameter: Treatment Value: 50mM NH4NO3 vs 100mM Mannitol
  misc_feature: MA Experiment ID: 20001759 Result: Up-regulated in Transcription
  misc_feature: MA Experiment 20001759 PARAMETER Experiment Name: At_50mM_NH4NO3_L-to-H_P Parameter: Timepoint (hr) Value: 1
  misc_feature: MA Experiment 20001759 PARAMETER Experiment Name: At_50mM_NH4NO3_L-to-H_P Parameter: Tissue Value: Siliques
  misc_feature: MA Experiment 20001759 PARAMETER Experiment Name: At_50mM_NH4NO3_L-to-H_P Parameter: Treatment Value: 50mM NH4NO3 vs 100mM Mannitol
  misc_feature: MA Experiment ID: 20001760 Result: Up-regulated in Transcription
  misc_feature: MA Experiment 20001760 PARAMETER Experiment Name: At_50mM_NH4NO3_L-to-H_P Parameter: Timepoint (hr) Value: 2
  misc_feature: MA Experiment 20001760 PARAMETER Experiment Name: At_50mM_NH4NO3_L-to-H_P Parameter: Tissue Value: Siliques
  misc_feature: MA Experiment 20001760 PARAMETER Experiment Name: At_50mM_NH4NO3_L-to-H_P Parameter: Treatment Value: 50mM NH4NO3 vs 100mM Mannitol
  misc_feature: MA Experiment ID: 20001761 Result: Down-regulated in Transcription
  misc_feature: MA Experiment 20001761 PARAMETER Experiment Name: At_50mM_NH4NO3_L-to-H_P Parameter: Timepoint (hr) Value: 4
  misc_feature: MA Experiment 20001761 PARAMETER Experiment Name: At_50mM_NH4NO3_L-to-H_P Parameter: Tissue Value: Siliques
  misc_feature: MA Experiment 20001761 PARAMETER Experiment Name: At_50mM_NH4NO3_L-to-H_P Parameter: Treatment Value: 50mM NH4NO3 vs 100mM Mannitol
  misc_feature: MA Experiment ID: 20001904 Result: Down-regulated in Transcription
  misc_feature: MA Experiment 20001904 PARAMETER Experiment Name: At_Drought_Reproduction_P Parameter: Age (day) Value: 37
  misc_feature: MA Experiment 20001904 PARAMETER Experiment Name: At_Drought_Reproduction_P Parameter: Organism Value: A. thaliana
  misc_feature: MA Experiment 20001904 PARAMETER Experiment Name: At_Drought_Reproduction_P Parameter: Plant Line Value: WS
  misc_feature: MA Experiment 20001904 PARAMETER Experiment Name: At_Drought_Reproduction_P Parameter: Timepoint (day) Value: 7
  misc_feature: MA Experiment 20001904 PARAMETER Experiment Name: At_Drought_Reproduction_P Parameter: Tissue Value: Rosettes
  misc_feature: MA Experiment 20001904 PARAMETER Experiment Name: At_Drought_Reproduction_P Parameter: Treatment Value: Drought vs. No Drought
  misc_feature: MA Experiment ID: 20001905 Result: Down-regulated in Transcription
  misc_feature: MA Experiment 20001905 PARAMETER Experiment Name: At_Drought_Reproduction_P Parameter: Age (day) Value: 40
  misc_feature: MA Experiment 20001905 PARAMETER Experiment Name: At_Drought_Reproduction_P Parameter: Organism Value: A. thaliana
  misc_feature: MA Experiment 20001905 PARAMETER Experiment Name: At_Drought_Reproduction_P Parameter: Plant Line Value: WS
  misc_feature: MA Experiment 20001905 PARAMETER Experiment Name: At_Drought_Reproduction_P Parameter: Timepoint (day) Value: 10
  misc_feature: MA Experiment 20001905 PARAMETER Experiment Name: At_Drought_Reproduction_P Parameter: Tissue Value: Rosettes
  misc_feature: MA Experiment 20001905 PARAMETER Experiment Name: At_Drought_Reproduction_P Parameter: Treatment Value: Drought vs. No Drought
atccaaaaccaaaagggagagactaagaatggggtcactaggagaagaaccacaagtagcagaagactgcatgggtttgcttcaactcctaagcaacggtaccgttttgagatccgagagcattgaccttattacccaacaaatcccattcaaaaacaaccaaaccgttctcttcaaagactcaatctatcacaaacctaacaaccttcacctccgtctctacaaacccatttccgcctccaaccgtaccgctctccctgtcgtggtcttcttccacggcgggggcttctgcttcgggtcacgttcttggcctcactttcacaacttctgtctaactcttgcatcgtcccttaacgcccttgtcgtctcacctgactaccggttagcacccgaacaccgcctcccggctgcctttgaggatgctgaggcggtgcttacatggctctgggaccaagctgtttccgatggtgtgaaccactggtttgaagatggaacagacgttgactttgacagggtttttgttgttggtgattcatccggtgggaacatagctcatcaactcgctgtccggttcggatccggttcaatcgagttgacaccggttcgggtacgcggttacgttcttatgggaccgttttttggcggggaagagaggactaactccgagaatggcccctctgaagctttgctcagcttggatttgcttgacaagttttggagattgtcactaccaaacggtgcaacaagagatcaccacatggctaacccttttggaccaacgagtcctacactcgaatcaattagcttagagccaatgttggtgattgtcggcggctcagaactcttgagagatagggccaaggaatatgcatataaattaaagaagatgggaggaaaaagggtagattacattgaattcgaaaacaaggagcatggtttctactccaactatccatcttccgaggctgcggaacaagttctccgtatcattggagactttatgaacaacttgtcttaagtattttagcatttggcttgttgaaggtaattaagtgtttaattcaattaggattccatctcaataatattaagtttgcttggtg

SEQ ID NO: 100304 - protein, 338 aa, Arabidopsis thaliana
  peptide (1)..(338): Ceres Seq. ID no. 13604848
  misc_feature (85)..(130): Pfam Name: Carboxylesterase Pfam Description: Carboxylesterase
  misc_feature (10)..(338): Homolog of NCBI NO: 15240090 NR Description: expressed protein [Arabidopsis thaliana] expressed protein [Arabidopsis thaliana] gb|AAD04946.2~gene_id:F15M7.10~similar to unknown protein
  misc_feature (19)..(335): Homolog of NCBI NO: 34899932 NR Description: putative cell death associated protein [Oryza
  misc_feature (13)..(335): Homolog of NCBI NO: 34899936 NR Description: putative cell death associated protein [Oryza
  misc_feature (11)..(335): Homolog of NCBI NO: 34895938 NR Description: P0030H07.40 [Oryza sativa (japonica
  misc_feature (10)..(334): Homolog of NCBI NO: 27819508 NR Description: putative esterase [Oryza sativa (japonica
  misc_feature (69)..(336): Homolog of NCBI NO: 34904760 NR Description: similar to carboxylesterase [Oryza sativa
  misc_feature (69)..(334): Homolog of NCBI NO: 34904770 NR Description: similar to carboxylesterase [Oryza sativa
  misc_feature (60)..(335): Homolog of NCBI NO: 21618039 NR Description: unknown [Arabidopsis thaliana]
  misc_feature (60)..(335): Homolog of NCBI NO: 15237783 NR Description: expressed protein [Arabidopsis thaliana] contains similarity to unknown
  misc_feature (61)..(337): Homolog of NCBI NO: 15229371 NR Description: expressed protein [Arabidopsis thaliana]
SKTKRERLRMGSLGEEPQVAEDCMGLLQLLSNGTVLRSESIDLITQQIPFKNNQTVLFKDSIYHKPNNLHLRLYKPISASNRTALPVVVFFHGGGFCFGSRSWPHFHNFCLTLASSLNALVVSPDYRLAPEHRLPAAFEDAEAVLTWLWDQAVSDGVNHWFEDGTDVDFDRVFVVGDSSGGNIAHQLAVRFGSGSIELTPVRVRGYVLMGPFFGGEERTNSENGPSEALLSLDLLDKFWRLSLPNGATRDHHMANPFGPTSPTLESISLEPMLVIVGGSELLRDRAKEYAYKLKKMGGKRVDYIEFENKEHGFYSNYPSSEAAEQVLRIIGDFMNNLS

SEQ ID NO: 100305 - protein, 329 aa, Arabidopsis thaliana
  peptide (1)..(329): Ceres Seq. ID no. 13604849
  misc_feature (76)..(121): Pfam Name: Carboxylesterase Pfam Description: Carboxylesterase
  misc_feature (1)..(329): Homolog of NCBI NO: 15240090 NR Description: expressed protein [Arabidopsis thaliana] expressed protein [Arabidopsis thaliana] gb|AAD04946.2~gene_id:F15M7.10~similar to unknown protein
  misc_feature (10)..(326): Homolog of NCBI NO: 34899932 NR Description: putative cell death associated protein [Oryza
  misc_feature (4)..(326): Homolog of NCBI NO: 34899936 NR Description: putative cell death associated protein [Oryza
  misc_feature (2)..(326): Homolog of NCBI NO: 34895938 NR Description: P0030H07.40 [Oryza sativa (japonica
  misc_feature (1)..(325): Homolog of NCBI NO: 27819508 NR Description: putative esterase [Oryza sativa (japonica
  misc_feature (60)..(327): Homolog of NCBI NO: 34904760 NR Description: similar to carboxylesterase [Oryza sativa
  misc_feature (60)..(325): Homolog of NCBI NO: 34904770 NR Description: similar to carboxylesterase [Oryza sativa
  misc_feature (51)..(326): Homolog of NCBI NO: 21618039 NR Description: unknown [Arabidopsis thaliana]
  misc_feature (51)..(326): Homolog of NCBI NO: 15237783 NR Description: expressed protein [Arabidopsis thaliana] contains similarity to unknown
  misc_feature (52)..(328): Homolog of NCBI NO: 15229371 NR Description: expressed protein [Arabidopsis thaliana]
MGSLGEEPQVAEDCMGLLQLLSNGTVLRSESIDLITQQIPFKNNQTVLFKDSIYHKPNNLHLRLYKPISASNRTALPVVVFFHGGGFCFGSRSWPHFHNFCLTLASSLNALVVSPDYRLAPEHRLPAAFEDAEAVLTWLWDQAVSDGVNHWFEDGTDVDFDRVFVVGDSSGGNIAHQLAVRFGSGSIELTPVRVRGYVLMGPFFGGEERTNSENGPSEALLSLDLLDKFWRLSLPNGATRDHHMANPFGPTSPTLESISLEPMLVIVGGSELLRDRAKEYAYKLKKMGGKRVDYIEFENKEHGFYSNYPSSEAAEQVLRIIGDFMNNLS

SEQ ID NO: 100306 - protein, 315 aa, Arabidopsis thaliana
  peptide (1)..(315): Ceres Seq. ID no. 13604850
  misc_feature (62)..(107): Pfam Name: Carboxylesterase Pfam Description: Carboxylesterase
  misc_feature (1)..(315): Homolog of NCBI NO: 15240090 NR Description: expressed protein [Arabidopsis thaliana] expressed protein [Arabidopsis thaliana] gb|AAD04946.2~gene_id:F15M7.10~similar to unknown protein
  misc_feature (1)..(312): Homolog of NCBI NO: 34899932 NR Description: putative cell death associated protein [Oryza
  misc_feature (1)..(312): Homolog of NCBI NO: 34899936 NR Description: putative cell death associated protein [Oryza
  misc_feature (1)..(312): Homolog of NCBI NO: 34895938 NR Description: P0030H07.40 [Oryza sativa (japonica
  misc_feature (1)..(311): Homolog of NCBI NO: 27819508 NR Description: putative esterase [Oryza sativa (japonica
  misc_feature (46)..(313): Homolog of NCBI NO: 34904760 NR Description: similar to carboxylesterase [Oryza sativa
  misc_feature (46)..(311): Homolog of NCBI NO: 34904770 NR Description: similar to carboxylesterase [Oryza sativa
  misc_feature (37)..(312): Homolog of NCBI NO: 21618039 NR Description: unknown [Arabidopsis thaliana]
  misc_feature (37)..(312): Homolog of NCBI NO: 15237783 NR Description: expressed protein [Arabidopsis thaliana] contains similarity to unknown
  misc_feature (38)..(314): Homolog of NCBI NO: 15229371 NR Description: expressed protein [Arabidopsis thaliana]
MGLLQLLSNGTVLRSESIDLITQQIPFKNNQTVLFKDSIYHKPNNLHLRLYKPISASNRTALPVVVFFHGGGFCFGSRSWPHFHNFCLTLASSLNALVVSPDYRLAPEHRLPAAFEDAEAVLTWLWDQAVSDGVNHWFEDGTDVDFDRVFVVGDSSGGNIAHQLAVRFGSGSIELTPVRVRGYVLMGPFFGGEERTNSENGPSEALLSLDLLDKFWRLSLPNGATRDHHMANPFGPTSPTLESISLEPMLVIVGGSELLRDRAKEYAYKLKKMGGKRVDYIEFENKEHGFYSNYPSSEAAEQVLRIIGDFMNNLS

SEQ ID NO: 100307 - DNA, 1126 bp, Arabidopsis thaliana
  misc_feature (1)..(1126): Ceres Seq. ID no. 13604855
  misc_feature: MA Experiment ID: 108434 Result: Down-regulated in Transcription
  misc_feature: MA Experiment 108434 PARAMETER Experiment Name: At_Root_Tips_cDNA_P Parameter: Tissue Value: Root Tips
  misc_feature: MA Experiment ID: 108461 Result: Down-regulated in Transcription
  misc_feature: MA Experiment 108461 PARAMETER Experiment Name: At_Germinating_Seeds_cDNA_P Parameter: Age (day) Value: 1 vs. 0
  misc_feature: MA Experiment 108461 PARAMETER Experiment Name: At_Germinating_Seeds_cDNA_P Parameter: Tissue Value: Germinating Seeds
  misc_feature: MA Experiment ID: 108462 Result: Up-regulated in Transcription
  misc_feature: MA Experiment 108462 PARAMETER Experiment Name: At_Germinating_Seeds_cDNA_P Parameter: Age (day) Value: 2 vs. 0
  misc_feature: MA Experiment 108462 PARAMETER Experiment Name: At_Germinating_Seeds_cDNA_P Parameter: Tissue Value: Germinating Seeds
  misc_feature: MA Experiment ID: 108464 Result: Up-regulated in Transcription
  misc_feature: MA Experiment 108464 PARAMETER Experiment Name: At_Germinating_Seeds_cDNA_P Parameter: Age (day) Value: 4 vs. 0
  misc_feature: MA Experiment 108464 PARAMETER Experiment Name: At_Germinating_Seeds_cDNA_P Parameter: Tissue Value: Germinating Seeds
  misc_feature: MA Experiment ID: 108501 Result: Down-regulated in Transcription
  misc_feature: MA Experiment 108501 PARAMETER Experiment Name: At_ap2_floral_buds_cDNA_P Parameter: Plant Line Value: ap2 (Ler.)
  misc_feature: MA Experiment 108501 PARAMETER Experiment Name: At_ap2_floral_buds_cDNA_P Parameter: Tissue Value: Closed Flower
  misc_feature: MA Experiment ID: 108577 Result: Down-regulated in Transcription
  misc_feature: MA Experiment 108577 PARAMETER Experiment Name: At_42deg_Heat_cDNA_P Parameter: Temperature (deg C) Value: 42 vs. 22
  misc_feature: MA Experiment 108577 PARAMETER Experiment Name: At_42deg_Heat_cDNA_P Parameter: Timepoint (hr) Value: 6
  misc_feature: MA Experiment 108577 PARAMETER Experiment Name: At_42deg_Heat_cDNA_P Parameter: Tissue Value: Aerial
  misc_feature: MA Experiment ID: 108585 Result: Up-regulated in Transcription
  misc_feature: MA Experiment 108585 PARAMETER Experiment Name: At_5mM_NaNP_cDNA_P Parameter: Timepoint (hr) Value: 6
  misc_feature: MA Experiment 108585 PARAMETER Experiment Name: At_5mM_NaNP_cDNA_P Parameter: Tissue Value: Aerial
  misc_feature: MA Experiment 108585 PARAMETER Experiment Name: At_5mM_NaNP_cDNA_P Parameter: Treatment Value: null
  misc_feature: MA Experiment ID: 108608 Result: Up-regulated in Transcription
  misc_feature: MA Experiment 108608 PARAMETER Experiment Name: At_100uM_ABA_cDNA_P Parameter: Timepoint (hr) Value: 1
  misc_feature: MA Experiment 108608 PARAMETER Experiment Name: At_100uM_ABA_cDNA_P Parameter: Tissue Value: Aerial
  misc_feature: MA Experiment 108608 PARAMETER Experiment Name: At_100uM_ABA_cDNA_P Parameter: Treatment Value: 100uM ABA vs. No Treatment
  misc_feature: MA Experiment ID: 108668 Result: Up-regulated in Transcription
  misc_feature: MA Experiment 108668 PARAMETER Experiment Name: At_2mM_SA_cDNA_P Parameter: Plant Line Value: WS
  misc_feature: MA Experiment 108668 PARAMETER Experiment Name: At_2mM_SA_cDNA_P Parameter: Timepoint (hr) Value: 6
  misc_feature: MA Experiment 108668 PARAMETER Experiment Name: At_2mM_SA_cDNA_P Parameter: Treatment Value: 2mM SA vs. No Treatment
  misc_feature: MA Experiment ID: 20000069 Result: Up-regulated in Transcription
  misc_feature: MA Experiment 20000069 PARAMETER Experiment Name: At_100uM_ABA_Mutants_cDNA_P Parameter: Plant Line Value: CS23
  misc_feature: MA Experiment 20000069 PARAMETER Experiment Name: At_100uM_ABA_Mutants_cDNA_P Parameter: Timepoint (hr) Value: 6
  misc_feature: MA Experiment 20000069 PARAMETER Experiment Name: At_100uM_ABA_Mutants_cDNA_P Parameter: Tissue Value: Aerial
  misc_feature: MA Experiment 20000069 PARAMETER Experiment Name: At_100uM_ABA_Mutants_cDNA_P Parameter: Treatment Value: 100uM ABA vs. No Treatment
  misc_feature: MA Experiment ID: 20000089 Result: Up-regulated in Transcription
  misc_feature: MA Experiment ID: 20000179 Result: Down-regulated in Transcription
  misc_feature: MA Experiment 20000179 PARAMETER Experiment Name: At_Germinating_Seeds_P Parameter: Age (hr) Value: 6 vs. 0
  misc_feature: MA Experiment 20000179 PARAMETER Experiment Name: At_Germinating_Seeds_P Parameter: Tissue Value: Germinating Seeds
  misc_feature: MA Experiment ID: 20000180 Result: Down-regulated in Transcription
  misc_feature: MA Experiment 20000180 PARAMETER Experiment Name: At_Germinating_Seeds_P Parameter: Age (hr) Value: 24 vs. 0
  misc_feature: MA Experiment 20000180 PARAMETER Experiment Name: At_Germinating_Seeds_P Parameter: Tissue Value: Germinating Seeds
  misc_feature: MA Experiment ID: 20000185 Result: Up-regulated in Transcription
  misc_feature: MA Experiment 20000185 PARAMETER Experiment Name: At_Roots__P Parameter: Age (day) Value: 7 vs. 21
  misc_feature: MA Experiment 20000185 PARAMETER Experiment Name: At_Roots__P Parameter: Organism Value: A. thaliana
  misc_feature: MA Experiment 20000185 PARAMETER Experiment Name: At_Roots__P Parameter: Tissue Value: Roots vs. Whole Plant
  misc_feature: MA Experiment ID: 20000235 Result: Down-regulated in Transcription
  misc_feature: MA Experiment 20000235 PARAMETER Experiment Name: At_Siliques_P Parameter: Age (day) Value: 21
  misc_feature: MA Experiment 20000235 PARAMETER Experiment Name: At_Siliques_P Parameter: Organism Value: A. thaliana
  misc_feature: MA Experiment 20000235 PARAMETER Experiment Name: At_Siliques_P Parameter: Plant Line Value: WS
  misc_feature: MA Experiment 20000235 PARAMETER Experiment Name: At_Siliques_P Parameter: Tissue Value: 5-10mm Siliques vs. Whole Plant
  misc_feature: MA Experiment ID: 20000439 Result: Up-regulated in Transcription
  misc_feature: MA Experiment 20000439 PARAMETER Experiment Name: At_Roots__P Parameter: Age (day) Value: 14 vs. 21
  misc_feature: MA Experiment 20000439 PARAMETER Experiment Name: At_Roots__P Parameter: Organism Value: A. thaliana
  misc_feature: MA Experiment 20000439 PARAMETER Experiment Name: At_Roots__P Parameter: Tissue Value: Roots vs. Whole Plant
  misc_feature: MA Experiment ID: 20000445 Result: Up-regulated in Transcription
  misc_feature: MA Experiment 20000445 PARAMETER Experiment Name: At_100uM_NAA__P Parameter: Age (day) Value: 14
  misc_feature: MA Experiment 20000445 PARAMETER Experiment Name: At_100uM_NAA__P Parameter: Organism Value: A. thaliana
  misc_feature: MA Experiment 20000445 PARAMETER Experiment Name: At_100uM_NAA__P Parameter: Plant Line Value: WS
  misc_feature: MA Experiment 20000445 PARAMETER Experiment Name: At_100uM_NAA__P Parameter: Timepoint (hr) Value: 6
  misc_feature: MA Experiment 20000445 PARAMETER Experiment Name: At_100uM_NAA__P Parameter: Tissue Value: Aerial
  misc_feature: MA Experiment 20000445 PARAMETER Experiment Name: At_100uM_NAA__P Parameter: Treatment Value: 100uM NAA vs. No Treatment
  misc_feature: MA Experiment ID: 20000451 Result: Up-regulated in Transcription
  misc_feature: MA Experiment 20000451 PARAMETER Experiment Name: At_CS6879_Shoots-Roots_P Parameter: Age (day) Value: 14
  misc_feature: MA Experiment 20000451 PARAMETER Experiment Name: At_CS6879_Shoots-Roots_P Parameter: Organism Value: A. thaliana
  misc_feature: MA Experiment 20000451 PARAMETER Experiment Name: At_CS6879_Shoots-Roots_P Parameter: Plant Line Value: CS6879 vs. WS
  misc_feature: MA Experiment 20000451 PARAMETER Experiment Name: At_CS6879_Shoots-Roots_P Parameter: Tissue Value: Roots
  misc_feature: MA Experiment ID: 20001248 Result: Up-regulated in Transcription
  misc_feature: MA Experiment 20001248 PARAMETER Experiment Name: At_Far-red-induction_P Parameter: Age (day) Value: 7
  misc_feature: MA Experiment 20001248 PARAMETER Experiment Name: At_Far-red-induction_P Parameter: Light Value: Far-red vs. White
  misc_feature: MA Experiment 20001248 PARAMETER Experiment Name: At_Far-red-induction_P Parameter: Organism Value: A. thaliana
  misc_feature: MA Experiment 20001248 PARAMETER Experiment Name: At_Far-red-induction_P Parameter: Plant Line Value: Columbia
  misc_feature: MA Experiment 20001248 PARAMETER Experiment Name: At_Far-red-induction_P Parameter: Timepoint (hr) Value: 4
  misc_feature: MA Experiment 20001248 PARAMETER Experiment Name: At_Far-red-induction_P Parameter: Tissue Value: Whole Plant
  misc_feature: MA Experiment ID: 20001904 Result: Down-regulated in Transcription
  misc_feature: MA Experiment 20001904 PARAMETER Experiment Name: At_Drought_Reproduction_P Parameter: Age (day) Value: 37
  misc_feature: MA Experiment 20001904 PARAMETER Experiment Name: At_Drought_Reproduction_P Parameter: Organism Value: A. thaliana
  misc_feature: MA Experiment 20001904 PARAMETER Experiment Name: At_Drought_Reproduction_P Parameter: Plant Line Value: WS
  misc_feature: MA Experiment 20001904 PARAMETER Experiment Name: At_Drought_Reproduction_P Parameter: Timepoint (day) Value: 7
  misc_feature: MA Experiment 20001904 PARAMETER Experiment Name: At_Drought_Reproduction_P Parameter: Tissue Value: Rosettes
  misc_feature: MA Experiment 20001904 PARAMETER Experiment Name: At_Drought_Reproduction_P Parameter: Treatment Value: Drought vs. No Drought
  misc_feature: MA Experiment ID: 20001906 Result: Down-regulated in Transcription
  misc_feature: MA Experiment 20001906 PARAMETER Experiment Name: At_Drought_Reproduction_P Parameter: Age (day) Value: 35
  misc_feature: MA Experiment 20001906 PARAMETER Experiment Name: At_Drought_Reproduction_P Parameter: Organism Value: A. thaliana
  misc_feature: MA Experiment 20001906 PARAMETER Experiment Name: At_Drought_Reproduction_P Parameter: Plant Line Value: WS
  misc_feature: MA Experiment 20001906 PARAMETER Experiment Name: At_Drought_Reproduction_P Parameter: Timepoint (day) Value: 5
  misc_feature: MA Experiment 20001906 PARAMETER Experiment Name: At_Drought_Reproduction_P Parameter: Tissue Value: Siliques
  misc_feature: MA Experiment 20001906 PARAMETER Experiment Name: At_Drought_Reproduction_P Parameter: Treatment Value: Drought vs. No Drought
  misc_feature: MA Experiment ID: 20001907 Result: Down-regulated in Transcription
  misc_feature: MA Experiment 20001907 PARAMETER Experiment Name: At_Drought_Reproduction_P Parameter: Age (day) Value: 37
  misc_feature: MA Experiment 20001907 PARAMETER Experiment Name: At_Drought_Reproduction_P Parameter: Organism Value: A. thaliana
  misc_feature: MA Experiment 20001907 PARAMETER Experiment Name: At_Drought_Reproduction_P Parameter: Plant Line Value: WS
  misc_feature: MA Experiment 20001907 PARAMETER Experiment Name: At_Drought_Reproduction_P Parameter: Timepoint (day) Value: 7
  misc_feature: MA Experiment 20001907 PARAMETER Experiment Name: At_Drought_Reproduction_P Parameter: Tissue Value: Siliques
  misc_feature: MA Experiment 20001907 PARAMETER Experiment Name: At_Drought_Reproduction_P Parameter: Treatment Value: Drought vs. No Drought
  misc_feature: MA Experiment ID: 20001908 Result: Down-regulated in Transcription
  misc_feature: MA Experiment 20001908 PARAMETER Experiment Name: At_Drought_Reproduction_P Parameter: Age (day) Value: 40
  misc_feature: MA Experiment 20001908 PARAMETER Experiment Name: At_Drought_Reproduction_P Parameter: Organism Value: A. thaliana
  misc_feature: MA Experiment 20001908 PARAMETER Experiment Name: At_Drought_Reproduction_P Parameter: Plant Line Value: WS
  misc_feature: MA Experiment 20001908 PARAMETER Experiment Name: At_Drought_Reproduction_P Parameter: Timepoint (day) Value: 10
  misc_feature: MA Experiment 20001908 PARAMETER Experiment Name: At_Drought_Reproduction_P Parameter: Tissue Value: Siliques
  misc_feature: MA Experiment 20001908 PARAMETER Experiment Name: At_Drought_Reproduction_P Parameter: Treatment Value: Drought vs. No Drought
  misc_feature: MA Experiment ID: 20001911 Result: Down-regulated in Transcription
  misc_feature: MA Experiment 20001911 PARAMETER Experiment Name: At_Drought_Reproduction_P Parameter: Age (day) Value: 40
  misc_feature: MA Experiment 20001911 PARAMETER Experiment Name: At_Drought_Reproduction_P Parameter: Organism Value: A. thaliana
  misc_feature: MA Experiment 20001911 PARAMETER Experiment Name: At_Drought_Reproduction_P Parameter: Plant Line Value: WS
  misc_feature: MA Experiment 20001911 PARAMETER Experiment Name: At_Drought_Reproduction_P Parameter: Timepoint (day) Value: 10
  misc_feature: MA Experiment 20001911 PARAMETER Experiment Name: At_Drought_Reproduction_P Parameter: Tissue Value: Flowers
  misc_feature: MA Experiment 20001911 PARAMETER Experiment Name: At_Drought_Reproduction_P Parameter: Treatment Value: Drought vs. No Drought
catcaaaattcaaaaccaacaccatggataagacagcgacattgtgtctcttgttcttgttcacattcctcacgacctgtttgtctaaagatctctgtaaccaaaatgacaaaaacaccctcctcaagatcaagaaatctctaaacaacccttatcacctcgcttcatgggaccctcaaaccgactgttgctcctggtactgccttgagtgcggcgacgccaccgttaaccaccgtgttaccgccttaaccatattctccggccagatctccggtcagatcccggctgaagtcggtgacttgccgtatcttgagacccttgtcttccgcaaactctctaacctcaccggtacaatccaacccaccatcgccaaactcaagaacctccgaatgctcaggctcagctggacgaatctgacaggtccaattcctgactttataagtcagctcaagaatctcgagttcttagaactttccttcaatgatctctctggttccattccaagttctctctctacgttacctaaaatcttggctcttgaacttagcaggaacaaacttacaggttccataccagagtcatttgggtcgtttccaggaacagtccctgaccttcgcctatcacataaccagctctccggtccaatacccaaatcattaggcaacatcgactttaaccggatcgatttatcccgcaacaagctccaaggtgatgcttcgatgttgtttggttccaacaaaacaacctggtctattgacttatcaagaaacatgttccagttcgatatctcaaaggttgatatccctaaaacacttggtatcttggacttgaaccacaatgggatcactgggaatattccggtgcagtggactgaagctcctcttcagttcttcaatgttagctacaacaaactgtgtggacacatcccaactggagggaaacttcagacatttgattcttattcctattttcacaacaagtgtttgtgtggtgctcctcttgaaatttgcaagtaaaccaagcttatctctaggattacgaaaaaatatatttgagtcaataatatagacaaatatgtaatgttattcggattgattaataaaacatgaaccaaacctctcatttg

SEQ ID NO: 100308 - protein, 337 aa, Arabidopsis thaliana
  peptide (1)..(337): Ceres Seq. ID no. 13604856
  misc_feature (127)..(150): Pfam Name: Leucine Rich Repeat Pfam Description: Leucine Rich Repeat
  misc_feature (8)..(337): Homolog of NCBI NO: 15240182 NR Description: polygalacturonase inhibiting protein (PGIP1) thaliana] >gi|21263838|sp|Q9M5J9|PGI1_ARATH Polygalacturonase
  misc_feature (8)..(337): Homolog of NCBI NO: 21593869 NR Description: polygalacturonase inhibiting protein 1
  misc_feature (8)..(337): Homolog of NCBI NO: 26094811 NR Description: polygalacturonase inhibitor protein [Brassica >gi|26094814|gb|AAM94870.2| polygalacturonase inhibitor protein
  misc_feature (8)..(337): Homolog of NCBI NO: 15240183 NR Description: polygalacturonase inhibiting protein (PGIP2) thaliana] >gi|21263837|sp|Q9M5J8|PGI2_ARATH Polygalacturonase
  misc_feature (13)..(337): Homolog of NCBI NO: 7800201 NR Description: polygalacturonase inhibiting protein 2; PGIP2 thaliana] >gi|21593044|gb|AAM64993.1| polygalacturonase
  misc_feature (10)..(337): Homolog of NCBI NO: 22324851 NR Description: polygalacturonase inhibitory protein [Brassica
  misc_feature (8)..(336): Homolog of NCBI NO: 22256016 NR Description: polygalacturonase inhibitor protein [Brassica >gi|22256018|gb|AAM94868.1| polygalacturonase inhibitor protein
  misc_feature (16)..(337): Homolog of NCBI NO: 18148925 NR Description: polygalacturonase-inhibitor protein [Citrus sp.
  misc_feature (16)..(337): Homolog of NCBI NO: 18148376 NR Description: polygalacturonase-inhibitor protein [Citrus sp.
  misc_feature (16)..(337): Homolog of NCBI NO: 18148923 NR Description: polygalacturonase-inhibitor protein [Citrus sp.
SKFKTNTMDKTATLCLLFLFTFLTTCLSKDLCNQNDKNTLLKIKKSLNNPYHLASWDPQTDCCSWYCLECGDATVNHRVTALTIFSGQISGQIPAEVGDLPYLETLVFRKLSNLTGTIQPTIAKLKNLRMLRLSWTNLTGPIPDFISQLKNLEFLELSFNDLSGSIPSSLSTLPKILALELSRNKLTGSIPESFGSFPGTVPDLRLSHNQLSGPIPKSLGNIDFNRIDLSRNKLQGDASMLFGSNKTTWSIDLSRNMFQFDISKVDIPKTLGILDLNHNGITGNIPVQWTEAPLQFFNVSYNKLCGHIPTGGKLQTFDSYSYFHNKCLCGAPLEICK

SEQ ID NO: 100309 - protein, 330 aa, Arabidopsis thaliana
  peptide (1)..(330): Ceres Seq. ID no. 13604857
  misc_feature (120)..(143): Pfam Name: Leucine Rich Repeat Pfam Description: Leucine Rich Repeat
  misc_feature (1)..(330): Homolog of NCBI NO: 15240182 NR Description: polygalacturonase inhibiting protein (PGIP1) thaliana] >gi|21263838|sp|Q9M5J9|PGI1_ARATH Polygalacturonase
  misc_feature (1)..(330): Homolog of NCBI NO: 21593869 NR Description: polygalacturonase inhibiting protein 1
  misc_feature (1)..(330): Homolog of NCBI NO: 26094811 NR Description: polygalacturonase inhibitor protein [Brassica >gi|26094814|gb|AAM94870.2| polygalacturonase inhibitor protein
  misc_feature (1)..(330): Homolog of NCBI NO: 15240183 NR Description: polygalacturonase inhibiting protein (PGIP2) thaliana] >gi|21263837|sp|Q9M5J8|PGI2_ARATH Polygalacturonase
  misc_feature (6)..(330): Homolog of NCBI NO: 7800201 NR Description: polygalacturonase inhibiting protein 2; PGIP2 thaliana] >gi|21593044|gb|AAM64993.1| polygalacturonase
  misc_feature (3)..(330): Homolog of NCBI NO: 22324851 NR Description: polygalacturonase inhibitory protein [Brassica
  misc_feature (1)..(329): Homolog of NCBI NO: 22256016 NR Description: polygalacturonase inhibitor protein [Brassica >gi|22256018|gb|AAM94868.1| polygalacturonase inhibitor protein
  misc_feature (9)..(330): Homolog of NCBI NO: 18148925 NR Description: polygalacturonase-inhibitor protein [Citrus sp.
  misc_feature (9)..(330): Homolog of NCBI NO: 18148376 NR Description: polygalacturonase-inhibitor protein [Citrus sp.
  misc_feature (9)..(330): Homolog of NCBI NO: 18148923 NR Description: polygalacturonase-inhibitor protein [Citrus sp.
MDKTATLCLLFLFTFLTTCLSKDLCNQNDKNTLLKIKKSLNNPYHLASWDPQTDCCSWYCLECGDATVNHRVTALTIFSGQISGQIPAEVGDLPYLETLVFRKLSNLTGTIQPTIAKLKNLRMLRLSWTNLTGPIPDFISQLKNLEFLELSFNDLSGSIPSSLSTLPKILALELSRNKLTGSIPESFGSFPGTVPDLRLSHNQLSGPIPKSLGNIDFNRIDLSRNKLQGDASMLFGSNKTTWSIDLSRNMFQFDISKVDIPKTLGILDLNHNGITGNIPVQWTEAPLQFFNVSYNKLCGHIPTGGKLQTFDSYSYFHNKCLCGAPLEICK

SEQ ID NO: 100310 - protein, 208 aa, Arabidopsis thaliana; identical to SEQ ID NO: 27082
  peptide (1)..(208): Ceres Seq. ID no. 13604858
  misc_feature (1)..(21): Pfam Name: Leucine Rich Repeat Pfam Description: Leucine Rich Repeat
  misc_feature (1)..(208): Homolog of NCBI NO: 15240182 NR Description: polygalacturonase inhibiting protein (PGIP1) thaliana] >gi|21263838|sp|Q9M5J9|PGI1_ARATH Polygalacturonase
  misc_feature (1)..(208): Homolog of NCBI NO: 21593869 NR Description: polygalacturonase inhibiting protein 1
  misc_feature (1)..(208): Homolog of NCBI NO: 26094811 NR Description: polygalacturonase inhibitor protein [Brassica >gi|26094814|gb|AAM94870.2| polygalacturonase inhibitor protein
  misc_feature (1)..(208): Homolog of NCBI NO: 15240183 NR Description: polygalacturonase inhibiting protein (PGIP2) thaliana] >gi|21263837|sp|Q9M5J8|PGI2_ARATH Polygalacturonase
  misc_feature (1)..(208): Homolog of NCBI NO: 7800201 NR Description: polygalacturonase inhibiting protein 2; PGIP2 thaliana] >gi|21593044|gb|AAM64993.1| polygalacturonase
  misc_feature (1)..(208): Homolog of NCBI NO: 22324851 NR Description: polygalacturonase inhibitory protein [Brassica
  misc_feature (1)..(207): Homolog of NCBI NO: 22256016 NR Description: polygalacturonase inhibitor protein [Brassica >gi|22256018|gb|AAM94868.1| polygalacturonase inhibitor protein
  misc_feature (1)..(208): Homolog of NCBI NO: 18148925 NR Description: polygalacturonase-inhibitor protein [Citrus sp.
  misc_feature (1)..(208): Homolog of NCBI NO: 18148376 NR Description: polygalacturonase-inhibitor protein [Citrus sp.
  misc_feature (1)..(208): Homolog of NCBI NO: 18148923 NR Description: polygalacturonase-inhibitor protein [Citrus sp.

SEQ ID NO: 100311 - DNA, 1549 bp, Arabidopsis thaliana
  misc_feature (1)..(1549): Ceres Seq. ID no. 13604859
  misc_feature: MA Experiment ID: 20000173 Result: Up-regulated in Transcription
  misc_feature: MA Experiment 20000173 PARAMETER Experiment Name: At_42deg_Heat_P Parameter: Age (day) Value: 14
  misc_feature: MA Experiment 20000173 PARAMETER Experiment Name: At_42deg_Heat_P Parameter: Organism Value: A. thaliana
  misc_feature: MA Experiment 20000173 PARAMETER Experiment Name: At_42deg_Heat_P Parameter: Plant Line Value: WS
  misc_feature: MA Experiment 20000173 PARAMETER Experiment Name: At_42deg_Heat_P Parameter: Temperature (deg C) Value: 42 vs. 22
  misc_feature: MA Experiment 20000173 PARAMETER Experiment Name: At_42deg_Heat_P Parameter: Timepoint (hr) Value: 6
  misc_feature: MA Experiment 20000173 PARAMETER Experiment Name: At_42deg_Heat_P Parameter: Tissue Value: Aerial
  misc_feature: MA Experiment ID: 20000182 Result: Up-regulated in Transcription
  misc_feature: MA Experiment 20000182 PARAMETER Experiment Name: At_2mM_SA_P Parameter: Age (day) Value: 14
  misc_feature: MA Experiment 20000182 PARAMETER Experiment Name: At_2mM_SA_P Parameter: Organism Value: A. thaliana
  misc_feature: MA Experiment 20000182 PARAMETER Experiment Name: At_2mM_SA_P Parameter: Plant Line Value: WS
  misc_feature: MA Experiment 20000182 PARAMETER Experiment Name: At_2mM_SA_P Parameter: Timepoint (hr) Value: 6
  misc_feature: MA Experiment 20000182 PARAMETER Experiment Name: At_2mM_SA_P Parameter: Tissue Value: Aerial
  misc_feature: MA Experiment 20000182 PARAMETER Experiment Name: At_2mM_SA_P Parameter: Treatment Value: 2mM SA vs. No Treatment
  misc_feature: MA Experiment ID: 20000184 Result: Down-regulated in Transcription
  misc_feature: MA Experiment 20000184 PARAMETER Experiment Name: At_Shoots__P Parameter: Age (day) Value: 7
  misc_feature: MA Experiment 20000184 PARAMETER Experiment Name: At_Shoots__P Parameter: Tissue Value: Shoots vs. Whole Plant
  misc_feature: MA Experiment ID: 20000439 Result: Up-regulated in Transcription
  misc_feature: MA Experiment 20000439 PARAMETER Experiment Name: At_Roots__P Parameter: Age (day) Value: 14 vs. 21
  misc_feature: MA Experiment 20000439 PARAMETER Experiment Name: At_Roots__P Parameter: Organism Value: A. thaliana
  misc_feature: MA Experiment 20000439 PARAMETER Experiment Name: At_Roots__P Parameter: Tissue Value: Roots vs. Whole Plant
ttgcggcaaaataaaaaaaaagaagatcgtacaactaaaaatacctcaaagaaggaagatacaaaagtagtaacctttgttggtgattgatactatatctgttgtgggttttagacaaagaccacgtctttgcagttgtagattggaattttccggatctttctctaaatcgctttttctccgagcaacttttgtttggggttaagctcaaagaatccgttcttttcagtctttactccatctagggtaccacgattggatcggtttttatctgatgatttagtaacagagattttgaagaaaaagaaaaatgggagatactagtccaagaacatcagtctcaacagatggagacactgatcataataacctaatgttcgatgaagggcatttgggtatcggtgcttctgattctagtgaccgttcaaagagtaaaatggatcaaaagacgcttcgtaggctcgctcaaaaccgtgaggctgcaaggaaaagcagattgaggaagaaagcatatgttcagcagctagagaacagtcgattgaagctaacacaacttgagcaggagctacaaagagcacggcaacagggtgtctttatctcaagctctggagaccaagcccattctaccgctggagatggggcaatggcatttgatgtagaatacagacgatggcaggaagataaaaacagacagatgaaggagctgagttctgctatagattctcacgcgactgattctgagcttcggataattgtagatggagtaatagctcactatgaggagctttacaggataaaaggcaacgcagctaagagtgatgtcttccatttattatcagggatgtggaaaaccccagctgagagatgtttcttgtggctcggcggtttccgttcatcagaacttctcaagcttatagcgagtcagttggagcccttgacagaacaacaatcgctagacataaataacttgcaacagtcttctcagcaagcagaagatgctttgtctcaagggatggacaacttacagcaatcactcgctgatactttatcgagtgggactctcggttcaagttcatcagggaatgtagctagctacatgggtcagatggccatggcgatggggaagttaggtacccttgaaggatttatccgccaggctgataacttaaggctacaaacatatcaacagatggtgagactattaacaacccgacaatcggctcgtgctctccttgcagtacacaattatacattgcggttacgtgctcttagctctctatggcttgccagaccaagagagtgaaccatgactctattatacttcaacgaaggtccagaaaatttgagattcttagcataagatttgacgactttagacacgtagctcgtatacaagattatgattatactgttttgtgttgtaatgtttgtgtgtaatgaatgtatcttgaaatcataaaagtcccgtaacatttgaaaagcattaggatactaaagagaagcagtgactttggttttgtacaatatcattacaaattataaacacagt

SEQ ID NO: 100312 - protein, 330 aa, Arabidopsis thaliana
  peptide (1)..(330): Ceres Seq. ID no. 13604860
  misc_feature (42)..(105): Pfam Name: bZIP transcription factor Pfam Description: bZIP transcription factor
  misc_feature (1)..(330): Homolog of NCBI NO: 15240217 NR Description: bZIP transcription factor, OBF5 [Arabidopsis
  misc_feature (7)..(330): Homolog of NCBI NO: 1076423 NR Description: transcription factor OBF5 - Arabidopsis thaliana
  misc_feature (1)..(330): Homolog of NCBI NO: 30682117 NR Description: bZIP transcription factor, TGA6 [Arabidopsis
  misc_feature (1)..(330): Homolog of NCBI NO: 15240216 NR Description: bZIP transcription factor, HBP-1b homolog
  misc_feature (15)..(330): Homolog of NCBI NO: 15795146 NR Description: leucine zipper transcription factor HBP-1b
  misc_feature (15)..(330): Homolog of NCBI NO: 903688 NR Description: leucine zipper
  misc_feature (1)..(330): Homolog of NCBI NO: 15148924 NR Description: TGA-type basic leucine zipper protein TGA2.1
  misc_feature (1)..(330): Homolog of NCBI NO: 17025924 NR Description: bZIP transcription factor [Oryza sativa]
  misc_feature (1)..(330): Homolog of NCBI NO: 34909110 NR Description: putative transcription factor HBP-1b [Oryza
  misc_feature (1)..(330): Homolog of NCBI NO: 6288682 NR Description: bZIP transcription factor [Nicotiana tabacum]
MGDTSPRTSVSTDGDTDHNNLMFDEGHLGIGASDSSDRSKSKMDQKTLRRLAQNREAARKSRLRKKAYVQQLENSRLKLTQLEQELQRARQQGVFISSSGDQAHSTAGDGAMAFDVEYRRWQEDKNRQMKELSSAIDSHATDSELRIIVDGVIAHYEELYRIKGNAAKSDVFHLLSGMWKTPAERCFLWLGGFRSSELLKLIASQLEPLTEQQSLDINNLQQSSQQAEDALSQGMDNLQQSLADTLSSGTLGSSSSGNVASYMGQMAMAMGKLGTLEGFIRQADNLRLQTYQQMVRLLTTRQSARALLAVHNYTLRLRALSSLWLARPRE

SEQ ID NO: 100313 - protein, 309 aa, Arabidopsis thaliana
  peptide (1)..(309): Ceres Seq. ID no. 13604861
  misc_feature (21)..(84): Pfam Name: bZIP transcription factor Pfam Description: bZIP transcription factor
  misc_feature (1)..(309): Homolog of NCBI NO: 15240217 NR Description: bZIP transcription factor, OBF5 [Arabidopsis
  misc_feature (1)..(309): Homolog of NCBI NO: 1076423 NR Description: transcription factor OBF5 - Arabidopsis thaliana
  misc_feature (1)..(309): Homolog of NCBI NO: 30682117 NR Description: bZIP transcription factor, TGA6 [Arabidopsis
  misc_feature (1)..(309): Homolog of NCBI NO: 15240216 NR Description: bZIP transcription factor, HBP-1b homolog
  misc_feature (1)..(309): Homolog of NCBI NO: 15795146 NR Description: leucine zipper transcription factor HBP-1b
  misc_feature (1)..(309): Homolog of NCBI NO: 903688 NR Description: leucine zipper
  misc_feature (1)..(309): Homolog of NCBI NO: 15148924 NR Description: TGA-type basic leucine zipper protein TGA2.1
  misc_feature (1)..(309): Homolog of NCBI NO: 17025924 NR Description: bZIP transcription factor [Oryza sativa]
  misc_feature (1)..(309): Homolog of NCBI NO: 34909110 NR Description: putative transcription factor HBP-1b [Oryza
  misc_feature (1)..(309): Homolog of NCBI NO: 6288682 NR Description: bZIP transcription factor [Nicotiana tabacum]
MFDEGHLGIGASDSSDRSKSKMDQKTLRRLAQNREAARKSRLRKKAYVQQLENSRLKLTQLEQELQRARQQGVFISSSGDQAHSTAGDGAMAFDVEYRRWQEDKNRQMKELSSAIDSHATDSELRIIVDGVIAHYEELYRIKGNAAKSDVFHLLSGMWKTPAERCFLWLGGFRSSELLKLIASQLEPLTEQQSLDINNLQQSSQQAEDALSQGMDNLQQSLADTLSSGTLGSSSSGNVASYMGQMAMAMGKLGTLEGFIRQADNLRLQTYQQMVRLLTTRQSARALLAVHNYTLRLRALSSLWLARPRE

SEQ ID NO: 100314 - protein, 288 aa, Arabidopsis thaliana
  peptide (1)..(288): Ceres Seq. ID no. 13604862
  misc_feature (1)..(63): Pfam Name: bZIP transcription factor Pfam Description: bZIP transcription factor
  misc_feature (1)..(288): Homolog of NCBI NO: 15240217 NR Description: bZIP transcription factor, OBF5 [Arabidopsis
  misc_feature (1)..(288): Homolog of NCBI NO: 1076423 NR Description: transcription factor OBF5 - Arabidopsis thaliana
  misc_feature (1)..(288): Homolog of NCBI NO: 30682117 NR Description: bZIP transcription factor, TGA6 [Arabidopsis
  misc_feature (1)..(288): Homolog of NCBI NO: 15240216 NR Description: bZIP transcription factor, HBP-1b homolog
  misc_feature (1)..(288): Homolog of NCBI NO: 15795146 NR Description: leucine zipper transcription factor HBP-1b
  misc_feature (1)..(288): Homolog of NCBI NO: 903688 NR Description: leucine zipper
  misc_feature (1)..(288): Homolog of NCBI NO: 15148924 NR Description: TGA-type basic leucine zipper protein TGA2.1
  misc_feature (1)..(288): Homolog of NCBI NO: 17025924 NR Description: bZIP transcription factor [Oryza sativa]
  misc_feature (1)..(288): Homolog of NCBI NO: 34909110 NR Description: putative transcription factor HBP-1b [Oryza
  misc_feature (1)..(288): Homolog of NCBI NO: 6288682 NR Description: bZIP transcription factor [Nicotiana tabacum]
MDQKTLRRLAQNREAARKSRLRKKAYVQQLENSRLKLTQLEQELQRARQQGVFISSSGDQAHSTAGDGAMAFDVEYRRWQEDKNRQMKELSSAIDSHATDSELRIIVDGVIAHYEELYRIKGNAAKSDVFHLLSGMWKTPAERCFLWLGGFRSSELLKLIASQLEPLTEQQSLDINNLQQSSQQAEDALSQGMDNLQQSLADTLSSGTLGSSSSGNVASYMGQMAMAMGKLGTLEGFIRQADNLRLQTYQQMVRLLTTRQSARALLAVHNYTLRLRALSSLWLARPRE

SEQ ID NO: 100315 - DNA, 1500 bp, Arabidopsis thaliana
  misc_feature (1)..(1500): Ceres Seq. ID no. 13604867
  misc_feature: MA Experiment ID: 20000180 Result: Down-regulated in Transcription
  misc_feature: MA Experiment 20000180 PARAMETER Experiment Name: At_Germinating_Seeds_P Parameter: Age (hr) Value: 24 vs. 0
  misc_feature: MA Experiment 20000180 PARAMETER Experiment Name: At_Germinating_Seeds_P Parameter: Tissue Value: Germinating Seeds
  misc_feature: MA Experiment ID: 20000264 Result: Down-regulated in Transcription
  misc_feature: MA Experiment 20000264 PARAMETER Experiment Name: At_Open_Flower_P Parameter: Age (day) Value: 21
  misc_feature: MA Experiment 20000264 PARAMETER Experiment Name: At_Open_Flower_P Parameter: Plant Line Value: WS
  misc_feature: MA Experiment 20000264 PARAMETER Experiment Name: At_Open_Flower_P Parameter: Tissue Value: Open Flower vs. Whole Plant
  misc_feature: MA Experiment ID: 20000286 Result: Down-regulated in Transcription
  misc_feature: MA Experiment 20000286 PARAMETER Experiment Name: At_Open_Flower_P Parameter: Age (day) Value: 21
  misc_feature: MA Experiment 20000286 PARAMETER Experiment Name: At_Open_Flower_P Parameter: Plant Line Value: WS
  misc_feature: MA Experiment 20000286 PARAMETER Experiment Name: At_Open_Flower_P Parameter: Tissue Value: Half Open vs. Whole Plant
  misc_feature: MA Experiment ID: 20000438 Result: Down-regulated in Transcription
  misc_feature: MA Experiment 20000438 PARAMETER Experiment Name: At_Shoots__P Parameter: Age (day) Value: 14
  misc_feature: MA Experiment 20000438 PARAMETER Experiment Name: At_Shoots__P Parameter: Tissue Value: Shoots vs. Whole Plant
  misc_feature: MA Experiment ID: 20001451 Result: Up-regulated in Transcription
  misc_feature: MA Experiment 20001451 PARAMETER Experiment Name: At_Far-red-induction_P Parameter: Age (day) Value: 7
  misc_feature: MA Experiment 20001451 PARAMETER Experiment Name: At_Far-red-induction_P Parameter: Light Value: Far-red vs. White
  misc_feature: MA Experiment 20001451 PARAMETER Experiment Name: At_Far-red-induction_P Parameter: Organism Value: A. thaliana
  misc_feature: MA Experiment 20001451 PARAMETER Experiment Name: At_Far-red-induction_P Parameter: Plant Line Value: Columbia
  misc_feature: MA Experiment 20001451 PARAMETER Experiment Name: At_Far-red-induction_P Parameter: Timepoint (hr) Value: 24
  misc_feature: MA Experiment 20001451 PARAMETER Experiment Name: At_Far-red-induction_P Parameter: Tissue Value: Whole Plant
  misc_feature: MA Experiment ID: 20001554 Result: Down-regulated in Transcription
  misc_feature: MA Experiment 20001554 PARAMETER Experiment Name: At_Drought_Soil_Dry_P Parameter: Age (day) Value: 21
  misc_feature: MA Experiment 20001554 PARAMETER Experiment Name: At_Drought_Soil_Dry_P Parameter: Organism Value: A. thaliana
  misc_feature: MA Experiment 20001554 PARAMETER Experiment Name: At_Drought_Soil_Dry_P Parameter: Plant Line Value: WS
  misc_feature: MA Experiment 20001554 PARAMETER Experiment Name: At_Drought_Soil_Dry_P Parameter: Post Timepoint (hr) Value: None
  misc_feature: MA Experiment 20001554 PARAMETER Experiment Name: At_Drought_Soil_Dry_P Parameter: Post-Treatment Value: None
  misc_feature: MA Experiment 20001554 PARAMETER Experiment Name: At_Drought_Soil_Dry_P Parameter: Timepoint (day) Value: 7
  misc_feature: MA Experiment 20001554 PARAMETER Experiment Name: At_Drought_Soil_Dry_P Parameter: Treatment Value: Drought vs. No Drought
  misc_feature: MA Experiment ID: 20001557 Result: Down-regulated in Transcription
  misc_feature: MA Experiment 20001557 PARAMETER Experiment Name: At_Drought_Soil_Dry_P Parameter: Age (day) Value: 27
  misc_feature: MA Experiment 20001557 PARAMETER Experiment Name: At_Drought_Soil_Dry_P Parameter: Organism Value: A. thaliana
  misc_feature: MA Experiment 20001557 PARAMETER Experiment Name: At_Drought_Soil_Dry_P Parameter: Plant Line Value: WS
  misc_feature: MA Experiment 20001557 PARAMETER Experiment Name: At_Drought_Soil_Dry_P Parameter: Post Timepoint (hr) Value: 3
  misc_feature: MA Experiment 20001557 PARAMETER Experiment Name: At_Drought_Soil_Dry_P Parameter: Post-Treatment Value: Re-Water vs. No Drought
  misc_feature: MA Experiment 20001557 PARAMETER Experiment Name: At_Drought_Soil_Dry_P Parameter: Timepoint (day) Value: 13
  misc_feature: MA Experiment 20001557 PARAMETER Experiment Name: At_Drought_Soil_Dry_P Parameter: Treatment Value: Drought vs. No Drought
  misc_feature: MA Experiment ID: 20001906 Result: Up-regulated in Transcription
  misc_feature: MA Experiment 20001906 PARAMETER Experiment Name: At_Drought_Reproduction_P Parameter: Age (day) Value: 35
  misc_feature: MA Experiment 20001906 PARAMETER Experiment Name: At_Drought_Reproduction_P Parameter: Organism Value: A. thaliana
  misc_feature: MA Experiment 20001906 PARAMETER Experiment Name: At_Drought_Reproduction_P Parameter: Plant Line Value: WS
  misc_feature: MA Experiment 20001906 PARAMETER Experiment Name: At_Drought_Reproduction_P Parameter: Timepoint (day) Value: 5
  misc_feature: MA Experiment 20001906 PARAMETER Experiment Name: At_Drought_Reproduction_P Parameter: Tissue Value: Siliques
  misc_feature: MA Experiment 20001906 PARAMETER Experiment Name: At_Drought_Reproduction_P Parameter: Treatment Value: Drought vs. No Drought
  misc_feature: MA Experiment ID: 20001908 Result: Up-regulated in Transcription
  misc_feature: MA Experiment 20001908 PARAMETER Experiment Name: At_Drought_Reproduction_P Parameter: Age (day) Value: 40
  misc_feature: MA Experiment 20001908 PARAMETER Experiment Name: At_Drought_Reproduction_P Parameter: Organism Value: A. thaliana
  misc_feature: MA Experiment 20001908 PARAMETER Experiment Name: At_Drought_Reproduction_P Parameter: Plant Line Value: WS
  misc_feature: MA Experiment 20001908 PARAMETER Experiment Name: At_Drought_Reproduction_P Parameter: Timepoint (day) Value: 10
  misc_feature: MA Experiment 20001908 PARAMETER Experiment Name: At_Drought_Reproduction_P Parameter: Tissue Value: Siliques
  misc_feature: MA Experiment 20001908 PARAMETER Experiment Name: At_Drought_Reproduction_P Parameter: Treatment Value: Drought vs. No Drought
accgaccactgtactgaatctttaagcctctcaacgtgttttttatatatattttgaaaatcttttacgccttaaaaggatctacgataattaaaaaaaaatggcaacggaatgcattgcaacggtccctcaaatattcagtgaaaacaaaaccaaagaggattcttcgatcttcgatgcaaagctccttaatcagcactcgcaccacatacctcaacagttcgtatggcccgaccacgagaaaccttctacggatgttcaacctctccaagtcccactcatagacctagccggtttcctctccggcgactcgtgcttggcatcggaggctactagactcgtctcaaaggctgcaacgaaacatggcttcttcctaatcactaaccatggtgtcgatgagagcctcttgtctcgtgcctatctgcatatggactctttctttaaggccccggcttgtgagaagcagaaggctcagaggaagtggggtgagagctccggttacgctagtagtttcgtcgggagattctcctcaaagctcccgtggaaggagactctgtcgtttaagttctctcccgaggagaagatccattcccaaaccgttaaagactttgtttctaagaaaatgggcgatggatacgaagatttcgggaaggtttatcaagaatacgcggaggccatgaacactctctcactaaagatcatggagcttcttggaatgagtcttggggtcgagaggagatattttaaagagtttttcgaagacagcgattcaatattccggttgaattactacccgcagtgcaagcaaccggagcttgcactagggacaggaccccactgcgacccaacatctctaaccatacttcatcaagaccaagttggcggtctgcaagttttcgtggacaacaaatggcaatccattcctcctaaccctcacgctttcgtggtgaacataggcgacaccttcatggctctaacgaatggaagatacaagagttgtttgcatcgggcggtggtgaacagcgagagagaaaggaagacgtttgcattcttcctatgtccgaaaggggaaaaagtggtgaagccaccagaagaactagtaaacggagtgaagtctggtgaaagaaagtatcctgattttacgtggtctatgtttcttgagttcacacagaagcattatagggcagacatgaacactcttgacgagttctcaatttggcttaagaacagaagaagtttctaaaattgaggagacaatgttgtggtccagaaggtcacttgtagttatgtatagagctttcactgtttttcttaagatgttcaagacttgttaaggatcggagactttttttgttcttttattatcttgctctaggttgtctggtgttaaataaaagtagcaaaaaaataaaaatatatgtactccattgggtctacttatgatttgtttcgaaatggtttttttatagtctctaatgttaaatttatgtcactattact

SEQ ID NO: 100316 - protein, 380 aa, Arabidopsis thaliana
  peptide (1)..(380): Ceres Seq. ID no. 13604868
  misc_feature (222)..(321): Pfam Name: 2OG-Fe(II) oxygenase superfamily Pfam Description: 2OG-Fe(II) oxygenase superfamily
  misc_feature (1)..(380): Homolog of NCBI NO: 15240722 NR Description: gibberellin 20-oxidase [Arabidopsis thaliana]
  misc_feature (4)..(380): Homolog of NCBI NO: 15219842 NR Description: gibberellin 20-oxidase, putative [Arabidopsis
  misc_feature (1)..(379): Homolog of NCBI NO: 7433209 NR Description: gibberellin 20-oxidase (EC 1.14.11.-) - kidney
  misc_feature (1)..(378): Homolog of NCBI NO: 8919865 NR Description: gibberellin 20-oxidase [Citrus sinensis x
  misc_feature (1)..(377): Homolog of NCBI NO: 34013374 NR Description: gibberellin C20-oxidase [Populus alba]
  misc_feature (1)..(380): Homolog of NCBI NO: 40233167 NR Description: gibberellin 20-oxidase [Populus tomentosa]
  misc_feature (1)..(380): Homolog of NCBI NO: 28316358 NR Description: gibberellin C-20 oxidase [Populus nigra]
  misc_feature (1)..(377): Homolog of NCBI NO: 34013370 NR Description: gibberellin C20-oxidase [Populus alba]
  misc_feature (1)..(380): Homolog of NCBI NO: 9650811 NR Description: gibberellin 20-oxidase [Populus tremula x Populus
  misc_feature (1)..(379): Homolog of NCBI NO: 4164141 NR Description: gibberelin 20-oxidase [Lactuca sativa]
MATECIATVPQIFSENKTKEDSSIFDAKLLNQHSHHIPQQFVWPDHEKPSTDVQPLQVPLIDLAGFLSGDSCLASEATRLVSKAATKHGFFLITNHGVDESLLSRAYLHMDSFFKAPACEKQKAQRKWGESSGYASSFVGRFSSKLPWKETLSFKFSPEEKIHSQTVKDFVSKKMGDGYEDFGKVYQEYAEAMNTLSLKIMELLGMSLGVERRYFKEFFEDSDSIFRLNYYPQCKQPELALGTGPHCDPTSLTILHQDQVGGLQVFVDNKWQSIPPNPHAFVVNIGDTFMALTNGRYKSCLHRAVVNSERERKTFAFFLCPKGEKVVKPPEELVNGVKSGERKYPDFTWSMFLEFTQKHYRADMNTLDEFSIWLKNRRSF

SEQ ID NO: 100317 - protein, 271 aa, Arabidopsis thaliana
  peptide (1)..(271): Ceres Seq. ID no. 13604869
  misc_feature (113)..(212): Pfam Name: 2OG-Fe(II) oxygenase superfamily Pfam Description: 2OG-Fe(II) oxygenase superfamily
  misc_feature (1)..(271): Homolog of NCBI NO: 15240722 NR Description: gibberellin 20-oxidase [Arabidopsis thaliana]
  misc_feature (1)..(271): Homolog of NCBI NO: 15219842 NR Description: gibberellin 20-oxidase, putative [Arabidopsis
  misc_feature (1)..(270): Homolog of NCBI NO: 7433209 NR Description: gibberellin 20-oxidase (EC 1.14.11.-) - kidney
  misc_feature (1)..(269): Homolog of NCBI NO: 8919865 NR Description: gibberellin 20-oxidase [Citrus sinensis x
  misc_feature (1)..(268): Homolog of NCBI NO: 34013374 NR Description: gibberellin C20-oxidase [Populus alba]
  misc_feature (1)..(271): Homolog of NCBI NO: 40233167 NR Description: gibberellin 20-oxidase [Populus tomentosa]
  misc_feature (1)..(271): Homolog of NCBI NO: 28316358 NR Description: gibberellin C-20 oxidase [Populus nigra]
  misc_feature (1)..(268): Homolog of NCBI NO: 34013370 NR Description: gibberellin C20-oxidase [Populus alba]
  misc_feature (1)..(271): Homolog of NCBI NO: 9650811 NR Description: gibberellin 20-oxidase [Populus tremula x Populus
  misc_feature (1)..(270): Homolog of NCBI NO: 4164141 NR Description: gibberelin 20-oxidase [Lactuca sativa]
MDSFFKAPACEKQKAQRKWGESSGYASSFVGRFSSKLPWKETLSFKFSPEEKIHSQTVKDFVSKKMGDGYEDFGKVYQEYAEAMNTLSLKIMELLGMSLGVERRYFKEFFEDSDSIFRLNYYPQCKQPELALGTGPHCDPTSLTILHQDQVGGLQVFVDNKWQSIPPNPHAFVVNIGDTFMALTNGRYKSCLHRAVVNSERERKTFAFFLCPKGEKVVKPPEELVNGVKSGERKYPDFTWSMFLEFTQKHYRADMNTLDEFSIWLKNRRSF

SEQ ID NO: 100318 - protein, 206 aa, Arabidopsis thaliana
  peptide (1)..(206): Ceres Seq. ID no. 13604870
  misc_feature (48)..(147): Pfam Name: 2OG-Fe(II) oxygenase superfamily Pfam Description: 2OG-Fe(II) oxygenase superfamily
  misc_feature (1)..(206): Homolog of NCBI NO: 15240722 NR Description: gibberellin 20-oxidase [Arabidopsis thaliana]
  misc_feature (1)..(206): Homolog of NCBI NO: 15219842 NR Description: gibberellin 20-oxidase, putative [Arabidopsis
  misc_feature (1)..(205): Homolog of NCBI NO: 7433209 NR Description: gibberellin 20-oxidase (EC 1.14.11.-) - kidney
  misc_feature (1)..(204): Homolog of NCBI NO: 8919865 NR Description: gibberellin 20-oxidase [Citrus sinensis x
  misc_feature (1)..(203): Homolog of NCBI NO: 34013374 NR Description: gibberellin C20-oxidase [Populus alba]
  misc_feature (1)..(206): Homolog of NCBI NO: 40233167 NR Description: gibberellin 20-oxidase [Populus tomentosa]
  misc_feature (1)..(206): Homolog of NCBI NO: 28316358 NR Description: gibberellin C-20 oxidase [Populus nigra]
  misc_feature (1)..(203): Homolog of NCBI NO: 34013370 NR Description: gibberellin C20-oxidase [Populus alba]
  misc_feature (1)..(206): Homolog of NCBI NO: 9650811 NR Description: gibberellin 20-oxidase [Populus tremula x Populus
  misc_feature (1)..(205): Homolog of NCBI NO: 4164141 NR Description: gibberelin 20-oxidase [Lactuca sativa]
MGDGYEDFGKVYQEYAEAMNTLSLKIMELLGMSLGVERRYFKEFFEDSDSIFRLNYYPQCKQPELALGTGPHCDPTSLTILHQDQVGGLQVFVDNKWQSIPPNPHAFVVNIGDTFMALTNGRYKSCLHRAVVNSERERKTFAFFLCPKGEKVVKPPEELVNGVKSGERKYPDFTWSMFLEFTQKHYRADMNTLDEFSIWLKNRRSF

SEQ ID NO: 100319 - DNA, 864 bp, Arabidopsis thaliana
  misc_feature (1)..(864): Ceres Seq. ID no. 13604873
  misc_feature: MA Experiment ID: 20000306 Result: Down-regulated in Transcription
  misc_feature: MA Experiment 20000306 PARAMETER Experiment Name: At_Germinating_Seeds_Sub_P Parameter: Age (hr) Value: 6 vs. 0
  misc_feature: MA Experiment 20000306 PARAMETER Experiment Name: At_Germinating_Seeds_Sub_P Parameter: Organism Value: A. thaliana
  misc_feature: MA Experiment 20000306 PARAMETER Experiment Name: At_Germinating_Seeds_Sub_P Parameter: Plant Line Value: WS
  misc_feature: MA Experiment 20000306 PARAMETER Experiment Name: At_Germinating_Seeds_Sub_P Parameter: Tissue Value: Germinating Seeds
  misc_feature: MA Experiment ID: 20000307 Result: Down-regulated in Transcription
  misc_feature: MA Experiment 20000307 PARAMETER Experiment Name: At_Germinating_Seeds_Sub_P Parameter: Age (hr) Value: 24 vs. 0
  misc_feature: MA Experiment 20000307 PARAMETER Experiment Name: At_Germinating_Seeds_Sub_P Parameter: Organism Value: A. thaliana
  misc_feature: MA Experiment 20000307 PARAMETER Experiment Name: At_Germinating_Seeds_Sub_P Parameter: Plant Line Value: WS
  misc_feature: MA Experiment 20000307 PARAMETER Experiment Name: At_Germinating_Seeds_Sub_P Parameter: Tissue Value: Germinating Seeds
  misc_feature: MA Experiment ID: 20000352 Result: Up-regulated in Transcription
  misc_feature: MA Experiment 20000352 PARAMETER Experiment Name: At_Drought_Sub_P Parameter: Age (day) Value: 7
  misc_feature: MA Experiment 20000352 PARAMETER Experiment Name: At_Drought_Sub_P Parameter: Organism Value: A. thaliana
  misc_feature: MA Experiment 20000352 PARAMETER Experiment Name: At_Drought_Sub_P Parameter: Plant Line Value: WS
  misc_feature: MA Experiment 20000352 PARAMETER Experiment Name: At_Drought_Sub_P Parameter: Timepoint (hr) Value: 6
  misc_feature: MA Experiment 20000352 PARAMETER Experiment Name: At_Drought_Sub_P Parameter: Tissue Value: Whole Plant
  misc_feature: MA Experiment 20000352 PARAMETER Experiment Name: At_Drought_Sub_P Parameter: Treatment Value: Drought vs. No Drought
atgttattttcgtcgtgcaaaataattttccaatataccctcaaggaaatgtcatcccacggccgagaagtagaggtgaccatctcatcggcaaaggatatcaagaacgtgaactggcgcaacggcccaaacaagccatacgccgttgtatggatcgatccgaagttcaaatcctccacaagagttgacgaagacggcaacacttgtacaacgtggaacgagacatttgtcatcgctttacctccggccaacgacgatgacgacaaggtatacatcaacatcgtacacgcaggccgtgaagagaacacaaagcccctcatcggctccgcccatctcagcctccgtgatgtcattgatgacgtcggcttcggcgtccccttcatgaaaaccctcaagctcaaacgcccctctggccgacctcagggcaaactcgacgtcactgtcaccgttcgagagactccaggatcaaattacgcgcttccttatggcgatccatacgcgccggaaaaggggagcaagttcggtgggatggggactggactggcggtcggggcggtggccggagttttgggtggggtggcattagcggagggactggaggctgtggaaggcgatgaggatgatgatgatgacgatgatgctgctgctgctgctgctgctgatgatgatgatgatgatgatgatgatgatgatgatgatgacgagtgagactttgagtttacagctatatcatctttcattggtgaagtcctgaattctgtgttgcaacataacaagcctaataacttcgattgaaaaacaagtaactcacattaatgttcgggtaagacttcacagaaaataatgcaaaggattgatatattc

SEQ ID NO: 100320 - protein, 235 aa, Arabidopsis thaliana
  peptide (1)..(235): Ceres Seq. ID no. 13604874
  misc_feature (24)..(111): Pfam Name: C2 domain Pfam Description: C2 domain
  misc_feature (1)..(235): Homolog of NCBI NO: 10176862 NR Description: emb|CAB80929.1~gene_id:MRO11.1~similar to unknown
  misc_feature (17)..(235): Homolog of NCBI NO: 30689212 NR Description: C2 domain-containing protein [Arabidopsis
  misc_feature (23)..(166): Homolog of NCBI NO: 34908388 NR Description: P0529E05.20 [Oryza sativa (japonica
  misc_feature (153)..(223): Homolog of NCBI NO: 34908388 NR Description: P0529E05.20 [Oryza sativa (japonica
  misc_feature (18)..(154): Homolog of NCBI NO: 18390752 NR Description: shock protein SRC2 family [Arabidopsis thaliana] F22G5.35 [Arabidopsis thaliana] >gi|15451132|gb|AAK96837.1| to SRC2 [Arabidopsis thaliana] >gi|20148321|gb|AAM10051.1|
  misc_feature (24)..(160): Homolog of NCBI NO: 15225023 NR Description: C2 domain-containing protein [Arabidopsis
  misc_feature (24)..(152): Homolog of NCBI NO: 15234097 NR Description: C2 domain-containing protein [Arabidopsis
MLFSSCKIIFQYTLKEMSSHGREVEVTISSAKDIKNVNWRNGPNKPYAVVWIDPKFKSSTRVDEDGNTCTTWNETFVIALPPANDDDDKVYINIVHAGREENTKPLIGSAHLSLRDVIDDVGFGVPFMKTLKLKRPSGRPQGKLDVTVTVRETPGSNYALPYGDPYAPEKGSKFGGMGTGLAVGAVAGVLGGVALAEGLEAVEGDEDDDDDDDAAAAAAADDDDDDDDDDDDDDE

SEQ ID NO: 100321 - protein, 219 aa, Arabidopsis thaliana; identical to SEQ ID NO: 72769
  peptide (1)..(219): Ceres Seq. ID no. 13604875
  misc_feature (8)..(95): Pfam Name: C2 domain Pfam Description: C2 domain
  misc_feature (1)..(219): Homolog of NCBI NO: 10176862 NR Description: emb|CAB80929.1~gene_id:MRO11.1~similar to unknown
  misc_feature (1)..(219): Homolog of NCBI NO: 30689212 NR Description: C2 domain-containing protein [Arabidopsis
  misc_feature (7)..(150): Homolog of NCBI NO: 34908388 NR Description: P0529E05.20 [Oryza sativa (japonica
  misc_feature (137)..(207): Homolog of NCBI NO: 34908388 NR Description: P0529E05.20 [Oryza sativa (japonica
  misc_feature (2)..(138): Homolog of NCBI NO: 18390752 NR Description: shock protein SRC2 family [Arabidopsis thaliana] F22G5.35 [Arabidopsis thaliana] >gi|15451132|gb|AAK96837.1| to SRC2 [Arabidopsis thaliana] >gi|20148321|gb|AAM10051.1|
  misc_feature (8)..(144): Homolog of NCBI NO: 15225023 NR Description: C2 domain-containing protein [Arabidopsis
  misc_feature (8)..(136): Homolog of NCBI NO: 15234097 NR Description: C2 domain-containing protein [Arabidopsis

SEQ ID NO: 100322 - DNA, 1756 bp, Arabidopsis thaliana
  misc_feature (1)..(1756): Ceres Seq. ID no. 13604876
  misc_feature: MA Experiment ID: 20000437 Result: Down-regulated in Transcription
  misc_feature: MA Experiment 20000437 PARAMETER Experiment Name: At_Drought_P Parameter: Age (day) Value: 8
  misc_feature: MA Experiment 20000437 PARAMETER Experiment Name: At_Drought_P Parameter: Organism Value: A. thaliana
  misc_feature: MA Experiment 20000437 PARAMETER Experiment Name: At_Drought_P Parameter: Plant Line Value: WS
  misc_feature: MA Experiment 20000437 PARAMETER Experiment Name: At_Drought_P Parameter: Timepoint (hr) Value: 24
  misc_feature: MA Experiment 20000437 PARAMETER Experiment Name: At_Drought_P Parameter: Tissue Value: Whole Plant
  misc_feature: MA Experiment 20000437 PARAMETER Experiment Name: At_Drought_P Parameter: Treatment Value: Drought vs. No Drought
ccacgcgtccggcaatgacttacgcgtggttatggacgcttctcgcctttgttctgacatggatggtttttcacctcatcaagatgaagaaggcggcaaccggagatttagaggccgaggcagaagcaagaagagatggtgcaacggatgtcatcattgttggggcgggtgttgcaggcgcttctcttgcttatgctttagctaaggatggacgacgagtacatgtgatagagagggacttaaaagagccacaaagattcatgggagagctgatgcaagcgggaggtcgcttcatgttagcccagcttggcctcgaagattgtttggaggacatagacgcacaagaagcgaagtccttggcaatatacaaggatggaaaacacgcgacattgccttttccagatgacaagagttttcctcatgagccagtaggtagactcttacgtaatggtcggctggtacaacgtttacgccaaaaagcagcttctcttagcaatgttcaattagaagaaggaacagtgaagtctttaattgaagaagaaggagtggtcaaaggagtgacatacaaaaatagcgcaggcgaagaaataacggcctttgcacctcttactgtcgtatgcgatggttgttattcgaaccttcgtcggtcactcgtggataatactgaggaagtcctctcgtacatggtgggttacgtcacgaagaatagccgacttgaagatccccatagtctacatttgatattttctaaacctttggtttgtgttatatatcaaataaccagtgatgaagttcgttgtgttgccgaagttcccgctgatagtattccttctatatcgaatggtgaaatgtctaccttcctcaagaaatcaatggctcctcagatacctgaaactggaaatcttcgggagatatttttgaaaggcatagaggaaggattaccagagataaaatcaacagcgacgaaaagtatgtcatcgagattgtgtgataaaagaggagtgattgtgttgggagatgcattcaatatgcgtcatcctataatcgcgtcaggaatgatggttgcactctcggacatttgcattctacgcaatcttctcaaaccattgcctaacctcagcaatactaagaaagtctctgatcttgtcaagtccttttacatcatccgcaagccaatgtcagcgaccgtgaacacgctcgcgagtatcttttcacaagtgcttgttgctacaacagacgaagcaagagagggaatgcgacaaggctgcttcaattacctagctcgtggagattttaaaacaaggggattgatgactattctcggaggcatgaaccctcaccctcttactctagtccttcatcttgtagccatcacccttacgtccatgggccacttgctctctccgtttccttcgcctcgtcgcttttggcatagcctcagaattcttgcctgggctttgcaaatgttgggtgcacatttagtggatgaaggattcaaggaaatgttgattccaacaaacgcagctgcttatcgaaggaactatatcgccacaaccactgtttgatcaatccataacacgaagactgttttattcggagatgaaaaataacaactcaaacagttaactttctacaaccaaataaataattgtgtgtatatgaagttgagcctatggttaagctctactgaattgtgttgaaaacaaacatggatatgttacatgctaatttgttatattctatttattgattcttg

SEQ ID NO: 100323 - protein, 520 aa, Arabidopsis thaliana
  peptide (1)..(520): Ceres Seq. ID no. 13604877
  misc_feature (199)..(401): Pfam Name: Monooxygenase Pfam Description: Monooxygenase
  misc_feature (5)..(520): Homolog of NCBI NO: 15237900 NR Description: squalene monooxygenase 2 (squalene epoxidase 2) (SE2) [Arabidopsis thaliana] >gi|6685408|sp|O65403|ER13_ARATH monooxygenase 2 (Squalene epoxidase 2) (SE 2)
  misc_feature (4)..(520): Homolog of NCBI NO: 15237902 NR Description: squalene monooxygenase 1,1 (squalene epoxidase (SQP1,1) (SE1,1) [Arabidopsis thaliana] Squalene monooxygenase 1,1 (Squalene epoxidase 1,1) (SE 1,1)
  misc_feature (6)..(520): Homolog of NCBI NO: 11358675 NR Description: probable squalene monooxygenase (EC 1.14.99.7)
  misc_feature (4)..(520): Homolog of NCBI NO: 15237903 NR Description: squalene monooxygenase 1,2 (squalene epoxidase (SQP1,2) (SE1,2) [Arabidopsis thaliana] Squalene monooxygenase 1,2 (Squalene epoxidase 1,2) (SE 1,2)
  misc_feature (4)..(520): Homolog of NCBI NO: 6685411 NR Description: Squalene monooxygenase 1,1 (Squalene epoxidase
  misc_feature (13)..(520): Homolog of NCBI NO: 6685410 NR Description: Squalene monooxygenase 1,2 (Squalene epoxidase
  misc_feature (29)..(512): Homolog of NCBI NO: 27311241 NR Description: Putative Squalene monooxygenase [Oryza sativa
  misc_feature (34)..(512): Homolog of NCBI NO: 27475610 NR Description: squalene monooxygenase 2 [Medicago truncatula]
  misc_feature (5)..(511): Homolog of NCBI NO: 18420113 NR Description: squalene monooxygenase (squalene epoxidase) (SE), [Arabidopsis thaliana] >gi|18086577|gb|AAL57712.1| [Arabidopsis thaliana] >gi|24111375|gb|AAN46811.1|
  misc_feature (24)..(510): Homolog of NCBI NO: 18406296 NR Description: squalene monooxygenase (squalene epoxidase) (SE), [Arabidopsis thaliana] >gi|25455713|pir||T52462 hypothetical
TRPAMTYAWLWTLLAFVLTWMVFHLIKMKKAATGDLEAEAEARRDGATDVIIVGAGVAGASLAYALAKDGRRVHVIERDLKEPQRFMGELMQAGGRFMLAQLGLEDCLEDIDAQEAKSLAIYKDGKHATLPFPDDKSFPHEPVGRLLRNGRLVQRLRQKAASLSNVQLEEGTVKSLIEEEGVVKGVTYKNSAGEEITAFAPLTVVCDGCYSNLRRSLVDNTEEVLSYMVGYVTKNSRLEDPHSLHLIFSKPLVCVIYQITSDEVRCVAEVPADSIPSISNGEMSTFLKKSMAPQIPETGNLREIFLKGIEEGLPEIKSTATKSMSSRLCDKRGVIVLGDAFNMRHPIIASGMMVALSDICILRNLLKPLPNLSNTKKVSDLVKSFYIIRKPMSATVNTLASIFSQVLVATTDEAREGMRQGCFNYLARGDFKTRGLMTILGGMNPHPLTLVLHLVAITLTSMGHLLSPFPSPRRFWHSLRILAWALQMLGAHLVDEGFKEMLIPTNAAAYRRNYIATTTV

SEQ ID NO: 100324 - protein, 516 aa, Arabidopsis thaliana
  peptide (1)..(516): Ceres Seq. ID no. 13604878
  misc_feature (195)..(397): Pfam Name: Monooxygenase Pfam Description: Monooxygenase
  misc_feature (1)..(516): Homolog of NCBI NO: 15237900 NR Description: squalene monooxygenase 2 (squalene epoxidase 2) (SE2) [Arabidopsis thaliana] >gi|6685408|sp|O65403|ER13_ARATH monooxygenase 2 (Squalene epoxidase 2) (SE 2)
  misc_feature (1)..(516): Homolog of NCBI NO: 15237902 NR Description: squalene monooxygenase 1,1 (squalene epoxidase (SQP1,1) (SE1,1) [Arabidopsis thaliana] Squalene monooxygenase 1,1 (Squalene epoxidase 1,1) (SE 1,1)
  misc_feature (2)..(516): Homolog of NCBI NO: 11358675 NR Description: probable squalene monooxygenase (EC 1.14.99.7)
  misc_feature (1)..(516): Homolog of NCBI NO: 15237903 NR Description: squalene monooxygenase 1,2 (squalene epoxidase (SQP1,2) (SE1,2) [Arabidopsis thaliana] Squalene monooxygenase 1,2 (Squalene epoxidase 1,2) (SE 1,2)
  misc_feature (1)..(516): Homolog of NCBI NO: 6685411 NR Description: Squalene monooxygenase 1,1 (Squalene epoxidase
  misc_feature (9)..(516): Homolog of NCBI NO: 6685410 NR Description: Squalene monooxygenase 1,2 (Squalene epoxidase
  misc_feature (25)..(508): Homolog of NCBI NO: 27311241 NR Description: Putative Squalene monooxygenase [Oryza sativa
  misc_feature (30)..(508): Homolog of NCBI NO: 27475610 NR Description: squalene monooxygenase 2 [Medicago truncatula]
  misc_feature (1)..(507): Homolog of NCBI NO: 18420113 NR Description: squalene monooxygenase (squalene epoxidase) (SE), [Arabidopsis thaliana] >gi|18086577|gb|AAL57712.1| [Arabidopsis thaliana] >gi|24111375|gb|AAN46811.1|
  misc_feature (20)..(506): Homolog of NCBI NO: 18406296 NR Description: squalene monooxygenase (squalene epoxidase) (SE), [Arabidopsis thaliana] >gi|25455713|pir||T52462 hypothetical
MTYAWLWTLLAFVLTWMVFHLIKMKKAATGDLEAEAEARRDGATDVIIVGAGVAGASLAYALAKDGRRVHVIERDLKEPQRFMGELMQAGGRFMLAQLGLEDCLEDIDAQEAKSLAIYKDGKHATLPFPDDKSFPHEPVGRLLRNGRLVQRLRQKAASLSNVQLEEGTVKSLIEEEGVVKGVTYKNSAGEEITAFAPLTVVCDGCYSNLRRSLVDNTEEVLSYMVGYVTKNSRLEDPHSLHLIFSKPLVCVIYQITSDEVRCVAEVPADSIPSISNGEMSTFLKKSMAPQIPETGNLREIFLKGIEEGLPEIKSTATKSMSSRLCDKRGVIVLGDAFNMRHPIIASGMMVALSDICILRNLLKPLPNLSNTKKVSDLVKSFYIIRKPMSATVNTLASIFSQVLVATTDEAREGMRQGCFNYLARGDFKTRGLMTILGGMNPHPLTLVLHLVAITLTSMGHLLSPFPSPRRFWHSLRILAWALQMLGAHLVDEGFKEMLIPTNAAAYRRNYIATTTV

SEQ ID NO: 100325 - protein, 500 aa, Arabidopsis thaliana
  peptide (1)..(500): Ceres Seq. ID no. 13604879
  misc_feature (179)..(381): Pfam Name: Monooxygenase Pfam Description: Monooxygenase
  misc_feature (1)..(500): Homolog of NCBI NO: 15237900 NR Description: squalene monooxygenase 2 (squalene epoxidase 2) (SE2) [Arabidopsis thaliana] >gi|6685408|sp|O65403|ER13_ARATH monooxygenase 2 (Squalene epoxidase 2) (SE 2)
  misc_feature (1)..(500): Homolog of NCBI NO: 15237902 NR Description: squalene monooxygenase 1,1 (squalene epoxidase (SQP1,1) (SE1,1) [Arabidopsis thaliana] Squalene monooxygenase 1,1 (Squalene epoxidase 1,1) (SE 1,1)
  misc_feature (1)..(500): Homolog of NCBI NO: 11358675 NR Description: probable squalene monooxygenase (EC 1.14.99.7)
  misc_feature (1)..(500): Homolog of NCBI NO: 15237903 NR Description: squalene monooxygenase 1,2 (squalene epoxidase (SQP1,2) (SE1,2) [Arabidopsis thaliana] Squalene monooxygenase 1,2 (Squalene epoxidase 1,2) (SE 1,2)
  misc_feature (1)..(500): Homolog of NCBI NO: 6685411 NR Description: Squalene monooxygenase 1,1 (Squalene epoxidase
  misc_feature (1)..(500): Homolog of NCBI NO: 6685410 NR Description: Squalene monooxygenase 1,2 (Squalene epoxidase
  misc_feature (9)..(492): Homolog of NCBI NO: 27311241 NR Description: Putative Squalene monooxygenase [Oryza sativa
  misc_feature (14)..(492): Homolog of NCBI NO: 27475610 NR Description: squalene monooxygenase 2 [Medicago truncatula]
  misc_feature (1)..(491): Homolog of NCBI NO: 18420113 NR Description: squalene monooxygenase (squalene epoxidase) (SE), [Arabidopsis thaliana] >gi|18086577|gb|AAL57712.1| [Arabidopsis thaliana] >gi|24111375|gb|AAN46811.1|
  misc_feature (4)..(490): Homolog of NCBI NO: 18406296 NR Description: squalene monooxygenase (squalene epoxidase) (SE), [Arabidopsis thaliana] >gi|25455713|pir||T52462 hypothetical
MVFHLIKMKKAATGDLEAEAEARRDGATDVIIVGAGVAGASLAYALAKDGRRVHVIERDLKEPQRFMGELMQAGGRFMLAQLGLEDCLEDIDAQEAKSLAIYKDGKHATLPFPDDKSFPHEPVGRLLRNGRLVQRLRQKAASLSNVQLEEGTVKSLIEEEGVVKGVTYKNSAGEEITAFAPLTVVCDGCYSNLRRSLVDNTEEVLSYMVGYVTKNSRLEDPHSLHLIFSKPLVCVIYQITSDEVRCVAEVPADSIPSISNGEMSTFLKKSMAPQIPETGNLREIFLKGIEEGLPEIKSTATKSMSSRLCDKRGVIVLGDAFNMRHPIIASGMMVALSDICILRNLLKPLPNLSNTKKVSDLVKSFYIIRKPMSATVNTLASIFSQVLVATTDEAREGMRQGCFNYLARGDFKTRGLMTILGGMNPHPLTLVLHLVAITLTSMGHLLSPFPSPRRFWHSLRILAWALQMLGAHLVDEGFKEMLIPTNAAAYRRNYIATTTV

SEQ ID NO: 100326 - DNA, 3510 bp, Arabidopsis thaliana
  misc_feature (1)..(3510): Ceres Seq. ID no. 13604883
  misc_feature: MA Experiment ID: 20000355 Result: Up-regulated in Transcription
  misc_feature: MA Experiment 20000355 PARAMETER Experiment Name: At_Siliques_Sub_P Parameter: Age (day) Value: 21
  misc_feature: MA Experiment 20000355 PARAMETER Experiment Name: At_Siliques_Sub_P Parameter: Organism Value: A. thaliana
  misc_feature: MA Experiment 20000355 PARAMETER Experiment Name: At_Siliques_Sub_P Parameter: Plant Line Value: WS
  misc_feature: MA Experiment 20000355 PARAMETER Experiment Name: At_Siliques_Sub_P Parameter: Tissue Value: Less Than 5mm Siliques vs. Whole Plant
  misc_feature: MA Experiment ID: 20000440 Result: Up-regulated in Transcription
  misc_feature: MA Experiment 20000440 PARAMETER Experiment Name: At_Closed-Flower__Sub_P Parameter: Tissue Value: Closed Flower vs. Whole Plant
atggcgtccacgcctcctcaaacttctaaaaaggtccgtaacaattccggtagcggccaaaccgtcaaatttgcaagacgaacatctagcggaagatatgtgagtttatctcgagataatatagaattatcaggcgagctctccggggattattctaactatacggtgcacatacctccgacgccggacaatcagcccatggccaccaaagccgaagagcaatacgtgtcaaattctttatttactggtggtttcaacagtgtaacacgtgcacatcttatggacaaagtgatcgattcagatgtcacacaccctcagatggctggcgctaaaggctcttcgtgtgccatgcctgcttgcgacggaaatgtcatgaaagacgagagaggaaaggacgtgatgccatgtgaatgccggtttaagatctgtagggattgcttcatggacgcccagaaagagacaggcctttgtccaggatgcaaggaacaatacaaaatcggggacctagatgacgatacgcctgactattctagtggtgctctccccttaccagctccagggaaagatcaacgtgggaacaacaacaacatgtctatgatgaagaggaaccaaaacggtgaatttgatcacaacagatggctattcgagacgcaaggcacatatgggtacggtaatgcgtattggcctcaagacgaaatgtatggcgatgatatggatgaagggatgagaggcggcatggtggaaacagctgacaagccatggcggccactgagccgacgaatccctattccagccgccatcattagtccttacagattactaatcgtcattcgttttgtcgtgctatgtttttttctaacttggaggatccgaaatcctaacgaagacgcaatatggttatggctcatgtctataatatgcgagctttggtttggattttcatggattctagaccagatccctaagttgtgtccaataaaccggtccactgacctggaagttcttcgtgacaaatttgacatgccttctccctccaacccaacagggaggtcggatctcccaggtattgacctttttgtgtcaacggcagatccagagaaagagccgccccttgtcaccgccaacacgattctgtccatattggccgttgattatccggtggagaaggtgtcatgctatctttctgatgatggaggagctcttctatcctttgaagctatggcagaagctgctagctttgcggatctctgggtacctttttgtcgcaaacataacattgagcctcgaaatccagactcgtatttcagtttgaagatagatccaacaaagaataagagcagaattgattttgtcaaggacagaagaaagattaagagggagtatgatgaattcaaggttcgcatcaacggcctccctgactcaatacggaggaggtcagatgcatttaatgcaagggaggaaatgaaagctctaaaacagatgagggagagcggaggtgatccaacagagcctgtgaaagtccccaaagccacgtggatggcagatggcacccactggccaggaacttgggcagcctctactcgagagcattccaaaggtgatcatgctgggattctccaggtgatgttgaaaccacctagcagcgatccattaattggaaatagcgacgataaagtcattgatttttcagacacggacactcgtttacccatgtttgtgtatgtgtcacgtgagaagcggcctggatatgatcacaacaagaaagctggagccatgaatgcacttgttcgtgcctctgctatcctctcaaatggaccttttatccttaatcttgattgtgatcattacatctataactgtaaggccgtacgagaagggatgtgttttatgatggacagaggtggtgaagacatttgctacattcagtttccgcaaagattcgaaggcatcgatccttctgatagatatgctaacaataacactgtattttttgacggtaatatgcgtgctctcgacggtgtccagggaccagtttatgttggaacaggtactatgtttaggcgctttgctctctatggttttgatccacccaaccctgacaagcttcttgagaagaaggaatcagaaacagaggctctaaccaccagtgactttgacccggaccttgatgtcacacaactccccaagcgctttgggaactccacactcctagctgagtcaattccaattgcagagttccaaggtcgtccattggcagaccacccggctgtcaagtacggtcgtcctcccggagcccttagagtccctcgtgacccacttgatgctaccactgtcgcagagtctgtttctgtaatctcttgttggtatgaggataaaacggagtggggagatagagttggatggatttatgggtcggtgacagaggacgtggtcacaggataccgcatgcataatcgtgggtggcgctcggtttactgcataactaagcgagattcttttcgaggctctgcacccattaatctcacggatcgtcttcaccaggtgttgcggtgggccactgggtctgttgagatcttcttctctagaaacaacgccattctcgcctccaaacgtctcaagttcctccaacgtctcgcatacctcaatgttgggatataccctttcacgtctctgtttctcatcctctattgttttcttccggcattctctcttttctctggacagttcatcgtgcggacgctcagtatctccttcttggtctaccttcttatgatcaccatttgtttgattggattggcggttttggaggtcaagtggtctggcattgggctggaagaatggtggagaaacgaacagtggtggctcatctcaggaacaagctctcacctttacgcagtggtccaaggagtcctcaaagtgattgcagggatcgagatctcctttaccttgacgaccaagtcagggggagatgacaatgaagacatatacgcggatttgtacatagtgaaatggtcgtcgctgatgataccgcctatagtgatagcaatggtgaacataatagcgattgtggtggcgttcatcaggacaatataccaagcggtgccacaatggagcaagctaatcggaggagcatttttcagcttctgggtgttggcgcatttgtatccatttgcaaaaggattgatgggacgaagaggcaaaactccaaccatagtttttgtgtgggcaggtctcattgccatcaccatctctctactgtggacggccataaacccaaacaccggacctgcagctgctgcagagggtgttggaggcggtggttttcaattcccgtaattaaaaaagcattcatataggcgacttgagagttttgtagactaatcacaagaaattaatacgtatactatctttgtttctttttgtttttgtttttgttcctggtagtaaattttcagataactacatgtatatctggattgagatgtcatgactgtataaatcagcctttgt

SEQ ID NO: 100327 - protein, 1111 aa, Arabidopsis thaliana
  peptide (1)..(1111): Ceres Seq. ID no. 13604884
  misc_feature (18)..(762): Homolog of NCBI NO: 34419230 NR Description: TPA: cellulose synthase-like D3 [Oryza sativa]
  misc_feature (18)..(697): Homolog of NCBI NO: 15237873 NR Description: cellulose synthase family [Arabidopsis thaliana]
  misc_feature (17)..(201): Homolog of NCBI NO: 34897878 NR Description: Similar to Arabidopsis thaliana DNA chromosome 4,
  misc_feature (768)..(1094): Homolog of NCBI NO: 28411807 NR Description: cellulose synthase-4 [Oryza sativa (japonica
  misc_feature (184)..(471): Homolog of NCBI NO: 28411807 NR Description: cellulose synthase-4 [Oryza sativa (japonica
  misc_feature (564)..(701): Homolog of NCBI NO: 28411807 NR Description: cellulose synthase-4 [Oryza sativa (japonica
  misc_feature (768)..(1094): Homolog of NCBI NO: 9622880 NR Description: cellulose synthase-4 [Zea mays]
  misc_feature (184)..(471): Homolog of NCBI NO: 9622880 NR Description: cellulose synthase-4 [Zea mays]
  misc_feature (564)..(701): Homolog of NCBI NO: 9622880 NR Description: cellulose synthase-4 [Zea mays]
  misc_feature (768)..(1103): Homolog of NCBI NO: 9622882 NR Description: cellulose synthase-5 [Zea mays]
MASTPPQTSKKVRNNSGSGQTVKFARRTSSGRYVSLSRDNIELSGELSGDYSNYTVHIPPTPDNQPMATKAEEQYVSNSLFTGGFNSVTRAHLMDKVIDSDVTHPQMAGAKGSSCAMPACDGNVMKDERGKDVMPCECRFKICRDCFMDAQKETGLCPGCKEQYKIGDLDDDTPDYSSGALPLPAPGKDQRGNNNNMSMMKRNQNGEFDHNRWLFETQGTYGYGNAYWPQDEMYGDDMDEGMRGGMVETADKPWRPLSRRIPIPAAIISPYRLLIVIRFVVLCFFLTWRIRNPNEDAIWLWLMSIICELWFGFSWILDQIPKLCPINRSTDLEVLRDKFDMPSPSNPTGRSDLPGIDLFVSTADPEKEPPLVTANTILSILAVDYPVEKVSCYLSDDGGALLSFEAMAEAASFADLWVPFCRKHNIEPRNPDSYFSLKIDPTKNKSRIDFVKDRRKIKREYDEFKVRINGLPDSIRRRSDAFNAREEMKALKQMRESGGDPTEPVKVPKATWMADGTHWPGTWAASTREHSKGDHAGILQVMLKPPSSDPLIGNSDDKVIDFSDTDTRLPMFVYVSREKRPGYDHNKKAGAMNALVRASAILSNGPFILNLDCDHYIYNCKAVREGMCFMMDRGGEDICYIQFPQRFEGIDPSDRYANNNTVFFDGNMRALDGVQGPVYVGTGTMFRRFALYGFDPPNPDKLLEKKESETEALTTSDFDPDLDVTQLPKRFGNSTLLAESIPIAEFQGRPLADHPAVKYGRPPGALRVPRDPLDATTVAESVSVISCWYEDKTEWGDRVGWIYGSVTEDVVTGYRMHNRGWRSVYCITKRDSFRGSAPINLTDRLHQVLRWATGSVEIFFSRNNAILASKRLKFLQRLAYLNVGIYPFTSLFLILYCFLPAFSLFSGQFIVRTLSISFLVYLLMITICLIGLAVLEVKWSGIGLEEWWRNEQWWLISGTSSHLYAVVQGVLKVIAGIEISFTLTTKSGGDDNEDIYADLYIVKWSSLMIPPIVIAMVNIIAIVVAFIRTIYQAVPQWSKLIGGAFFSFWVLAHLYPFAKGLMGRRGKTPTIVFVWAGLIAITISLLWTAINPNTGPAAAAEGVGGGGFQFP

SEQ ID NO: 100328 - protein, 1045 aa, Arabidopsis thaliana
  peptide (1)..(1045): Ceres Seq. ID no. 13604885
  misc_feature (1)..(696): Homolog of NCBI NO: 34419230 NR Description: TPA: cellulose synthase-like D3 [Oryza sativa]
  misc_feature (1)..(631): Homolog of NCBI NO: 15237873 NR Description: cellulose synthase family [Arabidopsis thaliana]
  misc_feature (1)..(135): Homolog of NCBI NO: 34897878 NR Description: Similar to Arabidopsis thaliana DNA chromosome 4,
  misc_feature (702)..(1028): Homolog of NCBI NO: 28411807 NR Description: cellulose synthase-4 [Oryza sativa (japonica
  misc_feature (118)..(405): Homolog of NCBI NO: 28411807 NR Description: cellulose synthase-4 [Oryza sativa (japonica
  misc_feature (498)..(635): Homolog of NCBI NO: 28411807 NR Description: cellulose synthase-4 [Oryza sativa (japonica
  misc_feature (702)..(1028): Homolog of NCBI NO: 9622880 NR Description: cellulose synthase-4 [Zea mays]
  misc_feature (118)..(405): Homolog of NCBI NO: 9622880 NR Description: cellulose synthase-4 [Zea mays]
  misc_feature (498)..(635): Homolog of NCBI NO: 9622880 NR Description: cellulose synthase-4 [Zea mays]
  misc_feature (702)..(1037): Homolog of NCBI NO: 9622882 NR Description: cellulose synthase-5 [Zea mays]
MATKAEEQYVSNSLFTGGFNSVTRAHLMDKVIDSDVTHPQMAGAKGSSCAMPACDGNVMKDERGKDVMPCECRFKICRDCFMDAQKETGLCPGCKEQYKIGDLDDDTPDYSSGALPLPAPGKDQRGNNNNMSMMKRNQNGEFDHNRWLFETQGTYGYGNAYWPQDEMYGDDMDEGMRGGMVETADKPWRPLSRRIPIPAAIISPYRLLIVIRFVVLCFFLTWRIRNPNEDAIWLWLMSIICELWFGFSWILDQIPKLCPINRSTDLEVLRDKFDMPSPSNPTGRSDLPGIDLFVSTADPEKEPPLVTANTILSILAVDYPVEKVSCYLSDDGGALLSFEAMAEAASFADLWVPFCRKHNIEPRNPDSYFSLKIDPTKNKSRIDFVKDRRKIKREYDEFKVRINGLPDSIRRRSDAFNAREEMKALKQMRESGGDPTEPVKVPKATWMADGTHWPGTWAASTREHSKGDHAGILQVMLKPPSSDPLIGNSDDKVIDFSDTDTRLPMFVYVSREKRPGYDHNKKAGAMNALVRASAILSNGPFILNLDCDHYIYNCKAVREGMCFMMDRGGEDICYIQFPQRFEGIDPSDRYANNNTVFFDGNMRALDGVQGPVYVGTGTMFRRFALYGFDPPNPDKLLEKKESETEALTTSDFDPDLDVTQLPKRFGNSTLLAESIPIAEFQGRPLADHPAVKYGRPPGALRVPRDPLDATTVAESVSVISCWYEDKTEWGDRVGWIYGSVTEDVVTGYRMHNRGWRSVYCITKRDSFRGSAPINLTDRLHQVLRWATGSVEIFFSRNNAILASKRLKFLQRLAYLNVGIYPFTSLFLILYCFLPAFSLFSGQFIVRTLSISFLVYLLMITICLIGLAVLEVKWSGIGLEEWWRNEQWWLISGTSSHLYAVVQGVLKVIAGIEISFTLTTKSGGDDNEDIYADLYIVKWSSLMIPPIVIAMVNIIAIVVAFIRTIYQAVPQWSKLIGGAFFSFWVLAHLYPFAKGLMGRRGKTPTIVFVWAGLIAITISLLWTAINPNTGPAAAAEGVGGGGFQFP

SEQ ID NO: 100329 - protein, 1018 aa, Arabidopsis thaliana
  peptide (1)..(1018): Ceres Seq. ID no. 13604886
  misc_feature (1)..(669): Homolog of NCBI NO: 34419230 NR Description: TPA: cellulose synthase-like D3 [Oryza sativa]
  misc_feature (1)..(604): Homolog of NCBI NO: 15237873 NR Description: cellulose synthase family [Arabidopsis thaliana]
  misc_feature (1)..(108): Homolog of NCBI NO: 34897878 NR Description: Similar to Arabidopsis thaliana DNA chromosome 4,
  misc_feature (675)..(1001): Homolog of NCBI NO: 28411807 NR Description: cellulose synthase-4 [Oryza sativa (japonica
  misc_feature (91)..(378): Homolog of NCBI NO: 28411807 NR Description: cellulose synthase-4 [Oryza sativa (japonica
  misc_feature (471)..(608): Homolog of NCBI NO: 28411807 NR Description: cellulose synthase-4 [Oryza sativa (japonica
  misc_feature (675)..(1001): Homolog of NCBI NO: 9622880 NR Description: cellulose synthase-4 [Zea mays]
  misc_feature (91)..(378): Homolog of NCBI NO: 9622880 NR Description: cellulose synthase-4 [Zea mays]
  misc_feature (471)..(608): Homolog of NCBI NO: 9622880 NR Description: cellulose synthase-4 [Zea mays]
  misc_feature (675)..(1010): Homolog of NCBI NO: 9622882 NR Description: cellulose synthase-5 [Zea mays]
MDKVIDSDVTHPQMAGAKGSSCAMPACDGNVMKDERGKDVMPCECRFKICRDCFMDAQKETGLCPGCKEQYKIGDLDDDTPDYSSGALPLPAPGKDQRGNNNNMSMMKRNQNGEFDHNRWLFETQGTYGYGNAYWPQDEMYGDDMDEGMRGGMVETADKPWRPLSRRIPIPAAIISPYRLLIVIRFVVLCFFLTWRIRNPNEDAIWLWLMSIICELWFGFSWILDQIPKLCPINRSTDLEVLRDKFDMPSPSNPTGRSDLPGIDLFVSTADPEKEPPLVTANTILSILAVDYPVEKVSCYLSDDGGALLSFEAMAEAASFADLWVPFCRKHNIEPRNPDSYFSLKIDPTKNKSRIDFVKDRRKIKREYDEFKVRINGLPDSIRRRSDAFNAREEMKALKQMRESGGDPTEPVKVPKATWMADGTHWPGTWAASTREHSKGDHAGILQVMLKPPSSDPLIGNSDDKVIDFSDTDTRLPMFVYVSREKRPGYDHNKKAGAMNALVRASAILSNGPFILNLDCDHYIYNCKAVREGMCFMMDRGGEDICYIQFPQRFEGIDPSDRYANNNTVFFDGNMRALDGVQGPVYVGTGTMFRRFALYGFDPPNPDKLLEKKESETEALTTSDFDPDLDVTQLPKRFGNSTLLAESIPIAEFQGRPLADHPAVKYGRPPGALRVPRDPLDATTVAESVSVISCWYEDKTEWGDRVGWIYGSVTEDVVTGYRMHNRGWRSVYCITKRDSFRGSAPINLTDRLHQVLRWATGSVEIFFSRNNAILASKRLKFLQRLAYLNVGIYPFTSLFLILYCFLPAFSLFSGQFIVRTLSISFLVYLLMITICLIGLAVLEVKWSGIGLEEWWRNEQWWLISGTSSHLYAVVQGVLKVIAGIEISFTLTTKSGGDDNEDIYADLYIVKWSSLMIPPIVIAMVNIIAIVVAFIRTIYQAVPQWSKLIGGAFFSFWVLAHLYPFAKGLMGRRGKTPTIVFVWAGLIAITISLLWTAINPNTGPAAAAEGVGGGGFQFP

SEQ ID NO: 100330 - DNA, 1662 bp, Arabidopsis thaliana
  misc_feature (1)..(1662): Ceres Seq. ID no. 13604887
  misc_feature: MA Experiment ID: 108434 Result: Down-regulated in Transcription
  misc_feature: MA Experiment 108434 PARAMETER Experiment Name: At_Root_Tips_cDNA_P Parameter: Tissue Value: Root Tips
  misc_feature: MA Experiment ID: 108462 Result: Up-regulated in Transcription
  misc_feature: MA Experiment 108462 PARAMETER Experiment Name: At_Germinating_Seeds_cDNA_P Parameter: Age (day) Value: 2 vs. 0
  misc_feature: MA Experiment 108462 PARAMETER Experiment Name: At_Germinating_Seeds_cDNA_P Parameter: Tissue Value: Germinating Seeds
  misc_feature: MA Experiment ID: 108463 Result: Up-regulated in Transcription
  misc_feature: MA Experiment 108463 PARAMETER Experiment Name: At_Germinating_Seeds_cDNA_P Parameter: Age (day) Value: 3 vs. 0
  misc_feature: MA Experiment 108463 PARAMETER Experiment Name: At_Germinating_Seeds_cDNA_P Parameter: Tissue Value: Germinating Seeds
  misc_feature: MA Experiment ID: 108595 Result: Down-regulated in Transcription
  misc_feature: MA Experiment 108595 PARAMETER Experiment Name: At_Ler-pi_Ovule_cDNA_P Parameter: Plant Line Value: null
  misc_feature: MA Experiment ID: 20000069 Result: Down-regulated in Transcription
  misc_feature: MA Experiment 20000069 PARAMETER Experiment Name: At_100uM_ABA_Mutants_cDNA_P Parameter: Plant Line Value: CS23
  misc_feature: MA Experiment 20000069 PARAMETER Experiment Name: At_100uM_ABA_Mutants_cDNA_P Parameter: Timepoint (hr) Value: 6
  misc_feature: MA Experiment 20000069 PARAMETER Experiment Name: At_100uM_ABA_Mutants_cDNA_P Parameter: Tissue Value: Aerial
  misc_feature: MA Experiment 20000069 PARAMETER Experiment Name: At_100uM_ABA_Mutants_cDNA_P Parameter: Treatment Value: 100uM ABA vs. No Treatment
  misc_feature: MA Experiment ID: 20000072 Result: Down-regulated in Transcription
  misc_feature: MA Experiment 20000072 PARAMETER Experiment Name: At_100uM_ABA_Mutants_cDNA_P Parameter: Plant Line Value: CS8105
  misc_feature: MA Experiment 20000072 PARAMETER Experiment Name: At_100uM_ABA_Mutants_cDNA_P Parameter: Timepoint (hr) Value: 6
  misc_feature: MA Experiment 20000072 PARAMETER Experiment Name: At_100uM_ABA_Mutants_cDNA_P Parameter: Tissue Value: Aerial
  misc_feature: MA Experiment 20000072 PARAMETER Experiment Name: At_100uM_ABA_Mutants_cDNA_P Parameter: Treatment Value: 100uM ABA vs. No Treatment
  misc_feature: MA Experiment ID: 20000087 Result: Down-regulated in Transcription
  misc_feature: MA Experiment 20000087 PARAMETER Experiment Name: At_100uM_ABA_Mutants_cDNA_P Parameter: Plant Line Value: WS
  misc_feature: MA Experiment 20000087 PARAMETER Experiment Name: At_100uM_ABA_Mutants_cDNA_P Parameter: Timepoint (hr) Value: 6
  misc_feature: MA Experiment 20000087 PARAMETER Experiment Name: At_100uM_ABA_Mutants_cDNA_P Parameter: Tissue Value: Aerial
  misc_feature: MA Experiment 20000087 PARAMETER Experiment Name: At_100uM_ABA_Mutants_cDNA_P Parameter: Treatment Value: 100uM ABA vs. No Treatment
  misc_feature: MA Experiment ID: 20000180 Result: Up-regulated in Transcription
  misc_feature: MA Experiment 20000180 PARAMETER Experiment Name: At_Germinating_Seeds_P Parameter: Age (hr) Value: 24 vs. 0
  misc_feature: MA Experiment 20000180 PARAMETER Experiment Name: At_Germinating_Seeds_P Parameter: Tissue Value: Germinating Seeds
  misc_feature: MA Experiment ID: 20000184 Result: Up-regulated in Transcription
  misc_feature: MA Experiment 20000184 PARAMETER Experiment Name: At_Shoots__P Parameter: Age (day) Value: 7
  misc_feature: MA Experiment 20000184 PARAMETER Experiment Name: At_Shoots__P Parameter: Tissue Value: Shoots vs. Whole Plant
  misc_feature: MA Experiment ID: 20000185 Result: Down-regulated in Transcription
  misc_feature: MA Experiment 20000185 PARAMETER Experiment Name: At_Roots__P Parameter: Age (day) Value: 7 vs. 21
  misc_feature: MA Experiment 20000185 PARAMETER Experiment Name: At_Roots__P Parameter: Organism Value: A. thaliana
  misc_feature: MA Experiment 20000185 PARAMETER Experiment Name: At_Roots__P Parameter: Tissue Value: Roots vs. Whole Plant
  misc_feature: MA Experiment ID: 20000438 Result: Up-regulated in Transcription
  misc_feature: MA Experiment 20000438 PARAMETER Experiment Name: At_Shoots__P Parameter: Age (day) Value: 14
  misc_feature: MA Experiment 20000438 PARAMETER Experiment Name: At_Shoots__P Parameter: Tissue Value: Shoots vs. Whole Plant
  misc_feature: MA Experiment ID: 20000439 Result: Down-regulated in Transcription
  misc_feature: MA Experiment 20000439 PARAMETER Experiment Name: At_Roots__P Parameter: Age (day) Value: 14 vs. 21
  misc_feature: MA Experiment 20000439 PARAMETER Experiment Name: At_Roots__P Parameter: Organism Value: A. thaliana
  misc_feature: MA Experiment 20000439 PARAMETER Experiment Name: At_Roots__P Parameter: Tissue Value: Roots vs. Whole Plant
  misc_feature: MA Experiment ID: 20000794 Result: Down-regulated in Transcription
  misc_feature: MA Experiment 20000794 PARAMETER Experiment Name: At_Petals_P Parameter: Age (day) Value: 23-25 days
  misc_feature: MA Experiment 20000794 PARAMETER Experiment Name: At_Petals_P Parameter: Plant Line Value: WS
  misc_feature: MA Experiment 20000794 PARAMETER Experiment Name: At_Petals_P Parameter: Tissue Value: Petals vs. Whole plant
  misc_feature: MA Experiment ID: 20001905 Result: Down-regulated in Transcription
  misc_feature: MA Experiment 20001905 PARAMETER Experiment Name: At_Drought_Reproduction_P Parameter: Age (day) Value: 40
  misc_feature: MA Experiment 20001905 PARAMETER Experiment Name: At_Drought_Reproduction_P Parameter: Organism Value: A. thaliana
  misc_feature: MA Experiment 20001905 PARAMETER Experiment Name: At_Drought_Reproduction_P Parameter: Plant Line Value: WS
  misc_feature: MA Experiment 20001905 PARAMETER Experiment Name: At_Drought_Reproduction_P Parameter: Timepoint (day) Value: 10
  misc_feature: MA Experiment 20001905 PARAMETER Experiment Name: At_Drought_Reproduction_P Parameter: Tissue Value: Rosettes
  misc_feature: MA Experiment 20001905 PARAMETER Experiment Name: At_Drought_Reproduction_P Parameter: Treatment Value: Drought vs. No Drought
  misc_feature: MA Experiment ID: 20001906 Result: Down-regulated in Transcription
  misc_feature: MA Experiment 20001906 PARAMETER Experiment Name: At_Drought_Reproduction_P Parameter: Age (day) Value: 35
  misc_feature: MA Experiment 20001906 PARAMETER Experiment Name: At_Drought_Reproduction_P Parameter: Organism Value: A. thaliana
  misc_feature: MA Experiment 20001906 PARAMETER Experiment Name: At_Drought_Reproduction_P Parameter: Plant Line Value: WS
  misc_feature: MA Experiment 20001906 PARAMETER Experiment Name: At_Drought_Reproduction_P Parameter: Timepoint (day) Value: 5
  misc_feature: MA Experiment 20001906 PARAMETER Experiment Name: At_Drought_Reproduction_P Parameter: Tissue Value: Siliques
  misc_feature: MA Experiment 20001906 PARAMETER Experiment Name: At_Drought_Reproduction_P Parameter: Treatment Value: Drought vs. No Drought
  misc_feature: MA Experiment ID: 20001908 Result: Down-regulated in Transcription
  misc_feature: MA Experiment 20001908 PARAMETER Experiment Name: At_Drought_Reproduction_P Parameter: Age (day) Value: 40
  misc_feature: MA Experiment 20001908 PARAMETER Experiment Name: At_Drought_Reproduction_P Parameter: Organism Value: A. thaliana
  misc_feature: MA Experiment 20001908 PARAMETER Experiment Name: At_Drought_Reproduction_P Parameter: Plant Line Value: WS
  misc_feature: MA Experiment 20001908 PARAMETER Experiment Name: At_Drought_Reproduction_P Parameter: Timepoint (day) Value: 10
  misc_feature: MA Experiment 20001908 PARAMETER Experiment Name: At_Drought_Reproduction_P Parameter: Tissue Value: Siliques
  misc_feature: MA Experiment 20001908 PARAMETER Experiment Name: At_Drought_Reproduction_P Parameter: Treatment Value: Drought vs. No Drought
  misc_feature: MA Experiment ID: 20001911 Result: Down-regulated in Transcription
  misc_feature: MA Experiment 20001911 PARAMETER Experiment Name: At_Drought_Reproduction_P Parameter: Age (day) Value: 40
  misc_feature: MA Experiment 20001911 PARAMETER Experiment Name: At_Drought_Reproduction_P Parameter: Organism Value: A. thaliana
  misc_feature: MA Experiment 20001911 PARAMETER Experiment Name: At_Drought_Reproduction_P Parameter: Plant Line Value: WS
  misc_feature: MA Experiment 20001911 PARAMETER Experiment Name: At_Drought_Reproduction_P Parameter: Timepoint (day) Value: 10
  misc_feature: MA Experiment 20001911 PARAMETER Experiment Name: At_Drought_Reproduction_P Parameter: Tissue Value: Flowers
  misc_feature: MA Experiment 20001911 PARAMETER Experiment Name: At_Drought_Reproduction_P Parameter: Treatment Value: Drought vs. No Drought
atatcatcaccttccccactaatactctatagtttgtttttgttcttcttataatctttatattttcagcaaacgaaagggaagtgtgtcagaaatctcagagggtgagaatcccaatgaggatcttacccgaacctcgaggttcggttccgtgtcttctccttcttgtgtcggttctcttatcagcgactctctcactcgctcgtgtcgtcgaagttgtcggttacgccgagagcaagatcaaaaccccccatgcattttcaggacttcgagtgacgatcgactgtaaggtgaataaaggccattttgttacaaaaggttcgggaaacattgacgacaaaggaaagtttggtcttaatattcctcatgacattgtctccgacaacggagcgttaaaggaggagtgttacgctcagcttcacagcgcggcgggaacaccttgtccggctcacgacggccttgagtccaccaagatcgtgtttttatccaaatccggggataaacacattttgggtctcaaacaaaatctgaaattttcaccggagatttgcgtttccaaattcttctggcctatgcctaagttgcctccttttaagggctttgatcatcctttccctttacctccacctttggaacttccaccgtttctcaagaagccatgtccacctaaatacagtcctcctgtggaggttccacccccggtaccagtttacgagccgccgccaaagaaagagattcccccgccggttccggtttacgatccaccgcctaagaaagaggttccaccacctgtcccagtttacaagccaccaccaaaggtggagcttccaccgcctattcctaagaagccttgtccacctaaaccgccgaagatagagcacccacctccggttccggtttacaagccaccgccaaagatagagaagccacctccggttccggtttacaagcccccgccaaagatagagcacccacctcccgttccggtacacaagctaccgaagaagccatgtccgcctaagaaagttgatccaccgccggtgccagtccacaaaccaccaacgaagaagccttgtccgcctaagaaagttgatccaccgccggttccagtccacaagccgccgccaaagatagtcattccaccgccgaagatagagcacccacctccagttccggtttacaagccgccgccgaagatagagcatccaccaatctacataccaccaattgtgaagaagccgtgtcctccgccggtaccaatatacaaaccaccggttgtgatccccaagaagccatgccctccgccggtaccagtatacaaaccaccggtagtggtgattccaaagaagccatgtccgccacttccacagctcccaccacttccaaagtttccacctcttcctcctaaatacattcaccaccccaagttcgggaaatggcctccgttgcctccacacccttgagaaacattaaatacgtatatatagatatacgtatactcatgtataatcaacgtgtttgcctttttttaatattttatctttgcatatgttttatatcttgtttcttttgttggctttgagttctctttgtgtagactggttgtttatattcccgcaatcttccaacaataatatggtaatgatacgtttctcttttatc

SEQ ID NO: 100331 - protein, 448 aa, Arabidopsis thaliana; identical to SEQ ID NO: 26270
  peptide (1)..(448): Ceres Seq. ID no. 13604888
  misc_feature (152)..(447): Pfam Name: Extensin-like region Pfam Description: Extensin-like region
  misc_feature (1)..(448): Homolog of NCBI NO: 15234785 NR Description: proline-rich protein family [Arabidopsis thaliana]
  misc_feature (1)..(448): Homolog of NCBI NO: 7620015 NR Description: proline-rich protein 4 [Arabidopsis thaliana]
  misc_feature (1)..(448): Homolog of NCBI NO: 6782442 NR Description: proline-rich protein [Arabidopsis thaliana]
  misc_feature (16)..(446): Homolog of NCBI NO: 7489265 NR Description: proline-rich protein GPP1 - potato
  misc_feature (10)..(448): Homolog of NCBI NO: 7489265 NR Description: proline-rich protein GPP1 - potato
  misc_feature (1)..(286): Homolog of NCBI NO: 15226468 NR Description: proline-rich protein family [Arabidopsis thaliana]
  misc_feature (1)..(286): Homolog of NCBI NO: 7620011 NR Description: proline-rich protein 2 [Arabidopsis thaliana]
  misc_feature (152)..(448): Homolog of NCBI NO: 7489265 NR Description: proline-rich protein GPP1 - potato
  misc_feature (151)..(434): Homolog of NCBI NO: 7489265 NR Description: proline-rich protein GPP1 - potato
  misc_feature (152)..(445): Homolog of NCBI NO: 5917664 NR Description: extensin-like protein [Lycopersicon esculentum]

SEQ ID NO: 100332 - protein, 296 aa, Arabidopsis thaliana; identical to SEQ ID NO: 26271
  peptide (1)..(296): Ceres Seq. ID no. 13604889
  misc_feature (1)..(295): Pfam Name: Extensin-like region Pfam Description: Extensin-like region
  misc_feature (1)..(296): Homolog of NCBI NO: 15234785 NR Description: proline-rich protein family [Arabidopsis thaliana]
  misc_feature (1)..(296): Homolog of NCBI NO: 7620015 NR Description: proline-rich protein 4 [Arabidopsis thaliana]
  misc_feature (1)..(296): Homolog of NCBI NO: 6782442 NR Description: proline-rich protein [Arabidopsis thaliana]
  misc_feature (1)..(294): Homolog of NCBI NO: 7489265 NR Description: proline-rich protein GPP1 - potato
  misc_feature (1)..(296): Homolog of NCBI NO: 7489265 NR Description: proline-rich protein GPP1 - potato
  misc_feature (1)..(134): Homolog of NCBI NO: 15226468 NR Description: proline-rich protein family [Arabidopsis thaliana]
  misc_feature (1)..(134): Homolog of NCBI NO: 7620011 NR Description: proline-rich protein 2 [Arabidopsis thaliana]
  misc_feature (1)..(296): Homolog of NCBI NO: 7489265 NR Description: proline-rich protein GPP1 - potato
  misc_feature (1)..(282): Homolog of NCBI NO: 7489265 NR Description: proline-rich protein GPP1 - potato
  misc_feature (1)..(293): Homolog of NCBI NO: 5917664 NR Description: extensin-like protein [Lycopersicon esculentum]

SEQ ID NO: 100333 - DNA, 3736 bp, Arabidopsis thaliana
  misc_feature (1)..(3736): Ceres Seq. ID no. 13604890
  misc_feature: MA Experiment ID: 20000307 Result: Up-regulated in Transcription
  misc_feature: MA Experiment 20000307 PARAMETER Experiment Name: At_Germinating_Seeds_Sub_P Parameter: Age (hr) Value: 24 vs. 0
  misc_feature: MA Experiment 20000307 PARAMETER Experiment Name: At_Germinating_Seeds_Sub_P Parameter: Organism Value: A. thaliana
  misc_feature: MA Experiment 20000307 PARAMETER Experiment Name: At_Germinating_Seeds_Sub_P Parameter: Plant Line Value: WS
  misc_feature: MA Experiment 20000307 PARAMETER Experiment Name: At_Germinating_Seeds_Sub_P Parameter: Tissue Value: Germinating Seeds
gaattcgcggccgcgtcgatacggctgcgagaagacgacagaaggggattgtcgattcggtttatttcgtctccttcgtcttccactcttactagtgcatgctctgaatctgtatgtaatgggagttcaacagtctggatccattatcctagccgggtcgggtcaaggtctttgagtaagagagacaattcgttttgattcggtgtagaagacatcatgaatactggtggtcggctcattgctggctctcacaacagaaacgaattcgttctcattaacgccgatgagagtgccagaatacgatcagtacaagaactgagtgggcaaacatgtcaaatctgtggagatgaaatcgaattaacggttagcagtgagctctttgttgcttgcaacgaatgcgcattcccggtttgtagaccatgctatgagtatgaacgtagagaaggaaatcaagcttgtcctcagtgcaaaactcgatacaaaaggattaaaggtagtccacgggttgatggagatgatgaagaagaagaagacattgatgatcttgagtatgagtttgatcatgggatggaccctgaacatgccgctgaagccgcactctcttcacgccttaacaccggtcgtggtggattggattcagctccacctggctctcagattcctcttttgacttattgtgatgaagatgctgatatgtattctgatcgtcatgctcttatcgtgcctccttcaacgggatatgggaatcgcgtctatcctgcaccgtttacagattcttctgcacctccacaggcgagatcaatggttcctcagaaagatattgcggaatatggttatggaagtgttgcttggaaggaccgtatggaagtttggaagagacgacaaggcgaaaagcttcaagtcattaagcatgaaggaggaaacaatggtcgaggttccaatgatgacgacgaactagatgatcctgacatgcctatgatggatgaaggaagacaacctctctcaagaaagctacctattcgttcaagcagaataaatccttacaggatgttaattctgtgtcgcctcgcgattcttggtcttttctttcattatagaattctccatccagtcaatgatgcatatggattatggttaacgtcagttatatgcgagatatggtttgcagtgtcttggattcttgatcaattccccaaatggtatcctatagaacgtgaaacatacctcgatagactctctctcaggtacgagaaggaaggaaaaccgtcaggattagcacctgttgatgtttttgttagtacagtggatccgttgaaagagccacccttgattacagcaaacacagttctttccattctagcagttgattatcctgtggataaggttgcgtgttatgtatcagacgatggtgcagctatgcttacatttgaagctctctctgatacagctgagtttgctagaaaatgggttcctttttgtaagaagtttaatatcgagccacgagctcctgagtggtatttttctcagaagatggattacctgaagaacaaagttcatcctgcttttgtcagggaacgtcgtgctatgaagagagattatgaggagtttaaagtgaagataaatgcactggttgctactgcacagaaagtgcctgaggaaggttggactatgcaagatggaactccttggcctggaaacaacgtccgtgaccatcctggaatgattcaggtgttcttgggtcatagtggagttcgtgatacggatggtaatgagttaccacgtctagtgtatgtttctcgtgagaagcggcctggatttgatcaccacaagaaagctggagctatgaattccttgatccgagtctctgctgttctatcaaacgctccttaccttcttaatgtcgattgtgatcactacatcaacaacagcaaagcaattagagaatctatgtgtttcatgatggacccgcaatcgggaaagaaagtttgttatgttcagtttccgcagagatttgatgggattgatagacatgatagatactcaaaccgtaacgttgtgttctttgatattaacatgaaaggtcttgatgggatacaaggaccgatatatgtcgggacaggttgtgtgtttagaagacaggctctttatggttttgatgcaccaaagaagaagaaaccaccaggcaaaacctgtaactgttggcctaaatggtgttgtttgtgttgtgggttgagaaagaagagtaaaacgaaagccaaagataagaaaactaacactaaagagacttcaaagcagattcatgcgctagagaatgtcgacgaaggtgttatcgtcccagtgtcaaatgttgagaagagatctgaagcaacacaattgaaattggagaagaagtttggacaatctccggttttcgttgcctctgctgttctacagaacggtggagttccccgtaacgcaagccccgcatgtttgttaagagaagccattcaagttattagctgcgggtacgaagataaaaccgaatggggaaaagagatcgggtggatttatggatcggtgactgaagatatcctgacgggtttcaagatgcattgccatggatggagatctgtgtactgtatgcctaagcgtgcagcttttaaaggatctgctcctattaacttgtcagatcgtcttcatcaagttctacgttgggctcttggctctgtagagattttcttgagcagacattgtccgatatggtatggttatggtggtggtttaaaatggttggagagattctcttacatcaactctgtcgtctatccttggacttcacttccattgatcgtctattgttctctccccgcggtttgtttactcacaggaaaattcatcgtccctgagataagcaactacgcaggtatactcttcatgctcatgttcatatccatagcagtaactggaatcctcgaaatgcaatggggaggtgtcggaatcgatgattggtggagaaacgagcagttttgggtaatcggaggggcctcctcgcatctatttgctctgtttcaaggtttgctcaaagttctagccggagttaacacgaatttcacagtcacttcaaaagcagcagacgatggagctttctctgagctttacatcttcaagtggacaactttgttgattcctccgacaacacttctgatcattaacatcattggagttattgtcggcgtttctgatgccattagcaatggctatgactcatggggacctctctttgggagacttttcttcgctctttgggtcattgttcatttatacccattcctcaagggaatgcttgggaagcaagacaaaatgcctacgattattgtggtctggtctattcttctagcttcgatcttgacactcttgtgggtcagagttaacccgtttgtggctaaagggggaccagtgttggagatctgtggtctgaattgtggaaactaagatcctcagtgaaagaagagcaaaggagtttgtgttggagctttggaagcaaatgtgttgatgatgatgcaagtgtgtttgtagacgaagatgtgcagtttttactttttacgacttgttaaaccttttttgttacccctaaattaattcttttgttatcatggttatactaatagaattgtttgtttttcttttttacatgtacttttagttattccgtagttattgtataatactgataacgatcatatatacacactttgtt

SEQ ID NO: 100334 - protein, 1084 aa, Arabidopsis thaliana
  peptide (1)..(1084): Ceres Seq. ID no. 13604891
  misc_feature (477)..(1066): Homolog of NCBI NO: 27372782 NR Description: cellulose synthase-like protein D4 [Populus
  misc_feature (236)..(471): Homolog of NCBI NO: 27372782 NR Description: cellulose synthase-like protein D4 [Populus
  misc_feature (36)..(89): Homolog of NCBI NO: 27372782 NR Description: cellulose synthase-like protein D4 [Populus
  misc_feature (477)..(1066): Homolog of NCBI NO: 15237873 NR Description: cellulose synthase family [Arabidopsis thaliana]
  misc_feature (235)..(471): Homolog of NCBI NO: 15237873 NR Description: cellulose synthase family [Arabidopsis thaliana]
  misc_feature (36)..(103): Homolog of NCBI NO: 15237873 NR Description: cellulose synthase family [Arabidopsis thaliana]
  misc_feature (520)..(1066): Homolog of NCBI NO: 15217853 NR Description: cellulose synthase family [Arabidopsis thaliana]
  misc_feature (233)..(471): Homolog of NCBI NO: 15217853 NR Description: cellulose synthase family [Arabidopsis thaliana]
  misc_feature (32)..(105): Homolog of NCBI NO: 15217853 NR Description: cellulose synthase family [Arabidopsis thaliana]
  misc_feature (477)..(1066): Homolog of NCBI NO: 15228448 NR Description: cellulose synthase family [Arabidopsis thaliana] putative cellulose synthase catalytic subunit [Arabidopsis
MNTGGRLIAGSHNRNEFVLINADESARIRSVQELSGQTCQICGDEIELTVSSELFVACNECAFPVCRPCYEYERREGNQACPQCKTRYKRIKGSPRVDGDDEEEEDIDDLEYEFDHGMDPEHAAEAALSSRLNTGRGGLDSAPPGSQIPLLTYCDEDADMYSDRHALIVPPSTGYGNRVYPAPFTDSSAPPQARSMVPQKDIAEYGYGSVAWKDRMEVWKRRQGEKLQVIKHEGGNNGRGSNDDDELDDPDMPMMDEGRQPLSRKLPIRSSRINPYRMLILCRLAILGLFFHYRILHPVNDAYGLWLTSVICEIWFAVSWILDQFPKWYPIERETYLDRLSLRYEKEGKPSGLAPVDVFVSTVDPLKEPPLITANTVLSILAVDYPVDKVACYVSDDGAAMLTFEALSDTAEFARKWVPFCKKFNIEPRAPEWYFSQKMDYLKNKVHPAFVRERRAMKRDYEEFKVKINALVATAQKVPEEGWTMQDGTPWPGNNVRDHPGMIQVFLGHSGVRDTDGNELPRLVYVSREKRPGFDHHKKAGAMNSLIRVSAVLSNAPYLLNVDCDHYINNSKAIRESMCFMMDPQSGKKVCYVQFPQRFDGIDRHDRYSNRNVVFFDINMKGLDGIQGPIYVGTGCVFRRQALYGFDAPKKKKPPGKTCNCWPKWCCLCCGLRKKSKTKAKDKKTNTKETSKQIHALENVDEGVIVPVSNVEKRSEATQLKLEKKFGQSPVFVASAVLQNGGVPRNASPACLLREAIQVISCGYEDKTEWGKEIGWIYGSVTEDILTGFKMHCHGWRSVYCMPKRAAFKGSAPINLSDRLHQVLRWALGSVEIFLSRHCPIWYGYGGGLKWLERFSYINSVVYPWTSLPLIVYCSLPAVCLLTGKFIVPEISNYAGILFMLMFISIAVTGILEMQWGGVGIDDWWRNEQFWVIGGASSHLFALFQGLLKVLAGVNTNFTVTSKAADDGAFSELYIFKWTTLLIPPTTLLIINIIGVIVGVSDAISNGYDSWGPLFGRLFFALWVIVHLYPFLKGMLGKQDKMPTIIVVWSILLASILTLLWVRVNPFVAKGGPVLEICGLNCGN

SEQ ID NO: 100335 - protein, 967 aa, Arabidopsis thaliana
  peptide (1)..(967): Ceres Seq. ID no. 13604892
  misc_feature (360)..(949): Homolog of NCBI NO: 27372782 NR Description: cellulose synthase-like protein D4 [Populus
  misc_feature (119)..(354): Homolog of NCBI NO: 27372782 NR Description: cellulose synthase-like protein D4 [Populus
  misc_feature (360)..(949): Homolog of NCBI NO: 15237873 NR Description: cellulose synthase family [Arabidopsis thaliana]
  misc_feature (118)..(354): Homolog of NCBI NO: 15237873 NR Description: cellulose synthase family [Arabidopsis thaliana]
  misc_feature (403)..(949): Homolog of NCBI NO: 15217853 NR Description: cellulose synthase family [Arabidopsis thaliana]
  misc_feature (116)..(354): Homolog of NCBI NO: 15217853 NR Description: cellulose synthase family [Arabidopsis thaliana]
  misc_feature (360)..(949): Homolog of NCBI NO: 15228448 NR Description: cellulose synthase family [Arabidopsis thaliana] putative cellulose synthase catalytic subunit [Arabidopsis
  misc_feature (118)..(354): Homolog of NCBI NO: 15228448 NR Description: cellulose synthase family [Arabidopsis thaliana] putative cellulose synthase catalytic subunit [Arabidopsis
  misc_feature (589)..(962): Homolog of NCBI NO: 13925884 NR Description: cellulose synthase D-like protein [Nicotiana
  misc_feature (88)..(354): Homolog of NCBI NO: 13925884 NR Description: cellulose synthase D-like protein [Nicotiana
MDPEHAAEAALSSRLNTGRGGLDSAPPGSQIPLLTYCDEDADMYSDRHALIVPPSTGYGNRVYPAPFTDSSAPPQARSMVPQKDIAEYGYGSVAWKDRMEVWKRRQGEKLQVIKHEGGNNGRGSNDDDELDDPDMPMMDEGRQPLSRKLPIRSSRINPYRMLILCRLAILGLFFHYRILHPVNDAYGLWLTSVICEIWFAVSWILDQFPKWYPIERETYLDRLSLRYEKEGKPSGLAPVDVFVSTVDPLKEPPLITANTVLSILAVDYPVDKVACYVSDDGAAMLTFEALSDTAEFARKWVPFCKKFNIEPRAPEWYFSQKMDYLKNKVHPAFVRERRAMKRDYEEFKVKINALVATAQKVPEEGWTMQDGTPWPGNNVRDHPGMIQVFLGHSGVRDTDGNELPRLVYVSREKRPGFDHHKKAGAMNSLIRVSAVLSNAPYLLNVDCDHYINNSKAIRESMCFMMDPQSGKKVCYVQFPQRFDGIDRHDRYSNRNVVFFDINMKGLDGIQGPIYVGTGCVFRRQALYGFDAPKKKKPPGKTCNCWPKWCCLCCGLRKKSKTKAKDKKTNTKETSKQIHALENVDEGVIVPVSNVEKRSEATQLKLEKKFGQSPVFVASAVLQNGGVPRNASPACLLREAIQVISCGYEDKTEWGKEIGWIYGSVTEDILTGFKMHCHGWRSVYCMPKRAAFKGSAPINLSDRLHQVLRWALGSVEIFLSRHCPIWYGYGGGLKWLERFSYINSVVYPWTSLPLIVYCSLPAVCLLTGKFIVPEISNYAGILFMLMFISIAVTGILEMQWGGVGIDDWWRNEQFWVIGGASSHLFALFQGLLKVLAGVNTNFTVTSKAADDGAFSELYIFKWTTLLIPPTTLLIINIIGVIVGVSDAISNGYDSWGPLFGRLFFALWVIVHLYPFLKGMLGKQDKMPTIIVVWSILLASILTLLWVRVNPFVAKGGPVLEICGLNCGN

SEQ ID NO: 100336 - protein, 925 aa, Arabidopsis thaliana
  peptide (1)..(925): Ceres Seq. ID no. 13604893
  misc_feature (318)..(907): Homolog of NCBI NO: 27372782 NR Description: cellulose synthase-like protein D4 [Populus
  misc_feature (77)..(312): Homolog of NCBI NO: 27372782 NR Description: cellulose synthase-like protein D4 [Populus
  misc_feature (318)..(907): Homolog of NCBI NO: 15237873 NR Description: cellulose synthase family [Arabidopsis thaliana]
  misc_feature (76)..(312): Homolog of NCBI NO: 15237873 NR Description: cellulose synthase family [Arabidopsis thaliana]
  misc_feature (361)..(907): Homolog of NCBI NO: 15217853 NR Description: cellulose synthase family [Arabidopsis thaliana]
  misc_feature (74)..(312): Homolog of NCBI NO: 15217853 NR Description: cellulose synthase family [Arabidopsis thaliana]
  misc_feature (318)..(907): Homolog of NCBI NO: 15228448 NR Description: cellulose synthase family [Arabidopsis thaliana] putative cellulose synthase catalytic subunit [Arabidopsis
  misc_feature (76)..(312): Homolog of NCBI NO: 15228448 NR Description: cellulose synthase family [Arabidopsis thaliana] putative cellulose synthase catalytic subunit [Arabidopsis
  misc_feature (547)..(920): Homolog of NCBI NO: 13925884 NR Description: cellulose synthase D-like protein [Nicotiana
  misc_feature (46)..(312): Homolog of NCBI NO: 13925884 NR Description: cellulose synthase D-like protein [Nicotiana
MYSDRHALIVPPSTGYGNRVYPAPFTDSSAPPQARSMVPQKDIAEYGYGSVAWKDRMEVWKRRQGEKLQVIKHEGGNNGRGSNDDDELDDPDMPMMDEGRQPLSRKLPIRSSRINPYRMLILCRLAILGLFFHYRILHPVNDAYGLWLTSVICEIWFAVSWILDQFPKWYPIERETYLDRLSLRYEKEGKPSGLAPVDVFVSTVDPLKEPPLITANTVLSILAVDYPVDKVACYVSDDGAAMLTFEALSDTAEFARKWVPFCKKFNIEPRAPEWYFSQKMDYLKNKVHPAFVRERRAMKRDYEEFKVKINALVATAQKVPEEGWTMQDGTPWPGNNVRDHPGMIQVFLGHSGVRDTDGNELPRLVYVSREKRPGFDHHKKAGAMNSLIRVSAVLSNAPYLLNVDCDHYINNSKAIRESMCFMMDPQSGKKVCYVQFPQRFDGIDRHDRYSNRNVVFFDINMKGLDGIQGPIYVGTGCVFRRQALYGFDAPKKKKPPGKTCNCWPKWCCLCCGLRKKSKTKAKDKKTNTKETSKQIHALENVDEGVIVPVSNVEKRSEATQLKLEKKFGQSPVFVASAVLQNGGVPRNASPACLLREAIQVISCGYEDKTEWGKEIGWIYGSVTEDILTGFKMHCHGWRSVYCMPKRAAFKGSAPINLSDRLHQVLRWALGSVEIFLSRHCPIWYGYGGGLKWLERFSYINSVVYPWTSLPLIVYCSLPAVCLLTGKFIVPEISNYAGILFMLMFISIAVTGILEMQWGGVGIDDWWRNEQFWVIGGASSHLFALFQGLLKVLAGVNTNFTVTSKAADDGAFSELYIFKWTTLLIPPTTLLIINIIGVIVGVSDAISNGYDSWGPLFGRLFFALWVIVHLYPFLKGMLGKQDKMPTIIVVWSILLASILTLLWVRVNPFVAKGGPVLEICGLNCGN

SEQ ID NO: 100337 - DNA, 2603 bp, Arabidopsis thaliana
  misc_feature (1)..(2603): Ceres Seq. ID no. 13604898
  misc_feature: MA Experiment ID: 20001558 Result: Up-regulated in Transcription
  misc_feature: MA Experiment 20001558 PARAMETER Experiment Name: At_Drought_Soil_Dry_P Parameter: Age (day) Value: 27
  misc_feature: MA Experiment 20001558 PARAMETER Experiment Name: At_Drought_Soil_Dry_P Parameter: Organism Value: A. thaliana
  misc_feature: MA Experiment 20001558 PARAMETER Experiment Name: At_Drought_Soil_Dry_P Parameter: Plant Line Value: WS
  misc_feature: MA Experiment 20001558 PARAMETER Experiment Name: At_Drought_Soil_Dry_P Parameter: Post Timepoint (hr) Value: 6
  misc_feature: MA Experiment 20001558 PARAMETER Experiment Name: At_Drought_Soil_Dry_P Parameter: Post-Treatment Value: Re-Water vs. No Drought
  misc_feature: MA Experiment 20001558 PARAMETER Experiment Name: At_Drought_Soil_Dry_P Parameter: Timepoint (day) Value: 13
  misc_feature: MA Experiment 20001558 PARAMETER Experiment Name: At_Drought_Soil_Dry_P Parameter: Treatment Value: Drought vs. No Drought
actgtaaaagttttcaagtttcaatttttgttctcaatcgaaatcaaattgagtctctctcaaccacaaaaaatgattgttcaccgtataataccttcccgcgtaaaagaccctctcactcgatttaaacctctcaaaaacttgacaacttcttcatctcccgtattcgaaccctcttcttcttcttcttcttcttcttcttcggcttcgttttctgtttcagattctttcttggtggagaagatttgttttagtttgaagcaaggtaacaataatgtgagaaaccacctgattcggttaaaccctttagccgtcgttgaggttttataccgctgccgcaatgatttaactttaggtcaaagattcgtggatcaattaggtttccattttccgaatttcaagcatacgtctttgtctttaagcgctatgattcatattctcgtgaggagtggaagattatcagatgcacagagttgtcttcttaggatgattaggaggagtggtgtttctagactagagattgtgaattccttggattctacgtttagtaattgtggttccaatgattcggtttttgatttgttgattaggacttatgttcaggctaggaaacttagagaagcacatgaggcttttacattgctgagaagcaaaggttttacggtttctatcgatgcgtgtaacgctcttatcgggagcttggtgaggatcgggtgggttgaactggcttggggtgtttatcaggagatttctcggagtggtgttggtattaatgtctatactctcaatatcatggttaatgctttgtgcaaagatggtaaaatggaaaaagtcggaacctttttatcacaagtgcaagagaaaggggtttatccggatattgtaacatataatacattgattagtgcctactctagtaaaggtctcatggaagaggcatttgagttgatgaatgctatgccgggcaaagggtttagtcctggtgtttatacttataatactgtgataaatggactgtgtaagcatgggaaatatgagagagccaaggaagttttcgcggagatgttaagatccgggttgagtcctgactccactacctacagatcgttgctgatggaggcttgtaagaagggagatgtggttgaaacggaaaaggttttcagtgatatgagatctagagatgttgttcctgatttggtttgctttagctcgatgatgagtctttttactcggagtggaaatctcgataaggcattaatgtattttaacagtgtgaaggaggctggtctgattcctgacaatgtgatctataccattcttatccaagggtattgtagaaaaggtatgatctctgtagctatgaatttgagaaatgaaatgcttcagcagggttgtgctatggatgttgttacctacaacaccattttgcatggcttatgcaaacggaaaatgttgggtgaagcggataaattgttcaacgaaatgactgaaagggctttgtttccagattcttatactttaactatactgattgatggacattgtaagctcgggaatctgcagaacgcaatggagctctttcaaaagatgaaggaaaagagaatcagactcgatgttgtgacatacaacactctgttagatgggtttggtaaagtaggcgatatcgatacagcaaaagagatatgggcagatatggtatcaaaagagatacttcccactccaatatcttacagcattttggttaacgcgttgtgcagtaaaggccatctggctgaggcatttcgagtttgggatgaaatgatcagtaaaaatataaagccaacggtaatgatttgtaactctatgataaagggatattgtcgttctggtaatgcctcagatggagaaagctttttagagaagatgatctcggaaggttttgtgccggattgcatcagttacaacacattaatatatggttttgttagagaagaaaacatgagcaaagcttttggtttggtaaagaagatggaggaggagcaaggaggattagtacctgatgtatttacatataattcgatcttacatgggttttgtagacaaaatcagatgaaagaagccgaggttgtgctaaggaagatgatcgagagaggtgtcaatcccgataggtcaacgtatacttgtatgatcaatggatttgtttctcaagataacttaaccgaggcatttcggattcacgatgagatgctgcaaagaggattctctcctgatgataaattctgaatcagtatattttggattcttgctcaaattctacttgtgatagcttcaagctgatatcctagattgagttgatattggtgttttttggtcaaaggaccaaagatgtgtgtcactactcactacagaagctcaaggaacttgactttatcgaatagcaaaatggtccccgtacttgagaacatttcatattagacctcagtttcttgtaatctaccatttagtccttcaacatttatacgcatacgttttaattcttctgaaattaccaaattttgttgtatttagtcaaattatatgtatcagtattcataagtaaaatatatgaaagttgaaacagtagt

SEQ ID NO: 100338 - protein, 753 aa, Arabidopsis thaliana
  peptide (1)..(753): Ceres Seq. ID no. 13604899
  misc_feature (610)..(644): Pfam Name: PPR repeat Pfam Description: PPR repeat
  misc_feature (134)..(753): Homolog of NCBI NO: 34902570 NR Description: Putative indole-3-acetate
  misc_feature (139)..(719): Homolog of NCBI NO: 15221232 NR Description: indole-3-acetate beta-glucosyltransferase [Arabidopsis thaliana] >gi|25406853|pir||H86190 hypothetical
  misc_feature (56)..(651): Homolog of NCBI NO: 15226583 NR Description: pentatricopeptide (PPR) repeat-containing protein
  misc_feature (51)..(750): Homolog of NCBI NO: 34394343 NR Description: putative fertility restorer homologue [Oryza
  misc_feature (65)..(734): Homolog of NCBI NO: 15242446 NR Description: pentatricopeptide (PPR) repeat-containing protein
  misc_feature (161)..(728): Homolog of NCBI NO: 22329519 NR Description: pentatricopeptide (PPR) repeat-containing protein
  misc_feature (693)..(751): Homolog of NCBI NO: 22329519 NR Description: pentatricopeptide (PPR) repeat-containing protein
  misc_feature (145)..(746): Homolog of NCBI NO: 15241049 NR Description: pentatricopeptide (PPR) repeat-containing protein
  misc_feature (186)..(750): Homolog of NCBI NO: 15221300 NR Description: pentatricopeptide (PPR) repeat-containing protein
  misc_feature (183)..(707): Homolog of NCBI NO: 15221610 NR Description: pentatricopeptide (PPR) repeat-containing protein
TVKVFKFQFLFSIEIKLSLSQPQKMIVHRIIPSRVKDPLTRFKPLKNLTTSSSPVFEPSSSSSSSSSSASFSVSDSFLVEKICFSLKQGNNNVRNHLIRLNPLAVVEVLYRCRNDLTLGQRFVDQLGFHFPNFKHTSLSLSAMIHILVRSGRLSDAQSCLLRMIRRSGVSRLEIVNSLDSTFSNCGSNDSVFDLLIRTYVQARKLREAHEAFTLLRSKGFTVSIDACNALIGSLVRIGWVELAWGVYQEISRSGVGINVYTLNIMVNALCKDGKMEKVGTFLSQVQEKGVYPDIVTYNTLISAYSSKGLMEEAFELMNAMPGKGFSPGVYTYNTVINGLCKHGKYERAKEVFAEMLRSGLSPDSTTYRSLLMEACKKGDVVETEKVFSDMRSRDVVPDLVCFSSMMSLFTRSGNLDKALMYFNSVKEAGLIPDNVIYTILIQGYCRKGMISVAMNLRNEMLQQGCAMDVVTYNTILHGLCKRKMLGEADKLFNEMTERALFPDSYTLTILIDGHCKLGNLQNAMELFQKMKEKRIRLDVVTYNTLLDGFGKVGDIDTAKEIWADMVSKEILPTPISYSILVNALCSKGHLAEAFRVWDEMISKNIKPTVMICNSMIKGYCRSGNASDGESFLEKMISEGFVPDCISYNTLIYGFVREENMSKAFGLVKKMEEEQGGLVPDVFTYNSILHGFCRQNQMKEAEVVLRKMIERGVNPDRSTYTCMINGFVSQDNLTEAFRIHDEMLQRGFSPDDKF

SEQ ID NO: 100339 - protein, 729 aa, Arabidopsis thaliana
  peptide (1)..(729): Ceres Seq. ID no. 13604900
  misc_feature (586)..(620): Pfam Name: PPR repeat Pfam Description: PPR repeat
  misc_feature (110)..(729): Homolog of NCBI NO: 34902570 NR Description: Putative indole-3-acetate
  misc_feature (115)..(695): Homolog of NCBI NO: 15221232 NR Description: indole-3-acetate beta-glucosyltransferase [Arabidopsis thaliana] >gi|25406853|pir||H86190 hypothetical
  misc_feature (32)..(627): Homolog of NCBI NO: 15226583 NR Description: pentatricopeptide (PPR) repeat-containing protein
  misc_feature (27)..(726): Homolog of NCBI NO: 34394343 NR Description: putative fertility restorer homologue [Oryza
  misc_feature (41)..(710): Homolog of NCBI NO: 15242446 NR Description: pentatricopeptide (PPR) repeat-containing protein
  misc_feature (137)..(704): Homolog of NCBI NO: 22329519 NR Description: pentatricopeptide (PPR) repeat-containing protein
  misc_feature (669)..(727): Homolog of NCBI NO: 22329519 NR Description: pentatricopeptide (PPR) repeat-containing protein
  misc_feature (121)..(722): Homolog of NCBI NO: 15241049 NR Description: pentatricopeptide (PPR) repeat-containing protein
  misc_feature (162)..(726): Homolog of NCBI NO: 15221300 NR Description: pentatricopeptide (PPR) repeat-containing protein
  misc_feature (159)..(683): Homolog of NCBI NO: 15221610 NR Description: pentatricopeptide (PPR) repeat-containing protein
MIVHRIIPSRVKDPLTRFKPLKNLTTSSSPVFEPSSSSSSSSSSASFSVSDSFLVEKICFSLKQGNNNVRNHLIRLNPLAVVEVLYRCRNDLTLGQRFVDQLGFHFPNFKHTSLSLSAMIHILVRSGRLSDAQSCLLRMIRRSGVSRLEIVNSLDSTFSNCGSNDSVFDLLIRTYVQARKLREAHEAFTLLRSKGFTVSIDACNALIGSLVRIGWVELAWGVYQEISRSGVGINVYTLNIMVNALCKDGKMEKVGTFLSQVQEKGVYPDIVTYNTLISAYSSKGLMEEAFELMNAMPGKGFSPGVYTYNTVINGLCKHGKYERAKEVFAEMLRSGLSPDSTTYRSLLMEACKKGDVVETEKVFSDMRSRDVVPDLVCFSSMMSLFTRSGNLDKALMYFNSVKEAGLIPDNVIYTILIQGYCRKGMISVAMNLRNEMLQQGCAMDVVTYNTILHGLCKRKMLGEADKLFNEMTERALFPDSYTLTILIDGHCKLGNLQNAMELFQKMKEKRIRLDVVTYNTLLDGFGKVGDIDTAKEIWADMVSKEILPTPISYSILVNALCSKGHLAEAFRVWDEMISKNIKPTVMICNSMIKGYCRSGNASDGESFLEKMISEGFVPDCISYNTLIYGFVREENMSKAFGLVKKMEEEQGGLVPDVFTYNSILHGFCRQNQMKEAEVVLRKMIERGVNPDRSTYTCMINGFVSQDNLTEAFRIHDEMLQRGFSPDDKF

SEQ ID NO: 100340 - protein, 611 aa, Arabidopsis thaliana
  peptide (1)..(611): Ceres Seq. ID no. 13604901
  misc_feature (468)..(502): Pfam Name: PPR repeat Pfam Description: PPR repeat
  misc_feature (1)..(611): Homolog of NCBI NO: 34902570 NR Description: Putative indole-3-acetate
  misc_feature (1)..(577): Homolog of NCBI NO: 15221232 NR Description: indole-3-acetate beta-glucosyltransferase [Arabidopsis thaliana] >gi|25406853|pir||H86190 hypothetical
  misc_feature (1)..(509): Homolog of NCBI NO: 15226583 NR Description: pentatricopeptide (PPR) repeat-containing protein
  misc_feature (1)..(608): Homolog of NCBI NO: 34394343 NR Description: putative fertility restorer homologue [Oryza
  misc_feature (1)..(592): Homolog of NCBI NO: 15242446 NR Description: pentatricopeptide (PPR) repeat-containing protein
  misc_feature (19)..(586): Homolog of NCBI NO: 22329519 NR Description: pentatricopeptide (PPR) repeat-containing protein
  misc_feature (551)..(609): Homolog of NCBI NO: 22329519 NR Description: pentatricopeptide (PPR) repeat-containing protein
  misc_feature (3)..(604): Homolog of NCBI NO: 15241049 NR Description: pentatricopeptide (PPR) repeat-containing protein
  misc_feature (44)..(608): Homolog of NCBI NO: 15221300 NR Description: pentatricopeptide (PPR) repeat-containing protein
  misc_feature (41)..(565): Homolog of NCBI NO: 15221610 NR Description: pentatricopeptide (PPR) repeat-containing protein
MIHILVRSGRLSDAQSCLLRMIRRSGVSRLEIVNSLDSTFSNCGSNDSVFDLLIRTYVQARKLREAHEAFTLLRSKGFTVSIDACNALIGSLVRIGWVELAWGVYQEISRSGVGINVYTLNIMVNALCKDGKMEKVGTFLSQVQEKGVYPDIVTYNTLISAYSSKGLMEEAFELMNAMPGKGFSPGVYTYNTVINGLCKHGKYERAKEVFAEMLRSGLSPDSTTYRSLLMEACKKGDVVETEKVFSDMRSRDVVPDLVCFSSMMSLFTRSGNLDKALMYFNSVKEAGLIPDNVIYTILIQGYCRKGMISVAMNLRNEMLQQGCAMDVVTYNTILHGLCKRKMLGEADKLFNEMTERALFPDSYTLTILIDGHCKLGNLQNAMELFQKMKEKRIRLDVVTYNTLLDGFGKVGDIDTAKEIWADMVSKEILPTPISYSILVNALCSKGHLAEAFRVWDEMISKNIKPTVMICNSMIKGYCRSGNASDGESFLEKMISEGFVPDCISYNTLIYGFVREENMSKAFGLVKKMEEEQGGLVPDVFTYNSILHGFCRQNQMKEAEVVLRKMIERGVNPDRSTYTCMINGFVSQDNLTEAFRIHDEMLQRGFSPDDKF

SEQ ID NO: 100341 - DNA, 1953 bp, Arabidopsis thaliana
  misc_feature (1)..(1953): Ceres Seq. ID no. 13604902
  misc_feature: MA Experiment ID: 20000171 Result: Up-regulated in Transcription
  misc_feature: MA Experiment 20000171 PARAMETER Experiment Name: At_42deg_Heat_P Parameter: Age (day) Value: 14
  misc_feature: MA Experiment 20000171 PARAMETER Experiment Name: At_42deg_Heat_P Parameter: Organism Value: A. thaliana
  misc_feature: MA Experiment 20000171 PARAMETER Experiment Name: At_42deg_Heat_P Parameter: Plant Line Value: WS
  misc_feature: MA Experiment 20000171 PARAMETER Experiment Name: At_42deg_Heat_P Parameter: Temperature (deg C) Value: 42 vs. 22
  misc_feature: MA Experiment 20000171 PARAMETER Experiment Name: At_42deg_Heat_P Parameter: Timepoint (hr) Value: 1
  misc_feature: MA Experiment 20000171 PARAMETER Experiment Name: At_42deg_Heat_P Parameter: Tissue Value: Aerial
  misc_feature: MA Experiment ID: 20000173 Result: Up-regulated in Transcription
  misc_feature: MA Experiment 20000173 PARAMETER Experiment Name: At_42deg_Heat_P Parameter: Age (day) Value: 14
  misc_feature: MA Experiment 20000173 PARAMETER Experiment Name: At_42deg_Heat_P Parameter: Organism Value: A. thaliana
  misc_feature: MA Experiment 20000173 PARAMETER Experiment Name: At_42deg_Heat_P Parameter: Plant Line Value: WS
  misc_feature: MA Experiment 20000173 PARAMETER Experiment Name: At_42deg_Heat_P Parameter: Temperature (deg C) Value: 42 vs. 22
  misc_feature: MA Experiment 20000173 PARAMETER Experiment Name: At_42deg_Heat_P Parameter: Timepoint (hr) Value: 6
  misc_feature: MA Experiment 20000173 PARAMETER Experiment Name: At_42deg_Heat_P Parameter: Tissue Value: Aerial
  misc_feature: MA Experiment ID: 20000234 Result: Up-regulated in Transcription
  misc_feature: MA Experiment 20000234 PARAMETER Experiment Name: At_Siliques_P Parameter: Age (day) Value: 21
  misc_feature: MA Experiment 20000234 PARAMETER Experiment Name: At_Siliques_P Parameter: Organism Value: A. thaliana
  misc_feature: MA Experiment 20000234 PARAMETER Experiment Name: At_Siliques_P Parameter: Plant Line Value: WS
  misc_feature: MA Experiment 20000234 PARAMETER Experiment Name: At_Siliques_P Parameter: Tissue Value: Less Than 5mm Siliques vs. Whole Plant
  misc_feature: MA Experiment ID: 20000235 Result: Up-regulated in Transcription
  misc_feature: MA Experiment 20000235 PARAMETER Experiment Name: At_Siliques_P Parameter: Age (day) Value: 21
  misc_feature: MA Experiment 20000235 PARAMETER Experiment Name: At_Siliques_P Parameter: Organism Value: A. thaliana
  misc_feature: MA Experiment 20000235 PARAMETER Experiment Name: At_Siliques_P Parameter: Plant Line Value: WS
  misc_feature: MA Experiment 20000235 PARAMETER Experiment Name: At_Siliques_P Parameter: Tissue Value: 5-10mm Siliques vs. Whole Plant
  misc_feature: MA Experiment ID: 20000264 Result: Up-regulated in Transcription
  misc_feature: MA Experiment 20000264 PARAMETER Experiment Name: At_Open_Flower_P Parameter: Age (day) Value: 21
  misc_feature: MA Experiment 20000264 PARAMETER Experiment Name: At_Open_Flower_P Parameter: Plant Line Value: WS
  misc_feature: MA Experiment 20000264 PARAMETER Experiment Name: At_Open_Flower_P Parameter: Tissue Value: Open Flower vs. Whole Plant
atggaagatgacaaggatatatacacaaaagatggaactcttgacattcacaagaaaccagccaacaagaataaaactggaacctggaaagcttgcagattcattcttggaactgagtgctgtgaaagattagcttactatggaatgagtactaatctcatcaactatctcgagaaacaaatgaatatggaaaacgtctctgcttctaagagtgtcagtaactggtctggaacatgttacgctactcctttgatcggtgcttttatcgccgatgcttatctcggtcgatactggaccatcgcttcctttgtcgtcatctacattgccggaatgacgctattgacgatatcagcttcggttcctggtctaacaccaacctgcagcggagaaacctgtcacgcaacagcgggtcaaaccgctattacattcatagcgctttacttgatcgcactcggaactggagggatcaagccttgtgtctcttcctttggtgctgatcagtttgatgatacagacgaaaaagagaaagagtctaagagctctttctttaactggttctactttgtgatcaacgttggtgcaatgattgcttcctctgttctcgtttggattcagatgaatgttggttggggttggggtttaggtgttcccaccgtcgcaatggctatagccgtcgtgttcttcttcgccggaagcaacttctacaggctgcagaaaccaggaggaagtcctctcacaagaatgctgcaagtcattgtggcttcatgcagaaaatctaaagtgaaaattcctgaagatgaatctcttctctacgagaaccaagacgccgaaagcagtatcataggaagccgcaagctcgaacacaccaaaatattaacgttctttgataaggcagcagtggaaacagagagtgacaacaaaggagcagctaagtcgtcttcatggaagctatgcacagtgacacaagtagaagagctcaaagcactgatccgtctcttaccgatttgggccacagggattgttttcgcttcggtttatagccaaatggggactgtgtttgtactacaaggcaacacactggaccaacacatgggacctaacttcaaaatcccttccgcatcactctccttattcgatacgcttagtgtcctgttttgggcacctgtctacgacaagctaattgttcccttcgcccggaaatacacaggtcacgaacgcggattcacacagcttcaacggattggaatcgggcttgtaatctccatcttttctatggtctctgcgggaatcctcgaggtcgcaaggttaaactacgttcaaacacacaatctttacaatgaagagactatcccgatgacgattttctggcaagttccgcagtattttttggtgggttgcgccgaggttttcacgtttataggtcagcttgagttcttctatgaccaagctcctgatgctatgaggagtctctgctcggctttgtcgctcaccgcaattgcatttgggaactatctgagcacatttctggtgacattggtcactaaagtcacgagatcaggtggaagaccaggctggatcgctaagaacctcaacaatggtcatcttgattacttcttttggctattagctggtctgagtttcttgaatttcttggtctacctttggattgctaaatggtacacttacaagaaaacgaccgggcatgcgctttgatgatacaaaaaacataacgatggctgcaatcacgaattctgatttgaaattagtcgcaatgtttgataatctcgttactgaaacatatttacagatattatttttatttttcataaacaagcaagtttgaagttctttgcttgagtttaggttacaagatactacttttgaattcgactatccttattgctttgtggttgcagagttcaagggtttgtatttaacacaagcgttgtgctg

SEQ ID NO: 100342 - protein, 570 aa, Arabidopsis thaliana
  peptide (1)..(570): Ceres Seq. ID no. 13604903
  misc_feature (97)..(499): Pfam Name: POT family Pfam Description: POT family
  misc_feature (1)..(570): Homolog of NCBI NO: 15240905 NR Description: oligopeptide transporter - like protein
  misc_feature (59)..(570): Homolog of NCBI NO: 28973642 NR Description: putative oligopeptide transporter protein
  misc_feature (3)..(569): Homolog of NCBI NO: 15232435 NR Description: peptide transport - like protein [Arabidopsis
  misc_feature (6)..(567): Homolog of NCBI NO: 7489404 NR Description: peptide transport protein - barley
  misc_feature (9)..(566): Homolog of NCBI NO: 34394155 NR Description: putative peptide transport protein [Oryza sativa
  misc_feature (1)..(566): Homolog of NCBI NO: 4102839 NR Description: LeOPT1 [Lycopersicon esculentum]
  misc_feature (2)..(564): Homolog of NCBI NO: 15076661 NR Description: peptide transporter [Oryza sativa (japonica >gi|15076663|dbj|BAB62327.1| peptide transporter [Oryza sativa
  misc_feature (7)..(566): Homolog of NCBI NO: 15226861 NR Description: histidine transport protein (PTR2-B) [Arabidopsis
  misc_feature (7)..(566): Homolog of NCBI NO: 1076331 NR Description: histidine transport protein - Arabidopsis thaliana
  misc_feature (2)..(566): Homolog of NCBI NO: 31088360 NR Description: peptide transporter 1 [Vicia faba]
MEDDKDIYTKDGTLDIHKKPANKNKTGTWKACRFILGTECCERLAYYGMSTNLINYLEKQMNMENVSASKSVSNWSGTCYATPLIGAFIADAYLGRYWTIASFVVIYIAGMTLLTISASVPGLTPTCSGETCHATAGQTAITFIALYLIALGTGGIKPCVSSFGADQFDDTDEKEKESKSSFFNWFYFVINVGAMIASSVLVWIQMNVGWGWGLGVPTVAMAIAVVFFFAGSNFYRLQKPGGSPLTRMLQVIVASCRKSKVKIPEDESLLYENQDAESSIIGSRKLEHTKILTFFDKAAVETESDNKGAAKSSSWKLCTVTQVEELKALIRLLPIWATGIVFASVYSQMGTVFVLQGNTLDQHMGPNFKIPSASLSLFDTLSVLFWAPVYDKLIVPFARKYTGHERGFTQLQRIGIGLVISIFSMVSAGILEVARLNYVQTHNLYNEETIPMTIFWQVPQYFLVGCAEVFTFIGQLEFFYDQAPDAMRSLCSALSLTAIAFGNYLSTFLVTLVTKVTRSGGRPGWIAKNLNNGHLDYFFWLLAGLSFLNFLVYLWIAKWYTYKKTTGHAL

SEQ ID NO: 100343 - protein, 522 aa, Arabidopsis thaliana
  peptide (1)..(522): Ceres Seq. ID no. 13604904
  misc_feature (49)..(451): Pfam Name: POT family Pfam Description: POT family
  misc_feature (1)..(522): Homolog of NCBI NO: 15240905 NR Description: oligopeptide transporter - like protein
  misc_feature (11)..(522): Homolog of NCBI NO: 28973642 NR Description: putative oligopeptide transporter protein
  misc_feature (1)..(521): Homolog of NCBI NO: 15232435 NR Description: peptide transport - like protein [Arabidopsis
  misc_feature (1)..(519): Homolog of NCBI NO: 7489404 NR Description: peptide transport protein - barley
  misc_feature (1)..(518): Homolog of NCBI NO: 34394155 NR Description: putative peptide transport protein [Oryza sativa
  misc_feature (1)..(518): Homolog of NCBI NO: 4102839 NR Description: LeOPT1 [Lycopersicon esculentum]
  misc_feature (1)..(516): Homolog of NCBI NO: 15076661 NR Description: peptide transporter [Oryza sativa (japonica >gi|15076663|dbj|BAB62327.1| peptide transporter [Oryza sativa
  misc_feature (1)..(518): Homolog of NCBI NO: 15226861 NR Description: histidine transport protein (PTR2-B) [Arabidopsis
  misc_feature (1)..(518): Homolog of NCBI NO: 1076331 NR Description: histidine transport protein - Arabidopsis thaliana
  misc_feature (1)..(518): Homolog of NCBI NO: 31088360 NR Description: peptide transporter 1 [Vicia faba]
MSTNLINYLEKQMNMENVSASKSVSNWSGTCYATPLIGAFIADAYLGRYWTIASFVVIYIAGMTLLTISASVPGLTPTCSGETCHATAGQTAITFIALYLIALGTGGIKPCVSSFGADQFDDTDEKEKESKSSFFNWFYFVINVGAMIASSVLVWIQMNVGWGWGLGVPTVAMAIAVVFFFAGSNFYRLQKPGGSPLTRMLQVIVASCRKSKVKIPEDESLLYENQDAESSIIGSRKLEHTKILTFFDKAAVETESDNKGAAKSSSWKLCTVTQVEELKALIRLLPIWATGIVFASVYSQMGTVFVLQGNTLDQHMGPNFKIPSASLSLFDTLSVLFWAPVYDKLIVPFARKYTGHERGFTQLQRIGIGLVISIFSMVSAGILEVARLNYVQTHNLYNEETIPMTIFWQVPQYFLVGCAEVFTFIGQLEFFYDQAPDAMRSLCSALSLTAIAFGNYLSTFLVTLVTKVTRSGGRPGWIAKNLNNGHLDYFFWLLAGLSFLNFLVYLWIAKWYTYKKTTGHAL

SEQ ID NO: 100344 - protein, 510 aa, Arabidopsis thaliana
  peptide (1)..(510): Ceres Seq. ID no. 13604905
  misc_feature (37)..(439): Pfam Name: POT family Pfam Description: POT family
  misc_feature (1)..(510): Homolog of NCBI NO: 15240905 NR Description: oligopeptide transporter - like protein
  misc_feature (1)..(510): Homolog of NCBI NO: 28973642 NR Description: putative oligopeptide transporter protein
  misc_feature (1)..(509): Homolog of NCBI NO: 15232435 NR Description: peptide transport - like protein [Arabidopsis
  misc_feature (1)..(507): Homolog of NCBI NO: 7489404 NR Description: peptide transport protein - barley
  misc_feature (1)..(506): Homolog of NCBI NO: 34394155 NR Description: putative peptide transport protein [Oryza sativa
  misc_feature (1)..(506): Homolog of NCBI NO: 4102839 NR Description: LeOPT1 [Lycopersicon esculentum]
  misc_feature (1)..(504): Homolog of NCBI NO: 15076661 NR Description: peptide transporter [Oryza sativa (japonica >gi|15076663|dbj|BAB62327.1| peptide transporter [Oryza sativa
  misc_feature (1)..(506): Homolog of NCBI NO: 15226861 NR Description: histidine transport protein (PTR2-B) [Arabidopsis
  misc_feature (1)..(506): Homolog of NCBI NO: 1076331 NR Description: histidine transport protein - Arabidopsis thaliana
  misc_feature (1)..(506): Homolog of NCBI NO: 31088360 NR Description: peptide transporter 1 [Vicia faba]
MNMENVSASKSVSNWSGTCYATPLIGAFIADAYLGRYWTIASFVVIYIAGMTLLTISASVPGLTPTCSGETCHATAGQTAITFIALYLIALGTGGIKPCVSSFGADQFDDTDEKEKESKSSFFNWFYFVINVGAMIASSVLVWIQMNVGWGWGLGVPTVAMAIAVVFFFAGSNFYRLQKPGGSPLTRMLQVIVASCRKSKVKIPEDESLLYENQDAESSIIGSRKLEHTKILTFFDKAAVETESDNKGAAKSSSWKLCTVTQVEELKALIRLLPIWATGIVFASVYSQMGTVFVLQGNTLDQHMGPNFKIPSASLSLFDTLSVLFWAPVYDKLIVPFARKYTGHERGFTQLQRIGIGLVISIFSMVSAGILEVARLNYVQTHNLYNEETIPMTIFWQVPQYFLVGCAEVFTFIGQLEFFYDQAPDAMRSLCSALSLTAIAFGNYLSTFLVTLVTKVTRSGGRPGWIAKNLNNGHLDYFFWLLAGLSFLNFLVYLWIAKWYTYKKTTGHAL

SEQ ID NO: 100345 - DNA, 1575 bp, Arabidopsis thaliana
  misc_feature (1)..(1575): Ceres Seq. ID no. 13604906
  misc_feature: MA Experiment ID: 20000265 Result: Up-regulated in Transcription
  misc_feature: MA Experiment 20000265 PARAMETER Experiment Name: At_Open_Flower_P Parameter: Age (day) Value: 21
  misc_feature: MA Experiment 20000265 PARAMETER Experiment Name: At_Open_Flower_P Parameter: Plant Line Value: WS
  misc_feature: MA Experiment 20000265 PARAMETER Experiment Name: At_Open_Flower_P Parameter: Tissue Value: Closed Flower vs. Whole Plant
  misc_feature: MA Experiment ID: 20000286 Result: Up-regulated in Transcription
  misc_feature: MA Experiment 20000286 PARAMETER Experiment Name: At_Open_Flower_P Parameter: Age (day) Value: 21
  misc_feature: MA Experiment 20000286 PARAMETER Experiment Name: At_Open_Flower_P Parameter: Plant Line Value: WS
  misc_feature: MA Experiment 20000286 PARAMETER Experiment Name: At_Open_Flower_P Parameter: Tissue Value: Half Open vs. Whole Plant
  misc_feature: MA Experiment ID: 20000495 Result: Up-regulated in Transcription
  misc_feature: MA Experiment 20000495 PARAMETER Experiment Name: At_Guard_Cells_P Parameter: Harvest Date Value: 8/2/2002
  misc_feature: MA Experiment 20000495 PARAMETER Experiment Name: At_Guard_Cells_P Parameter: Organism Value: A. thaliana
  misc_feature: MA Experiment 20000495 PARAMETER Experiment Name: At_Guard_Cells_P Parameter: Tissue Value: Guard Cells vs. Leaves
acttgtcagagacagaagattaaagaagaagaggcgtttctctctctttttttgcttcagaaaaaatggggtttttcttgtgttcctcttcttcaatcttcttcaagttcggaatctctataatctttctagtttctttctctggtttaactccttcagaagcttatgatcctttggacccgagtgggaacattactgtcaaatgggatatcataacctggactggagatggctatgtggcgactgtaacggtatataattttcagcaatatcgacacattcaagctccaggttggactcttggatggtcatgggcaaagagagaggttatatggggaatgaatggaggacaaaccacagaacaaggagattgttctaaattcaaaggaaccattcctcattgctgtaaaaagacaccttctgttgttgatctcttacctggatctccttacaatcagcagattgctaattgttgcagagggggtgtgcttaactcgtgggctcaagatcccgcaactgctgtttccgctttccagcttactgttggacaagctggaaccacaaataagacagttagggtacctaagaatttcactctcaaagctcctggaccgggatatacttgtagccccgcgaagattgtaaaaccgactagattcatcggtactgataaacgaagagttactcaagcattaatgacttggaatgtaacttgcacatactcgcagttcttagctcagaaaacaccaacttgctgtgtatctctttcatcgttttataacaagacaatagtttcttgtccaacatgctcttgtggatgcagaaacacttctcagccagggaattgtgtagacccaaaaggtccacggatagcatcagtcattccaaatccggggaagaacgcatatataccgcctctggtccaatgtacaaagcatatgtgtccagttagaatccactggcatgtgaaagtcaactacaaacagtactggagagttaaagtcaccatcacaaatttcaactacaacatgaactattcacagtggaatctcgtcgtgcagcatccgaatttcgacaatctaactcagacttttagcttcaactataaacctctgactccttatgcttccataaatgatactgggattctctggggaataaagttctacaatgatctgttgatgcaagctgggccatttggtaatgtacaatctgagctacttttccagaaagaagcatcagctttcacatttgagaaaggttgggcgtttccaagaagaatctatttcaatggagataactgtgtgatgcctcctcctgattcttacccttggctgcccaataccggctcgcacaaatcagtcggttccctgtttgcagcaatggccttgttactgattgtgttcctacatggaaacttgtaagaatcatcaagtgtagaattcttctgctgcagtttttcgaactgatataacccatcaagagagagttggtagcttagttttttgtgttctctcttgtctgtcctcttcctgtacaacgctttaatattagatggttaactagatccccttg

SEQ ID NO: 100346 - protein, 452 aa, Arabidopsis thaliana
  peptide (1)..(452): Ceres Seq. ID no. 13604907
  misc_feature (57)..(221): Pfam Name: Phytochelatin synthetase-like conserved region Pfam Description: Phytochelatin synthetase-like conserved region
  misc_feature (1)..(452): Homolog of NCBI NO: 15232863 NR Description: predicted GPI-anchored protein [Arabidopsis >gi|6041808|gb|AAF02128.1|AC009755_21 unknown protein
  misc_feature (11)..(448): Homolog of NCBI NO: 13477083 NR Description: phytochelatin synthetase-like protein
  misc_feature (11)..(448): Homolog of NCBI NO: 18406342 NR Description: phytochelatin synthetase-related protein
  misc_feature (11)..(448): Homolog of NCBI NO: 21618129 NR Description: phytochelatin synthetase-like protein
  misc_feature (1)..(447): Homolog of NCBI NO: 21553837 NR Description: phytochelatin synthetase-like protein
  misc_feature (1)..(447): Homolog of NCBI NO: 18424412 NR Description: phytochelatin synthetase - like protein
  misc_feature (11)..(429): Homolog of NCBI NO: 34394569 NR Description: putative phytochelatin synthetase [Oryza sativa
  misc_feature (11)..(265): Homolog of NCBI NO: 10092257 NR Description: unknown protein; 31818-33764 [Arabidopsis
  misc_feature (303)..(448): Homolog of NCBI NO: 10092257 NR Description: unknown protein; 31818-33764 [Arabidopsis
  misc_feature (26)..(426): Homolog of NCBI NO: 30090026 NR Description: phytochelatin synthetase-like protein 2 [Sorghum
MGFFLCSSSSIFFKFGISIIFLVSFSGLTPSEAYDPLDPSGNITVKWDIITWTGDGYVATVTVYNFQQYRHIQAPGWTLGWSWAKREVIWGMNGGQTTEQGDCSKFKGTIPHCCKKTPSVVDLLPGSPYNQQIANCCRGGVLNSWAQDPATAVSAFQLTVGQAGTTNKTVRVPKNFTLKAPGPGYTCSPAKIVKPTRFIGTDKRRVTQALMTWNVTCTYSQFLAQKTPTCCVSLSSFYNKTIVSCPTCSCGCRNTSQPGNCVDPKGPRIASVIPNPGKNAYIPPLVQCTKHMCPVRIHWHVKVNYKQYWRVKVTITNFNYNMNYSQWNLVVQHPNFDNLTQTFSFNYKPLTPYASINDTGILWGIKFYNDLLMQAGPFGNVQSELLFQKEASAFTFEKGWAFPRRIYFNGDNCVMPPPDSYPWLPNTGSHKSVGSLFAAMALLLIVFLHGNL

SEQ ID NO: 100347 - protein, 361 aa, Arabidopsis thaliana
  peptide (1)..(361): Ceres Seq. ID no. 13604908
  misc_feature (1)..(130): Pfam Name: Phytochelatin synthetase-like conserved region Pfam Description: Phytochelatin synthetase-like conserved region
  misc_feature (1)..(361): Homolog of NCBI NO: 15232863 NR Description: predicted GPI-anchored protein [Arabidopsis >gi|6041808|gb|AAF02128.1|AC009755_21 unknown protein
  misc_feature (1)..(357): Homolog of NCBI NO: 13477083 NR Description: phytochelatin synthetase-like protein
  misc_feature (1)..(357): Homolog of NCBI NO: 18406342 NR Description: phytochelatin synthetase-related protein
  misc_feature (1)..(357): Homolog of NCBI NO: 21618129 NR Description: phytochelatin synthetase-like protein
  misc_feature (1)..(356): Homolog of NCBI NO: 21553837 NR Description: phytochelatin synthetase-like protein
  misc_feature (1)..(356): Homolog of NCBI NO: 18424412 NR Description: phytochelatin synthetase - like protein
  misc_feature (1)..(338): Homolog of NCBI NO: 34394569 NR Description: putative phytochelatin synthetase [Oryza sativa
  misc_feature (1)..(174): Homolog of NCBI NO: 10092257 NR Description: unknown protein; 31818-33764 [Arabidopsis
  misc_feature (212)..(357): Homolog of NCBI NO: 10092257 NR Description: unknown protein; 31818-33764 [Arabidopsis
  misc_feature (1)..(335): Homolog of NCBI NO: 30090026 NR Description: phytochelatin synthetase-like protein 2 [Sorghum
MNGGQTTEQGDCSKFKGTIPHCCKKTPSVVDLLPGSPYNQQIANCCRGGVLNSWAQDPATAVSAFQLTVGQAGTTNKTVRVPKNFTLKAPGPGYTCSPAKIVKPTRFIGTDKRRVTQALMTWNVTCTYSQFLAQKTPTCCVSLSSFYNKTIVSCPTCSCGCRNTSQPGNCVDPKGPRIASVIPNPGKNAYIPPLVQCTKHMCPVRIHWHVKVNYKQYWRVKVTITNFNYNMNYSQWNLVVQHPNFDNLTQTFSFNYKPLTPYASINDTGILWGIKFYNDLLMQAGPFGNVQSELLFQKEASAFTFEKGWAFPRRIYFNGDNCVMPPPDSYPWLPNTGSHKSVGSLFAAMALLLIVFLHGNL

SEQ ID NO: 100348 - protein, 242 aa, Arabidopsis thaliana
  peptide (1)..(242): Ceres Seq. ID no. 13604909
  misc_feature (1)..(242): Homolog of NCBI NO: 15232863 NR Description: predicted GPI-anchored protein [Arabidopsis >gi|6041808|gb|AAF02128.1|AC009755_21 unknown protein
  misc_feature (1)..(238): Homolog of NCBI NO: 13477083 NR Description: phytochelatin synthetase-like protein
  misc_feature (1)..(238): Homolog of NCBI NO: 18406342 NR Description: phytochelatin synthetase-related protein
  misc_feature (1)..(238): Homolog of NCBI NO: 21618129 NR Description: phytochelatin synthetase-like protein
  misc_feature (1)..(237): Homolog of NCBI NO: 21553837 NR Description: phytochelatin synthetase-like protein
  misc_feature (1)..(237): Homolog of NCBI NO: 18424412 NR Description: phytochelatin synthetase - like protein
  misc_feature (1)..(219): Homolog of NCBI NO: 34394569 NR Description: putative phytochelatin synthetase [Oryza sativa
  misc_feature (1)..(55): Homolog of NCBI NO: 10092257 NR Description: unknown protein; 31818-33764 [Arabidopsis
  misc_feature (93)..(238): Homolog of NCBI NO: 10092257 NR Description: unknown protein; 31818-33764 [Arabidopsis
  misc_feature (1)..(216): Homolog of NCBI NO: 30090026 NR Description: phytochelatin synthetase-like protein 2 [Sorghum
MTWNVTCTYSQFLAQKTPTCCVSLSSFYNKTIVSCPTCSCGCRNTSQPGNCVDPKGPRIASVIPNPGKNAYIPPLVQCTKHMCPVRIHWHVKVNYKQYWRVKVTITNFNYNMNYSQWNLVVQHPNFDNLTQTFSFNYKPLTPYASINDTGILWGIKFYNDLLMQAGPFGNVQSELLFQKEASAFTFEKGWAFPRRIYFNGDNCVMPPPDSYPWLPNTGSHKSVGSLFAAMALLLIVFLHGNL

SEQ ID NO: 100349 - DNA, 1360 bp, Arabidopsis thaliana
  misc_feature (1)..(1360): Ceres Seq. ID no. 13604910
  misc_feature: MA Experiment ID: 20000184 Result: Down-regulated in Transcription
  misc_feature: MA Experiment 20000184 PARAMETER Experiment Name: At_Shoots__P Parameter: Age (day) Value: 7
  misc_feature: MA Experiment 20000184 PARAMETER Experiment Name: At_Shoots__P Parameter: Tissue Value: Shoots vs. Whole Plant
  misc_feature: MA Experiment ID: 20000185 Result: Down-regulated in Transcription
  misc_feature: MA Experiment 20000185 PARAMETER Experiment Name: At_Roots__P Parameter: Age (day) Value: 7 vs. 21
  misc_feature: MA Experiment 20000185 PARAMETER Experiment Name: At_Roots__P Parameter: Organism Value: A. thaliana
  misc_feature: MA Experiment 20000185 PARAMETER Experiment Name: At_Roots__P Parameter: Tissue Value: Roots vs. Whole Plant
  misc_feature: MA Experiment ID: 20000234 Result: Up-regulated in Transcription
  misc_feature: MA Experiment 20000234 PARAMETER Experiment Name: At_Siliques_P Parameter: Age (day) Value: 21
  misc_feature: MA Experiment 20000234 PARAMETER Experiment Name: At_Siliques_P Parameter: Organism Value: A. thaliana
  misc_feature: MA Experiment 20000234 PARAMETER Experiment Name: At_Siliques_P Parameter: Plant Line Value: WS
  misc_feature: MA Experiment 20000234 PARAMETER Experiment Name: At_Siliques_P Parameter: Tissue Value: Less Than 5mm Siliques vs. Whole Plant
  misc_feature: MA Experiment ID: 20000235 Result: Up-regulated in Transcription
  misc_feature: MA Experiment 20000235 PARAMETER Experiment Name: At_Siliques_P Parameter: Age (day) Value: 21
  misc_feature: MA Experiment 20000235 PARAMETER Experiment Name: At_Siliques_P Parameter: Organism Value: A. thaliana
  misc_feature: MA Experiment 20000235 PARAMETER Experiment Name: At_Siliques_P Parameter: Plant Line Value: WS
  misc_feature: MA Experiment 20000235 PARAMETER Experiment Name: At_Siliques_P Parameter: Tissue Value: 5-10mm Siliques vs. Whole Plant
  misc_feature: MA Experiment ID: 20000264 Result: Up-regulated in Transcription
  misc_feature: MA Experiment 20000264 PARAMETER Experiment Name: At_Open_Flower_P Parameter: Age (day) Value: 21
  misc_feature: MA Experiment 20000264 PARAMETER Experiment Name: At_Open_Flower_P Parameter: Plant Line Value: WS
  misc_feature: MA Experiment 20000264 PARAMETER Experiment Name: At_Open_Flower_P Parameter: Tissue Value: Open Flower vs. Whole Plant
  misc_feature: MA Experiment ID: 20000265 Result: Up-regulated in Transcription
  misc_feature: MA Experiment 20000265 PARAMETER Experiment Name: At_Open_Flower_P Parameter: Age (day) Value: 21
  misc_feature: MA Experiment 20000265 PARAMETER Experiment Name: At_Open_Flower_P Parameter: Plant Line Value: WS
  misc_feature: MA Experiment 20000265 PARAMETER Experiment Name: At_Open_Flower_P Parameter: Tissue Value: Closed Flower vs. Whole Plant
  misc_feature: MA Experiment ID: 20000286 Result: Up-regulated in Transcription
  misc_feature: MA Experiment 20000286 PARAMETER Experiment Name: At_Open_Flower_P Parameter: Age (day) Value: 21
  misc_feature: MA Experiment 20000286 PARAMETER Experiment Name: At_Open_Flower_P Parameter: Plant Line Value: WS
  misc_feature: MA Experiment 20000286 PARAMETER Experiment Name: At_Open_Flower_P Parameter: Tissue Value: Half Open vs. Whole Plant
  misc_feature: MA Experiment ID: 20000438 Result: Down-regulated in Transcription
  misc_feature: MA Experiment 20000438 PARAMETER Experiment Name: At_Shoots__P Parameter: Age (day) Value: 14
  misc_feature: MA Experiment 20000438 PARAMETER Experiment Name: At_Shoots__P Parameter: Tissue Value: Shoots vs. Whole Plant
  misc_feature: MA Experiment ID: 20000794 Result: Up-regulated in Transcription
  misc_feature: MA Experiment 20000794 PARAMETER Experiment Name: At_Petals_P Parameter: Age (day) Value: 23-25 days
  misc_feature: MA Experiment 20000794 PARAMETER Experiment Name: At_Petals_P Parameter: Plant Line Value: WS
  misc_feature: MA Experiment 20000794 PARAMETER Experiment Name: At_Petals_P Parameter: Tissue Value: Petals vs. Whole plant
ataacttttatagattcacaaaaacttttcttcagattcacaatctcatcacaacccttcaaaaagagaaaagatctaaagaataaacaagagccctaatatcaaatcacaaccaaaaaaaccaaagaaagctaattaaagttttctctctagctattcctcttcttttcttgttcttgaaaactagggtttacttcaccaaaagataagatctttccccagaaaaagcaatacccaagtcatgtttctgtgtgtctgtatatagataaaacattacataccctaataaggttacacaaatagctataaaagagggaaaataagatagggattttttggggtgaggaaagatgggaagaggaagagtagagctcaagaggatagagaacaaaatcaacagacaagtgacgtttgctaaacgtagaaatggtttgctgaaaaaagcttatgagctttctgttctctgcgatgctgaagtctctctcatcgtcttctccaaccgtggcaagctctacgagttctgcagcacctccaacatgctcaagacactggaaaggtatcagaagtgtagctatggctccattgaagtcaacaacaaacctgctaaagagcttgagaacagctacagagagtacttgaagctgaaaggtagatatgaaaatctgcaacgtcagcagagaaatcttcttggagaggatcttggacctctgaattcaaaggagctagagcagcttgagcgtcaactagacggctctctgaagcaagttcgctgcatcaagacacagtatatgcttgaccagctctctgatcttcaaggtaaggagcatatcttgcttgatgccaacagagctttgtcaatgaagctggaagatatgatcggcgtgagacatcaccatataggaggaggatgggaaggtggtgatcaacagaatattgcctatggacatcctcaggctcattctcagggactataccaatctcttgaatgtgatcccactttgcaaattggatatagccatccagtgtgctcagagcaaatggctgtgacggtgcaaggtcagtcccaacaaggaaacggctacatccctggctggatgctgtgagcgatacttcttcccccaataaagatcttaagcaagtactggtggggtcttcgtggtgtgatcttagatcttatgcatatgaataataatgttattgcacaagacttttgcttttgtagacacaagtggctatagctgtaatagccttcaacatctctcttctgtttcaggatttgtttgtgcctattgtaattgcttatatatgtatggtttgtataatgtgtgaaatgttaacatcgaccatgtctcatctggtg

SEQ ID NO: 100350 - protein, 250 aa, Arabidopsis thaliana
  peptide (1)..(250): Ceres Seq. ID no. 13604911
  misc_feature (75)..(174): Pfam Name: K-box region Pfam Description: K-box region
  misc_feature (1)..(250): Homolog of NCBI NO: 15232883 NR Description: floral homeotic protein AGL4 [Arabidopsis
  misc_feature (1)..(250): Homolog of NCBI NO: 28393318 NR Description: putative floral homeotic protein AGL4
  misc_feature (1)..(250): Homolog of NCBI NO: 18417790 NR Description: MADS-box protein AGL2 [Arabidopsis thaliana]
  misc_feature (1)..(250): Homolog of NCBI NO: 81610 NR Description: MADS box protein AGL2 - Arabidopsis thaliana
  misc_feature (1)..(250): Homolog of NCBI NO: 11278949 NR Description: MADS box protein AGL2 - Arabidopsis thaliana
  misc_feature (1)..(250): Homolog of NCBI NO: 23304688 NR Description: MADS-box protein SEP1-a [Brassica oleracea var.
  misc_feature (1)..(250): Homolog of NCBI NO: 28372802 NR Description: transcription factor MAGL4 [Populus tremuloides]
  misc_feature (1)..(250): Homolog of NCBI NO: 6683777 NR Description: CAGL2 [Cucumis sativus]
  misc_feature (1)..(250): Homolog of NCBI NO: 7488622 NR Description: MADS box protein 1 - apple tree
  misc_feature (1)..(250): Homolog of NCBI NO: 3646334 NR Description: MdMADS8 [Malus x domestica]
MGRGRVELKRIENKINRQVTFAKRRNGLLKKAYELSVLCDAEVSLIVFSNRGKLYEFCSTSNMLKTLERYQKCSYGSIEVNNKPAKELENSYREYLKLKGRYENLQRQQRNLLGEDLGPLNSKELEQLERQLDGSLKQVRCIKTQYMLDQLSDLQGKEHILLDANRALSMKLEDMIGVRHHHIGGGWEGGDQQNIAYGHPQAHSQGLYQSLECDPTLQIGYSHPVCSEQMAVTVQGQSQQGNGYIPGWML

SEQ ID NO: 100351 - protein, 188 aa, Arabidopsis thaliana
  peptide (1)..(188): Ceres Seq. ID no. 13604912
  misc_feature (13)..(112): Pfam Name: K-box region Pfam Description: K-box region
  misc_feature (1)..(188): Homolog of NCBI NO: 15232883 NR Description: floral homeotic protein AGL4 [Arabidopsis
  misc_feature (1)..(188): Homolog of NCBI NO: 28393318 NR Description: putative floral homeotic protein AGL4
  misc_feature (1)..(188): Homolog of NCBI NO: 18417790 NR Description: MADS-box protein AGL2 [Arabidopsis thaliana]
  misc_feature (1)..(188): Homolog of NCBI NO: 81610 NR Description: MADS box protein AGL2 - Arabidopsis thaliana
  misc_feature (1)..(188): Homolog of NCBI NO: 11278949 NR Description: MADS box protein AGL2 - Arabidopsis thaliana
  misc_feature (1)..(188): Homolog of NCBI NO: 23304688 NR Description: MADS-box protein SEP1-a [Brassica oleracea var.
  misc_feature (1)..(188): Homolog of NCBI NO: 28372802 NR Description: transcription factor MAGL4 [Populus tremuloides]
  misc_feature (1)..(188): Homolog of NCBI NO: 6683777 NR Description: CAGL2 [Cucumis sativus]
  misc_feature (1)..(188): Homolog of NCBI NO: 7488622 NR Description: MADS box protein 1 - apple tree
  misc_feature (1)..(188): Homolog of NCBI NO: 3646334 NR Description: MdMADS8 [Malus x domestica]
MLKTLERYQKCSYGSIEVNNKPAKELENSYREYLKLKGRYENLQRQQRNLLGEDLGPLNSKELEQLERQLDGSLKQVRCIKTQYMLDQLSDLQGKEHILLDANRALSMKLEDMIGVRHHHIGGGWEGGDQQNIAYGHPQAHSQGLYQSLECDPTLQIGYSHPVCSEQMAVTVQGQSQQGNGYIPGWML

SEQ ID NO: 100352 - DNA, 2146 bp, Arabidopsis thaliana
  misc_feature (1)..(2146): Ceres Seq. ID no. 13604913
  misc_feature: MA Experiment ID: 20000184 Result: Down-regulated in Transcription
  misc_feature: MA Experiment 20000184 PARAMETER Experiment Name: At_Shoots__P Parameter: Age (day) Value: 7
  misc_feature: MA Experiment 20000184 PARAMETER Experiment Name: At_Shoots__P Parameter: Tissue Value: Shoots vs. Whole Plant
  misc_feature: MA Experiment ID: 20000234 Result: Up-regulated in Transcription
  misc_feature: MA Experiment 20000234 PARAMETER Experiment Name: At_Siliques_P Parameter: Age (day) Value: 21
  misc_feature: MA Experiment 20000234 PARAMETER Experiment Name: At_Siliques_P Parameter: Organism Value: A. thaliana
  misc_feature: MA Experiment 20000234 PARAMETER Experiment Name: At_Siliques_P Parameter: Plant Line Value: WS
  misc_feature: MA Experiment 20000234 PARAMETER Experiment Name: At_Siliques_P Parameter: Tissue Value: Less Than 5mm Siliques vs. Whole Plant
  misc_feature: MA Experiment ID: 20000264 Result: Up-regulated in Transcription
  misc_feature: MA Experiment 20000264 PARAMETER Experiment Name: At_Open_Flower_P Parameter: Age (day) Value: 21
  misc_feature: MA Experiment 20000264 PARAMETER Experiment Name: At_Open_Flower_P Parameter: Plant Line Value: WS
  misc_feature: MA Experiment 20000264 PARAMETER Experiment Name: At_Open_Flower_P Parameter: Tissue Value: Open Flower vs. Whole Plant
  misc_feature: MA Experiment ID: 20000265 Result: Up-regulated in Transcription
  misc_feature: MA Experiment 20000265 PARAMETER Experiment Name: At_Open_Flower_P Parameter: Age (day) Value: 21
  misc_feature: MA Experiment 20000265 PARAMETER Experiment Name: At_Open_Flower_P Parameter: Plant Line Value: WS
  misc_feature: MA Experiment 20000265 PARAMETER Experiment Name: At_Open_Flower_P Parameter: Tissue Value: Closed Flower vs. Whole Plant
  misc_feature: MA Experiment ID: 20000286 Result: Up-regulated in Transcription
  misc_feature: MA Experiment 20000286 PARAMETER Experiment Name: At_Open_Flower_P Parameter: Age (day) Value: 21
  misc_feature: MA Experiment 20000286 PARAMETER Experiment Name: At_Open_Flower_P Parameter: Plant Line Value: WS
  misc_feature: MA Experiment 20000286 PARAMETER Experiment Name: At_Open_Flower_P Parameter: Tissue Value: Half Open vs. Whole Plant
  misc_feature: MA Experiment ID: 20000438 Result: Down-regulated in Transcription
  misc_feature: MA Experiment 20000438 PARAMETER Experiment Name: At_Shoots__P Parameter: Age (day) Value: 14
  misc_feature: MA Experiment 20000438 PARAMETER Experiment Name: At_Shoots__P Parameter: Tissue Value: Shoots vs. Whole Plant
  misc_feature: MA Experiment ID: 20000794 Result: Up-regulated in Transcription
  misc_feature: MA Experiment 20000794 PARAMETER Experiment Name: At_Petals_P Parameter: Age (day) Value: 23-25 days
  misc_feature: MA Experiment 20000794 PARAMETER Experiment Name: At_Petals_P Parameter: Plant Line Value: WS
  misc_feature: MA Experiment 20000794 PARAMETER Experiment Name: At_Petals_P Parameter: Tissue Value: Petals vs. Whole plant
  misc_feature: MA Experiment ID: 20001757 Result: Down-regulated in Transcription
  misc_feature: MA Experiment 20001757 PARAMETER Experiment Name: At_50mM_NH4NO3_L-to-H_P Parameter: Timepoint (hr) Value: 6
  misc_feature: MA Experiment 20001757 PARAMETER Experiment Name: At_50mM_NH4NO3_L-to-H_P Parameter: Tissue Value: Leaf
  misc_feature: MA Experiment 20001757 PARAMETER Experiment Name: At_50mM_NH4NO3_L-to-H_P Parameter: Treatment Value: 50mM NH4NO3 vs 100mM Mannitol
  misc_feature: MA Experiment ID: 20001910 Result: Up-regulated in Transcription
  misc_feature: MA Experiment 20001910 PARAMETER Experiment Name: At_Drought_Reproduction_P Parameter: Age (day) Value: 37
  misc_feature: MA Experiment 20001910 PARAMETER Experiment Name: At_Drought_Reproduction_P Parameter: Organism Value: A. thaliana
  misc_feature: MA Experiment 20001910 PARAMETER Experiment Name: At_Drought_Reproduction_P Parameter: Plant Line Value: WS
  misc_feature: MA Experiment 20001910 PARAMETER Experiment Name: At_Drought_Reproduction_P Parameter: Timepoint (day) Value: 7
  misc_feature: MA Experiment 20001910 PARAMETER Experiment Name: At_Drought_Reproduction_P Parameter: Tissue Value: Flowers
  misc_feature: MA Experiment 20001910 PARAMETER Experiment Name: At_Drought_Reproduction_P Parameter: Treatment Value: Drought vs. No Drought
gtcaacttcatcttcttcttctctttctcctttcattttttttcttgtgtttcttcttttacgtgggtccttcaatctccatgaaggacccgaccattgcttaatcctaaacaaaactccaaaaatctaattcttttcgatctgttttatcttcaaataataatactctttgattgctaaaaccgattttgatcatcatcatgcactgttttccgtgtttctcttcgccaaagaacaagaaatcttcaactacgaatgagaccaacgacaacaacgaacccaaaccagatgataggagacgtgcagaagaaacagaggaaatagagcaatcggaaggaacatcgttgaagatattcactttccgggaattagctacagccacaaagaatttccggcaagagtgtttgctaggagaaggtggatttggtagggtttacaaaggaaccctcaaatctactggccaggtggtggctgtaaagcaactagacaagcatggattacatggaaacaaagagtttcaagctgaggttttgtctttaggccaacttgatcatccgaatcttgttaagcttattggttactgcgcggatggagatcaaaggcttttggtctatgattatatctctggaggttcacttcaagaccatcttcatgaaccaaaagcagacagtgatccgatggattggacaactaggatgcagatagcgtatgctgcagcgcaagggcttgattacttgcacgataaagcgaatccacccgtgatatacagagatttgaaagcttcaaacattttgttagatgatgacttttctcctaagctttctgattttggtctacataagctaggacccgggacaggtgataagatgatggctttatcttcacgagtaatgggaacttatggttactctgcacctgagtatacacgaggcggaaatctcactttgaaatcagatgtctatagctttggtgttgtgttgcttgagcttatcacgggtcgaagagctcttgatactactaggcctaatgatgaacagaacttagtttcttgggcacaaccgatatttagagatccgaagaggtatcccgatatggcagatccagttttggagaataaattctcagagagaggattaaaccaagcagtggcaatagcttcaatgtgtgtgcaagaggaagcatcagctcgtcctcttataagcgatgtaatggttgcgcttagcttcctttcgatgcctacagaagatggtattcccacaacagttcctatcttatccttcaaagacaagagcatgtctatagccttaagccgacatgattcaaatcttgtatctcctcctcctgagctagctacggaagatgacaaatctagtacctcatcaggcgaagaatcatctttggagagcgaaaaggagagtgtgagtaagaatgagtataagaagaaacatgaagaggaagatagctcaatggaatctgatgatgagtctgattctaactctgaacatgaaaaggaccaaccaccaaagcctattgatgagaagaaccaggcgcaaagcttgaagataaagtatagatatagctgggaagatattgatgtcaatgatgagaggctaagcagtaaaagcagccaaaaatcaaacgacgaaagtacttcttcgcgttatgatagcgacagagatcaagacgagaaagggaaagaagaagaggaagaggaagaggcagaagaaaagcatactcatattgaacacattgatagctcaaaaactgatgatgatcaaagtgtttactttgataatgatgatgattcaggagatgacaatggaggctctttgcatcggataaaatcagatgttgcgatcgattctattaaagagtgacatttttcaagattttttatcaatccgttgaagctcacaagaagtatttgaaacttttttgggtttatttttgggaaaaattcttaattgggtattaaaataagatacatattgacggtttttcttaacaaattataaccatctctctttatacatgatgaagatgttttggattgatagattaataaagaaacaagttgtataatcagataatctgattgagaaaacttatctcagcttttgtaatcctttaaaaaaaaatgttacgt

SEQ ID NO: 100353 - protein, 558 aa, Arabidopsis thaliana
  peptide (1)..(558): Ceres Seq. ID no. 13604914
  misc_feature (1)..(558): Homolog of NCBI NO: 15232987 NR Description: protein kinase family [Arabidopsis thaliana] putative protein kinase [Arabidopsis thaliana] putative protein kinase [Arabidopsis thaliana]
  misc_feature (1)..(554): Homolog of NCBI NO: 15237361 NR Description: protein kinase family [Arabidopsis thaliana]
  misc_feature (1)..(356): Homolog of NCBI NO: 18397825 NR Description: protein kinase family [Arabidopsis thaliana]
  misc_feature (1)..(356): Homolog of NCBI NO: 28416685 NR Description: At3g07070 [Arabidopsis thaliana]
  misc_feature (14)..(349): Homolog of NCBI NO: 15238886 NR Description: protein kinase family [Arabidopsis thaliana]
  misc_feature (1)..(357): Homolog of NCBI NO: 10445209 NR Description: protein serine/threonine kinase BNK1 [Brassica
  misc_feature (1)..(343): Homolog of NCBI NO: 11994661 NR Description: receptor protein kinase-like protein [Arabidopsis
  misc_feature (44)..(430): Homolog of NCBI NO: 34907210 NR Description: putative serine/threonine kinase PBS1 protein
  misc_feature (10)..(357): Homolog of NCBI NO: 11259782 NR Description: protein kinase-like - Arabidopsis thaliana
  misc_feature (10)..(357): Homolog of NCBI NO: 30679773 NR Description: protein kinase family [Arabidopsis thaliana]
MHCFPCFSSPKNKKSSTTNETNDNNEPKPDDRRRAEETEEIEQSEGTSLKIFTFRELATATKNFRQECLLGEGGFGRVYKGTLKSTGQVVAVKQLDKHGLHGNKEFQAEVLSLGQLDHPNLVKLIGYCADGDQRLLVYDYISGGSLQDHLHEPKADSDPMDWTTRMQIAYAAAQGLDYLHDKANPPVIYRDLKASNILLDDDFSPKLSDFGLHKLGPGTGDKMMALSSRVMGTYGYSAPEYTRGGNLTLKSDVYSFGVVLLELITGRRALDTTRPNDEQNLVSWAQPIFRDPKRYPDMADPVLENKFSERGLNQAVAIASMCVQEEASARPLISDVMVALSFLSMPTEDGIPTTVPILSFKDKSMSIALSRHDSNLVSPPPELATEDDKSSTSSGEESSLESEKESVSKNEYKKKHEEEDSSMESDDESDSNSEHEKDQPPKPIDEKNQAQSLKIKYRYSWEDIDVNDERLSSKSSQKSNDESTSSRYDSDRDQDEKGKEEEEEEEAEEKHTHIEHIDSSKTDDDQSVYFDNDDDSGDDNGGSLHRIKSDVAIDSIKE

SEQ ID NO: 100354 - protein, 399 aa, Arabidopsis thaliana
  peptide (1)..(399): Ceres Seq. ID no. 13604915
  misc_feature (1)..(399): Homolog of NCBI NO: 15232987 NR Description: protein kinase family [Arabidopsis thaliana] putative protein kinase [Arabidopsis thaliana] putative protein kinase [Arabidopsis thaliana]
  misc_feature (1)..(395): Homolog of NCBI NO: 15237361 NR Description: protein kinase family [Arabidopsis thaliana]
  misc_feature (1)..(197): Homolog of NCBI NO: 18397825 NR Description: protein kinase family [Arabidopsis thaliana]
  misc_feature (1)..(197): Homolog of NCBI NO: 28416685 NR Description: At3g07070 [Arabidopsis thaliana]
  misc_feature (1)..(190): Homolog of NCBI NO: 15238886 NR Description: protein kinase family [Arabidopsis thaliana]
  misc_feature (1)..(198): Homolog of NCBI NO: 10445209 NR Description: protein serine/threonine kinase BNK1 [Brassica
  misc_feature (1)..(184): Homolog of NCBI NO: 11994661 NR Description: receptor protein kinase-like protein [Arabidopsis
  misc_feature (1)..(271): Homolog of NCBI NO: 34907210 NR Description: putative serine/threonine kinase PBS1 protein
  misc_feature (1)..(198): Homolog of NCBI NO: 11259782 NR Description: protein kinase-like - Arabidopsis thaliana
  misc_feature (1)..(198): Homolog of NCBI NO: 30679773 NR Description: protein kinase family [Arabidopsis thaliana]
MDWTTRMQIAYAAAQGLDYLHDKANPPVIYRDLKASNILLDDDFSPKLSDFGLHKLGPGTGDKMMALSSRVMGTYGYSAPEYTRGGNLTLKSDVYSFGVVLLELITGRRALDTTRPNDEQNLVSWAQPIFRDPKRYPDMADPVLENKFSERGLNQAVAIASMCVQEEASARPLISDVMVALSFLSMPTEDGIPTTVPILSFKDKSMSIALSRHDSNLVSPPPELATEDDKSSTSSGEESSLESEKESVSKNEYKKKHEEEDSSMESDDESDSNSEHEKDQPPKPIDEKNQAQSLKIKYRYSWEDIDVNDERLSSKSSQKSNDESTSSRYDSDRDQDEKGKEEEEEEEAEEKHTHIEHIDSSKTDDDQSVYFDNDDDSGDDNGGSLHRIKSDVAIDSIKE

SEQ ID NO: 100355 - protein, 393 aa, Arabidopsis thaliana
  peptide (1)..(393): Ceres Seq. ID no. 13604916
  misc_feature (1)..(393): Homolog of NCBI NO: 15232987 NR Description: protein kinase family [Arabidopsis thaliana] putative protein kinase [Arabidopsis thaliana] putative protein kinase [Arabidopsis thaliana]
  misc_feature (1)..(389): Homolog of NCBI NO: 15237361 NR Description: protein kinase family [Arabidopsis thaliana]
  misc_feature (1)..(191): Homolog of NCBI NO: 18397825 NR Description: protein kinase family [Arabidopsis thaliana]
  misc_feature (1)..(191): Homolog of NCBI NO: 28416685 NR Description: At3g07070 [Arabidopsis thaliana]
  misc_feature (1)..(184): Homolog of NCBI NO: 15238886 NR Description: protein kinase family [Arabidopsis thaliana]
  misc_feature (1)..(192): Homolog of NCBI NO: 10445209 NR Description: protein serine/threonine kinase BNK1 [Brassica
  misc_feature (1)..(178): Homolog of NCBI NO: 11994661 NR Description: receptor protein kinase-like protein [Arabidopsis
  misc_feature (1)..(265): Homolog of NCBI NO: 34907210 NR Description: putative serine/threonine kinase PBS1 protein
  misc_feature (1)..(192): Homolog of NCBI NO: 11259782 NR Description: protein kinase-like - Arabidopsis thaliana
  misc_feature (1)..(192): Homolog of NCBI NO: 30679773 NR Description: protein kinase family [Arabidopsis thaliana]
MQIAYAAAQGLDYLHDKANPPVIYRDLKASNILLDDDFSPKLSDFGLHKLGPGTGDKMMALSSRVMGTYGYSAPEYTRGGNLTLKSDVYSFGVVLLELITGRRALDTTRPNDEQNLVSWAQPIFRDPKRYPDMADPVLENKFSERGLNQAVAIASMCVQEEASARPLISDVMVALSFLSMPTEDGIPTTVPILSFKDKSMSIALSRHDSNLVSPPPELATEDDKSSTSSGEESSLESEKESVSKNEYKKKHEEEDSSMESDDESDSNSEHEKDQPPKPIDEKNQAQSLKIKYRYSWEDIDVNDERLSSKSSQKSNDESTSSRYDSDRDQDEKGKEEEEEEEAEEKHTHIEHIDSSKTDDDQSVYFDNDDDSGDDNGGSLHRIKSDVAIDSIKE

SEQ ID NO: 100356 - DNA, 1936 bp, Arabidopsis thaliana
  misc_feature (1)..(1936): Ceres Seq. ID no. 13604921
  misc_feature: MA Experiment ID: 20000171 Result: Down-regulated in Transcription
  misc_feature: MA Experiment 20000171 PARAMETER Experiment Name: At_42deg_Heat_P Parameter: Age (day) Value: 14
  misc_feature: MA Experiment 20000171 PARAMETER Experiment Name: At_42deg_Heat_P Parameter: Organism Value: A. thaliana
  misc_feature: MA Experiment 20000171 PARAMETER Experiment Name: At_42deg_Heat_P Parameter: Plant Line Value: WS
  misc_feature: MA Experiment 20000171 PARAMETER Experiment Name: At_42deg_Heat_P Parameter: Temperature (deg C) Value: 42 vs. 22
  misc_feature: MA Experiment 20000171 PARAMETER Experiment Name: At_42deg_Heat_P Parameter: Timepoint (hr) Value: 1
  misc_feature: MA Experiment 20000171 PARAMETER Experiment Name: At_42deg_Heat_P Parameter: Tissue Value: Aerial
  misc_feature: MA Experiment ID: 20000173 Result: Down-regulated in Transcription
  misc_feature: MA Experiment 20000173 PARAMETER Experiment Name: At_42deg_Heat_P Parameter: Age (day) Value: 14
  misc_feature: MA Experiment 20000173 PARAMETER Experiment Name: At_42deg_Heat_P Parameter: Organism Value: A. thaliana
  misc_feature: MA Experiment 20000173 PARAMETER Experiment Name: At_42deg_Heat_P Parameter: Plant Line Value: WS
  misc_feature: MA Experiment 20000173 PARAMETER Experiment Name: At_42deg_Heat_P Parameter: Temperature (deg C) Value: 42 vs. 22
  misc_feature: MA Experiment 20000173 PARAMETER Experiment Name: At_42deg_Heat_P Parameter: Timepoint (hr) Value: 6
  misc_feature: MA Experiment 20000173 PARAMETER Experiment Name: At_42deg_Heat_P Parameter: Tissue Value: Aerial
  misc_feature: MA Experiment ID: 20000184 Result: Down-regulated in Transcription
  misc_feature: MA Experiment 20000184 PARAMETER Experiment Name: At_Shoots__P Parameter: Age (day) Value: 7
  misc_feature: MA Experiment 20000184 PARAMETER Experiment Name: At_Shoots__P Parameter: Tissue Value: Shoots vs. Whole Plant
  misc_feature: MA Experiment ID: 20000234 Result: Up-regulated in Transcription
  misc_feature: MA Experiment 20000234 PARAMETER Experiment Name: At_Siliques_P Parameter: Age (day) Value: 21
  misc_feature: MA Experiment 20000234 PARAMETER Experiment Name: At_Siliques_P Parameter: Organism Value: A. thaliana
  misc_feature: MA Experiment 20000234 PARAMETER Experiment Name: At_Siliques_P Parameter: Plant Line Value: WS
  misc_feature: MA Experiment 20000234 PARAMETER Experiment Name: At_Siliques_P Parameter: Tissue Value: Less Than 5mm Siliques vs. Whole Plant
  misc_feature: MA Experiment ID: 20000235 Result: Up-regulated in Transcription
  misc_feature: MA Experiment 20000235 PARAMETER Experiment Name: At_Siliques_P Parameter: Age (day) Value: 21
  misc_feature: MA Experiment 20000235 PARAMETER Experiment Name: At_Siliques_P Parameter: Organism Value: A. thaliana
  misc_feature: MA Experiment 20000235 PARAMETER Experiment Name: At_Siliques_P Parameter: Plant Line Value: WS
  misc_feature: MA Experiment 20000235 PARAMETER Experiment Name: At_Siliques_P Parameter: Tissue Value: 5-10mm Siliques vs. Whole Plant
  misc_feature: MA Experiment ID: 20000264 Result: Up-regulated in Transcription
  misc_feature: MA Experiment 20000264 PARAMETER Experiment Name: At_Open_Flower_P Parameter: Age (day) Value: 21
  misc_feature: MA Experiment 20000264 PARAMETER Experiment Name: At_Open_Flower_P Parameter: Plant Line Value: WS
  misc_feature: MA Experiment 20000264 PARAMETER Experiment Name: At_Open_Flower_P Parameter: Tissue Value: Open Flower vs. Whole Plant
  misc_feature: MA Experiment ID: 20000265 Result: Up-regulated in Transcription
  misc_feature: MA Experiment 20000265 PARAMETER Experiment Name: At_Open_Flower_P Parameter: Age (day) Value: 21
  misc_feature: MA Experiment 20000265 PARAMETER Experiment Name: At_Open_Flower_P Parameter: Plant Line Value: WS
  misc_feature: MA Experiment 20000265 PARAMETER Experiment Name: At_Open_Flower_P Parameter: Tissue Value: Closed Flower vs. Whole Plant
  misc_feature: MA Experiment ID: 20000286 Result: Up-regulated in Transcription
  misc_feature: MA Experiment 20000286 PARAMETER Experiment Name: At_Open_Flower_P Parameter: Age (day) Value: 21
  misc_feature: MA Experiment 20000286 PARAMETER Experiment Name: At_Open_Flower_P Parameter: Plant Line Value: WS
  misc_feature: MA Experiment 20000286 PARAMETER Experiment Name: At_Open_Flower_P Parameter: Tissue Value: Half Open vs. Whole Plant
  misc_feature: MA Experiment ID: 20000438 Result: Down-regulated in Transcription
  misc_feature: MA Experiment 20000438 PARAMETER Experiment Name: At_Shoots__P Parameter: Age (day) Value: 14
  misc_feature: MA Experiment 20000438 PARAMETER Experiment Name: At_Shoots__P Parameter: Tissue Value: Shoots vs. Whole Plant
  misc_feature: MA Experiment ID: 20000451 Result: Up-regulated in Transcription
  misc_feature: MA Experiment 20000451 PARAMETER Experiment Name: At_CS6879_Shoots-Roots_P Parameter: Age (day) Value: 14
  misc_feature: MA Experiment 20000451 PARAMETER Experiment Name: At_CS6879_Shoots-Roots_P Parameter: Organism Value: A. thaliana
  misc_feature: MA Experiment 20000451 PARAMETER Experiment Name: At_CS6879_Shoots-Roots_P Parameter: Plant Line Value: CS6879 vs. WS
  misc_feature: MA Experiment 20000451 PARAMETER Experiment Name: At_CS6879_Shoots-Roots_P Parameter: Tissue Value: Roots
  misc_feature: MA Experiment ID: 20000527 Result: Down-regulated in Transcription
  misc_feature: MA Experiment 20000527 PARAMETER Experiment Name: At_10percent_PEG_P Parameter: Age (day) Value: 20
  misc_feature: MA Experiment 20000527 PARAMETER Experiment Name: At_10percent_PEG_P Parameter: Organism Value: A. thaliana
  misc_feature: MA Experiment 20000527 PARAMETER Experiment Name: At_10percent_PEG_P Parameter: Plant Line Value: WS
  misc_feature: MA Experiment 20000527 PARAMETER Experiment Name: At_10percent_PEG_P Parameter: Timepoint (day) Value: 20
  misc_feature: MA Experiment 20000527 PARAMETER Experiment Name: At_10percent_PEG_P Parameter: Tissue Value: Whole Plant
  misc_feature: MA Experiment 20000527 PARAMETER Experiment Name: At_10percent_PEG_P Parameter: Treatment Value: 10percent PEG vs. No Treatment
  misc_feature: MA Experiment ID: 20000794 Result: Up-regulated in Transcription
  misc_feature: MA Experiment 20000794 PARAMETER Experiment Name: At_Petals_P Parameter: Age (day) Value: 23-25 days
  misc_feature: MA Experiment 20000794 PARAMETER Experiment Name: At_Petals_P Parameter: Plant Line Value: WS
  misc_feature: MA Experiment 20000794 PARAMETER Experiment Name: At_Petals_P Parameter: Tissue Value: Petals vs. Whole plant
  misc_feature: MA Experiment ID: 20001247 Result: Down-regulated in Transcription
  misc_feature: MA Experiment 20001247 PARAMETER Experiment Name: At_Far-red-induction_P Parameter: Age (day) Value: 7
  misc_feature: MA Experiment 20001247 PARAMETER Experiment Name: At_Far-red-induction_P Parameter: Light Value: Far-red vs. White
  misc_feature: MA Experiment 20001247 PARAMETER Experiment Name: At_Far-red-induction_P Parameter: Organism Value: A. thaliana
  misc_feature: MA Experiment 20001247 PARAMETER Experiment Name: At_Far-red-induction_P Parameter: Plant Line Value: Columbia
  misc_feature: MA Experiment 20001247 PARAMETER Experiment Name: At_Far-red-induction_P Parameter: Timepoint (hr) Value: 1
  misc_feature: MA Experiment 20001247 PARAMETER Experiment Name: At_Far-red-induction_P Parameter: Tissue Value: Whole Plant
  misc_feature: MA Experiment ID: 20001248 Result: Down-regulated in Transcription
  misc_feature: MA Experiment 20001248 PARAMETER Experiment Name: At_Far-red-induction_P Parameter: Age (day) Value: 7
  misc_feature: MA Experiment 20001248 PARAMETER Experiment Name: At_Far-red-induction_P Parameter: Light Value: Far-red vs. White
  misc_feature: MA Experiment 20001248 PARAMETER Experiment Name: At_Far-red-induction_P Parameter: Organism Value: A. thaliana
  misc_feature: MA Experiment 20001248 PARAMETER Experiment Name: At_Far-red-induction_P Parameter: Plant Line Value: Columbia
  misc_feature: MA Experiment 20001248 PARAMETER Experiment Name: At_Far-red-induction_P Parameter: Timepoint (hr) Value: 4
  misc_feature: MA Experiment 20001248 PARAMETER Experiment Name: At_Far-red-induction_P Parameter: Tissue Value: Whole Plant
  misc_feature: MA Experiment ID: 20001450 Result: Down-regulated in Transcription
  misc_feature: MA Experiment 20001450 PARAMETER Experiment Name: At_Far-red-induction_P Parameter: Age (day) Value: 7
  misc_feature: MA Experiment 20001450 PARAMETER Experiment Name: At_Far-red-induction_P Parameter: Light Value: Far-red vs. White
  misc_feature: MA Experiment 20001450 PARAMETER Experiment Name: At_Far-red-induction_P Parameter: Organism Value: A. thaliana
  misc_feature: MA Experiment 20001450 PARAMETER Experiment Name: At_Far-red-induction_P Parameter: Plant Line Value: Columbia
  misc_feature: MA Experiment 20001450 PARAMETER Experiment Name: At_Far-red-induction_P Parameter: Timepoint (hr) Value: 8
  misc_feature: MA Experiment 20001450 PARAMETER Experiment Name: At_Far-red-induction_P Parameter: Tissue Value: Whole Plant
  misc_feature: MA Experiment ID: 20001451 Result: Down-regulated in Transcription
  misc_feature: MA Experiment 20001451 PARAMETER Experiment Name: At_Far-red-induction_P Parameter: Age (day) Value: 7
  misc_feature: MA Experiment 20001451 PARAMETER Experiment Name: At_Far-red-induction_P Parameter: Light Value: Far-red vs. White
  misc_feature: MA Experiment 20001451 PARAMETER Experiment Name: At_Far-red-induction_P Parameter: Organism Value: A. thaliana
  misc_feature: MA Experiment 20001451 PARAMETER Experiment Name: At_Far-red-induction_P Parameter: Plant Line Value: Columbia
  misc_feature: MA Experiment 20001451 PARAMETER Experiment Name: At_Far-red-induction_P Parameter: Timepoint (hr) Value: 24
  misc_feature: MA Experiment 20001451 PARAMETER Experiment Name: At_Far-red-induction_P Parameter: Tissue Value: Whole Plant
  misc_feature: MA Experiment ID: 20001556 Result: Up-regulated in Transcription
  misc_feature: MA Experiment 20001556 PARAMETER Experiment Name: At_Drought_Soil_Dry_P Parameter: Age (day) Value: 26
  misc_feature: MA Experiment 20001556 PARAMETER Experiment Name: At_Drought_Soil_Dry_P Parameter: Organism Value: A. thaliana
  misc_feature: MA Experiment 20001556 PARAMETER Experiment Name: At_Drought_Soil_Dry_P Parameter: Plant Line Value: WS
  misc_feature: MA Experiment 20001556 PARAMETER Experiment Name: At_Drought_Soil_Dry_P Parameter: Post Timepoint (hr) Value: None
  misc_feature: MA Experiment 20001556 PARAMETER Experiment Name: At_Drought_Soil_Dry_P Parameter: Post-Treatment Value: None
  misc_feature: MA Experiment 20001556 PARAMETER Experiment Name: At_Drought_Soil_Dry_P Parameter: Timepoint (day) Value: 12
  misc_feature: MA Experiment 20001556 PARAMETER Experiment Name: At_Drought_Soil_Dry_P Parameter: Treatment Value: Drought vs. No Drought
  misc_feature: MA Experiment ID: 20001557 Result: Up-regulated in Transcription
  misc_feature: MA Experiment 20001557 PARAMETER Experiment Name: At_Drought_Soil_Dry_P Parameter: Age (day) Value: 27
  misc_feature: MA Experiment 20001557 PARAMETER Experiment Name: At_Drought_Soil_Dry_P Parameter: Organism Value: A. thaliana
  misc_feature: MA Experiment 20001557 PARAMETER Experiment Name: At_Drought_Soil_Dry_P Parameter: Plant Line Value: WS
  misc_feature: MA Experiment 20001557 PARAMETER Experiment Name: At_Drought_Soil_Dry_P Parameter: Post Timepoint (hr) Value: 3
  misc_feature: MA Experiment 20001557 PARAMETER Experiment Name: At_Drought_Soil_Dry_P Parameter: Post-Treatment Value: Re-Water vs. No Drought
  misc_feature: MA Experiment 20001557 PARAMETER Experiment Name: At_Drought_Soil_Dry_P Parameter: Timepoint (day) Value: 13
  misc_feature: MA Experiment 20001557 PARAMETER Experiment Name: At_Drought_Soil_Dry_P Parameter: Treatment Value: Drought vs. No Drought
  misc_feature: MA Experiment ID: 20001558 Result: Up-regulated in Transcription
  misc_feature: MA Experiment 20001558 PARAMETER Experiment Name: At_Drought_Soil_Dry_P Parameter: Age (day) Value: 27
  misc_feature: MA Experiment 20001558 PARAMETER Experiment Name: At_Drought_Soil_Dry_P Parameter: Organism Value: A. thaliana
  misc_feature: MA Experiment 20001558 PARAMETER Experiment Name: At_Drought_Soil_Dry_P Parameter: Plant Line Value: WS
  misc_feature: MA Experiment 20001558 PARAMETER Experiment Name: At_Drought_Soil_Dry_P Parameter: Post Timepoint (hr) Value: 6
  misc_feature: MA Experiment 20001558 PARAMETER Experiment Name: At_Drought_Soil_Dry_P Parameter: Post-Treatment Value: Re-Water vs. No Drought
  misc_feature: MA Experiment 20001558 PARAMETER Experiment Name: At_Drought_Soil_Dry_P Parameter: Timepoint (day) Value: 13
  misc_feature: MA Experiment 20001558 PARAMETER Experiment Name: At_Drought_Soil_Dry_P Parameter: Treatment Value: Drought vs. No Drought
  misc_feature: MA Experiment ID: 20001560 Result: Up-regulated in Transcription
  misc_feature: MA Experiment 20001560 PARAMETER Experiment Name: At_Drought_Soil_Dry_P Parameter: Age (day) Value: 28
  misc_feature: MA Experiment 20001560 PARAMETER Experiment Name: At_Drought_Soil_Dry_P Parameter: Organism Value: A. thaliana
  misc_feature: MA Experiment 20001560 PARAMETER Experiment Name: At_Drought_Soil_Dry_P Parameter: Plant Line Value: WS
  misc_feature: MA Experiment 20001560 PARAMETER Experiment Name: At_Drought_Soil_Dry_P Parameter: Post Timepoint (hr) Value: None
  misc_feature: MA Experiment 20001560 PARAMETER Experiment Name: At_Drought_Soil_Dry_P Parameter: Post-Treatment Value: None
  misc_feature: MA Experiment 20001560 PARAMETER Experiment Name: At_Drought_Soil_Dry_P Parameter: Timepoint (day) Value: 14
  misc_feature: MA Experiment 20001560 PARAMETER Experiment Name: At_Drought_Soil_Dry_P Parameter: Treatment Value: Drought vs. No Drought
atcagtctcttaactcaccatcacaagaacaagaaagatgaagagaggatacggagaaacatgggatccgccaccaaaaccactaccagcttctcgttccggagaaggtccttcaatggcggataagaagaaggctgatgatgacaacaacaacagcaacatggatgatgagcttcttgctgttcttggctacaaggttcgatcttctgagatggctgaagtagcacagaagcttgaacaacttgagatggtcttgtctaatgatgatgttggttctactgtcttaaacgactctgttcattataacccatctgatctctctaactgggtcgagagcatgctttctgagctgaacaacccggcttcttcggatcttgacacgacccgaagttgtgtggatagatccgaatacgatctcagagcaattccgggtctttctgcgtttccaaaggaagaggaagtctttgacgaggaagctagcagcaagaggatccgactcggatcgtggtgcgaatcgtcggacgagtcaactcggtccgtggtgctcgttgactctcaggagaccggagttagacttgtccacgcactagtggcgtgcgctgaggcgattcaccaggagaatctcaacttagctgacgcgctggtgaaacgcgtgggaacactcgcgggttctcaagctggagctatgggaaaagtcgctacgtattttgctcaagccttggctcgtcgtatttaccgtgattacacggcggagacggacgtttgcgcggcggtgaacccatctttcgaagaggttttggagatgcacttttacgagtcttgcccttacctgaagttcgctcatttcacggcgaaccaagcgattctagaagctgttacgacggcgcgtagagttcacgtcattgatttagggcttaatcaagggatgcaatggcctgctttaatgcaagctttagctctccgacccggtggacctccgtcgtttcgtctcaccggaatcggaccaccgcagacggagaattcagattcgcttcaacagttaggttggaaattagctcaattcgctcagaacatgggcgttgaattcgaattcaaaggcttagccgctgagagtttatcggatcttgaacccgaaatgttcgaaacccgacccgaatctgaaaccttagtggttaattcggtatttgagctccaccggttattagcccgatccggttcaatcgaaaagcttctcaatacggttaaagctattaaaccgagtatcgtaacggtggttgagcaagaagcgaaccacaacggaatcgtcttcctcgataggttcaacgaagcgcttcattactactcgagcttgtttgactcgctcgaagacagttatagtttaccgagtcaagaccgagttatgtcagaagtgtacttagggagacagatactcaacgttgttgcggcggaagggtccgatcgggtcgagcggcacgagacggctgcacagtggaggattcggatgaaatccgctgggtttgacccgattcatctcggatctagcgcgtttaaacaagcgagtatgcttttatcgctttacgctaccggagatggatacagagttgaagaaaatgacggatgtttaatgatagggtggcagacgcgaccactcatcacaacctcggcgtggaaactcgcctgagtcgcggcggtagagatgactcgcctgaaaccgggaaaaacaataaatgttttaaaaaattaggaaaagagaccgtaactttagttatgtttttactttttaacccgaagtttttgtgtgtttaacctttttgcctaaatgtttacaactttatctttttggaccttgtgcgtatctttgagagttaagagaacgagtaaaaaatcttgtatcgtagatcgagctaagtagttttcaataaatggaaggataacc

SEQ ID NO: 100357 - protein, 547 aa, Arabidopsis thaliana
  peptide (1)..(547): Ceres Seq. ID no. 13604922
  misc_feature (154)..(454): Pfam Name: GRAS family transcription factor Pfam Description: GRAS family transcription factor
  misc_feature (1)..(547): Homolog of NCBI NO: 15228553 NR Description: gibberellin response modulator, putative
  misc_feature (1)..(547): Homolog of NCBI NO: 26451075 NR Description: putative RGA1 [Arabidopsis thaliana]
  misc_feature (19)..(539): Homolog of NCBI NO: 29122893 NR Description: GIA/RGA-like gibberellin response modulator
  misc_feature (34)..(546): Homolog of NCBI NO: 31322802 NR Description: GAI-like protein [Lycopersicon esculentum]
  misc_feature (124)..(547): Homolog of NCBI NO: 20334379 NR Description: GAI-like protein 1 [Vitis vinifera]
  misc_feature (1)..(114): Homolog of NCBI NO: 20334379 NR Description: GAI-like protein 1 [Vitis vinifera]
  misc_feature (160)..(547): Homolog of NCBI NO: 15226311 NR Description: gibberellin response modulator (RGA1)
  misc_feature (31)..(180): Homolog of NCBI NO: 15226311 NR Description: gibberellin response modulator (RGA1)
  misc_feature (82)..(547): Homolog of NCBI NO: 15237971 NR Description: gibberellin response modulator, putative
  misc_feature (125)..(530): Homolog of NCBI NO: 20257442 NR Description: GIA/RGA-like gibberellin response modulator;
MKRGYGETWDPPPKPLPASRSGEGPSMADKKKADDDNNNSNMDDELLAVLGYKVRSSEMAEVAQKLEQLEMVLSNDDVGSTVLNDSVHYNPSDLSNWVESMLSELNNPASSDLDTTRSCVDRSEYDLRAIPGLSAFPKEEEVFDEEASSKRIRLGSWCESSDESTRSVVLVDSQETGVRLVHALVACAEAIHQENLNLADALVKRVGTLAGSQAGAMGKVATYFAQALARRIYRDYTAETDVCAAVNPSFEEVLEMHFYESCPYLKFAHFTANQAILEAVTTARRVHVIDLGLNQGMQWPALMQALALRPGGPPSFRLTGIGPPQTENSDSLQQLGWKLAQFAQNMGVEFEFKGLAAESLSDLEPEMFETRPESETLVVNSVFELHRLLARSGSIEKLLNTVKAIKPSIVTVVEQEANHNGIVFLDRFNEALHYYSSLFDSLEDSYSLPSQDRVMSEVYLGRQILNVVAAEGSDRVERHETAAQWRIRMKSAGFDPIHLGSSAFKQASMLLSLYATGDGYRVEENDGCLMIGWQTRPLITTSAWKLA

SEQ ID NO: 100358 - protein, 521 aa, Arabidopsis thaliana
  peptide (1)..(521): Ceres Seq. ID no. 13604923
  misc_feature (128)..(428): Pfam Name: GRAS family transcription factor Pfam Description: GRAS family transcription factor
  misc_feature (1)..(521): Homolog of NCBI NO: 15228553 NR Description: gibberellin response modulator, putative
  misc_feature (1)..(521): Homolog of NCBI NO: 26451075 NR Description: putative RGA1 [Arabidopsis thaliana]
  misc_feature (1)..(513): Homolog of NCBI NO: 29122893 NR Description: GIA/RGA-like gibberellin response modulator
  misc_feature (8)..(520): Homolog of NCBI NO: 31322802 NR Description: GAI-like protein [Lycopersicon esculentum]
  misc_feature (98)..(521): Homolog of NCBI NO: 20334379 NR Description: GAI-like protein 1 [Vitis vinifera]
  misc_feature (1)..(88): Homolog of NCBI NO: 20334379 NR Description: GAI-like protein 1 [Vitis vinifera]
  misc_feature (134)..(521): Homolog of NCBI NO: 15226311 NR Description: gibberellin response modulator (RGA1)
  misc_feature (5)..(154): Homolog of NCBI NO: 15226311 NR Description: gibberellin response modulator (RGA1)
  misc_feature (56)..(521): Homolog of NCBI NO: 15237971 NR Description: gibberellin response modulator, putative
  misc_feature (99)..(504): Homolog of NCBI NO: 20257442 NR Description: GIA/RGA-like gibberellin response modulator;
MADKKKADDDNNNSNMDDELLAVLGYKVRSSEMAEVAQKLEQLEMVLSNDDVGSTVLNDSVHYNPSDLSNWVESMLSELNNPASSDLDTTRSCVDRSEYDLRAIPGLSAFPKEEEVFDEEASSKRIRLGSWCESSDESTRSVVLVDSQETGVRLVHALVACAEAIHQENLNLADALVKRVGTLAGSQAGAMGKVATYFAQALARRIYRDYTAETDVCAAVNPSFEEVLEMHFYESCPYLKFAHFTANQAILEAVTTARRVHVIDLGLNQGMQWPALMQALALRPGGPPSFRLTGIGPPQTENSDSLQQLGWKLAQFAQNMGVEFEFKGLAAESLSDLEPEMFETRPESETLVVNSVFELHRLLARSGSIEKLLNTVKAIKPSIVTVVEQEANHNGIVFLDRFNEALHYYSSLFDSLEDSYSLPSQDRVMSEVYLGRQILNVVAAEGSDRVERHETAAQWRIRMKSAGFDPIHLGSSAFKQASMLLSLYATGDGYRVEENDGCLMIGWQTRPLITTSAWKLA

SEQ ID NO: 100359 - protein, 506 aa, Arabidopsis thaliana
  peptide (1)..(506): Ceres Seq. ID no. 13604924
  misc_feature (113)..(413): Pfam Name: GRAS family transcription factor Pfam Description: GRAS family transcription factor
  misc_feature (1)..(506): Homolog of NCBI NO: 15228553 NR Description: gibberellin response modulator, putative
  misc_feature (1)..(506): Homolog of NCBI NO: 26451075 NR Description: putative RGA1 [Arabidopsis thaliana]
  misc_feature (1)..(498): Homolog of NCBI NO: 29122893 NR Description: GIA/RGA-like gibberellin response modulator
  misc_feature (1)..(505): Homolog of NCBI NO: 31322802 NR Description: GAI-like protein [Lycopersicon esculentum]
  misc_feature (83)..(506): Homolog of NCBI NO: 20334379 NR Description: GAI-like protein 1 [Vitis vinifera]
  misc_feature (1)..(73): Homolog of NCBI NO: 20334379 NR Description: GAI-like protein 1 [Vitis vinifera]
  misc_feature (119)..(506): Homolog of NCBI NO: 15226311 NR Description: gibberellin response modulator (RGA1)
  misc_feature (1)..(139): Homolog of NCBI NO: 15226311 NR Description: gibberellin response modulator (RGA1)
  misc_feature (41)..(506): Homolog of NCBI NO: 15237971 NR Description: gibberellin response modulator, putative
  misc_feature (84)..(489): Homolog of NCBI NO: 20257442 NR Description: GIA/RGA-like gibberellin response modulator;
MDDELLAVLGYKVRSSEMAEVAQKLEQLEMVLSNDDVGSTVLNDSVHYNPSDLSNWVESMLSELNNPASSDLDTTRSCVDRSEYDLRAIPGLSAFPKEEEVFDEEASSKRIRLGSWCESSDESTRSVVLVDSQETGVRLVHALVACAEAIHQENLNLADALVKRVGTLAGSQAGAMGKVATYFAQALARRIYRDYTAETDVCAAVNPSFEEVLEMHFYESCPYLKFAHFTANQAILEAVTTARRVHVIDLGLNQGMQWPALMQALALRPGGPPSFRLTGIGPPQTENSDSLQQLGWKLAQFAQNMGVEFEFKGLAAESLSDLEPEMFETRPESETLVVNSVFELHRLLARSGSIEKLLNTVKAIKPSIVTVVEQEANHNGIVFLDRFNEALHYYSSLFDSLEDSYSLPSQDRVMSEVYLGRQILNVVAAEGSDRVERHETAAQWRIRMKSAGFDPIHLGSSAFKQASMLLSLYATGDGYRVEENDGCLMIGWQTRPLITTSAWKLA

SEQ ID NO: 100360 - DNA, 2021 bp, Arabidopsis thaliana
  misc_feature (1)..(2021): Ceres Seq. ID no. 13604933
  misc_feature: MA Experiment ID: 20000315 Result: Down-regulated in Transcription
  misc_feature: MA Experiment 20000315 PARAMETER Experiment Name: At_14day_Shoots-Roots_Sub_P Parameter: Age (day) Value: 14
  misc_feature: MA Experiment 20000315 PARAMETER Experiment Name: At_14day_Shoots-Roots_Sub_P Parameter: Organism Value: A. thaliana
  misc_feature: MA Experiment 20000315 PARAMETER Experiment Name: At_14day_Shoots-Roots_Sub_P Parameter: Plant Line Value: WS
  misc_feature: MA Experiment 20000315 PARAMETER Experiment Name: At_14day_Shoots-Roots_Sub_P Parameter: Tissue Value: Shoots vs. Whole Plant
  misc_feature: MA Experiment ID: 20000355 Result: Up-regulated in Transcription
  misc_feature: MA Experiment 20000355 PARAMETER Experiment Name: At_Siliques_Sub_P Parameter: Age (day) Value: 21
  misc_feature: MA Experiment 20000355 PARAMETER Experiment Name: At_Siliques_Sub_P Parameter: Organism Value: A. thaliana
  misc_feature: MA Experiment 20000355 PARAMETER Experiment Name: At_Siliques_Sub_P Parameter: Plant Line Value: WS
  misc_feature: MA Experiment 20000355 PARAMETER Experiment Name: At_Siliques_Sub_P Parameter: Tissue Value: Less Than 5mm Siliques vs. Whole Plant
  misc_feature: MA Experiment ID: 20000440 Result: Up-regulated in Transcription
  misc_feature: MA Experiment 20000440 PARAMETER Experiment Name: At_Closed-Flower__Sub_P Parameter: Tissue Value: Closed Flower vs. Whole Plant
gttctaagcattgtgtataccaaacacgaaaagatcccttccccctaaaaaaaaaataaaaaaattcagagctagaaggggcctcatagttatagccacagttataggccccatctgctccatttttaacatgtgtagaaaatcatattagaaaagtaggaaaaaatacttgagcaaagatacctttttcgacctttagaatttttgtgaatatataggaaacagaaaaaatgggttctgatggtgacaagaagaagaaattcatcgtcgccggtagtgtctccggttttctagtcatcatggttgtctctgtagccgttgtaacgtctaaacactctcccaaagacgatgaaaatcatatcagaaaaaccaccaaagcggttcaagcagtttgtgcacccactgacttcaaagacacttgtgttaacagcttaatgggtgcttctcccgattccgatgaccctgtcgacctcatcaaactcggcttcaaggtcactatcaaatccatcaacgaaagcctggaaaaggcctctggagatatcaaagccaaggctgacaagaacccagaagcaaagggtgctttcgagctgtgtgagaagctgatgattgatgctatcgatgacttgaagaagtgtatggatcatggattctcggttgatcagatcgaggtctttgttgaggatctacgggtttggctaagtggctccatcgcattccagcaaacatgtatggattcctttggggaaattaagtctaatcttatgcaagacatgctcaagatcttcaaaacatcaagagagcttagtagcaatagccttgccatggttactagaatctccactcttatcccaaactccaaccttacaggactaaccggagctttagcaaagtacgcgagaaagcttctgtctacagaagatagtatcccaacttgggttggaccagaggcacgacggctcatggcagctcaaggaggaggacctggacctgtgaaggctaatgccgtggtggctcaagacggaactggacagttcaagactatcaccgatgctctaaatgctgtgcctaaaggcaacaaagtgccattcatcattcacatcaaagaaggtatctacaaggagaaagttacggtcaccaagaaaatgcctcacgtaactttcatcggcgatgggccaaacaagactctaatcaccggtagtctcaatttcggtatcggcaaggtcaagaccttcctaacagccacaatcacaatcgaaggcgaccacttcacagcgaagaacatcggaatcgagaacacagctggaccagaaggaggacaagcggtggcgttaagagtctcggctgattacgccgtattccacagctgtcaaatcgacgggcaccaagacacgttatacgttcactctcaccggcaattctaccgtgactgcacagtctcgggcaccgtcgatttcatcttcggagacgcgaaatgcatcctccagaactgtaaaatcgtcgtccgaaaacctaacaaaggtcaaacgtgtatggttacagctcagggacgaagtaacgtccgtgaatcgacaggattggtgctccatggctgccatataacgggagatccagcgtatattccgatgaaatctgtgaataaagcttacttaggaagaccgtggaaggagttctcgaggacaatcattatgaaaacgacgatcgatgacgtcatcgatccggcgggatggcttccctggagtggagattttgcgctcaagacgctatactacgccgagcatatgaatactgggcctggatcgaatcaggcccaaagagttaaatggcccggaattaagaaactaacgccccaagatgctcttttatacactggcgacagattcttacgtggcgatacgtggatcccacaaacacaagttccgtatacagctaaagtgtaggagattccaaattttgtaaattgatttaatttgtaaatgttttaaaactaaaaactgtttgaagaatgattaattgattatgtc

SEQ ID NO: 100361 - protein, 568 aa, Arabidopsis thaliana
  peptide (1)..(568): Ceres Seq. ID no. 13604934
  misc_feature (257)..(554): Pfam Name: Pectinesterase Pfam Description: Pectinesterase
  misc_feature (1)..(568): Homolog of NCBI NO: 22330893 NR Description: pectin methylesterase, putative [Arabidopsis >gi|26451728|dbj|BAC42959.1| putative pectin methylesterase
  misc_feature (1)..(567): Homolog of NCBI NO: 39104585 NR Description: putative pectin methylesterase [Arabidopsis
  misc_feature (1)..(568): Homolog of NCBI NO: 7549630 NR Description: pectin methylesterase, putative [Arabidopsis
  misc_feature (1)..(564): Homolog of NCBI NO: 15239814 NR Description: pectinesterase family [Arabidopsis thaliana] pectin methylesterase [Arabidopsis thaliana] AT5g49180/K21P3_5 [Arabidopsis thaliana]
  misc_feature (226)..(566): Homolog of NCBI NO: 15234768 NR Description: pectinesterase family [Arabidopsis thaliana]
  misc_feature (10)..(206): Homolog of NCBI NO: 15234768 NR Description: pectinesterase family [Arabidopsis thaliana]
  misc_feature (4)..(564): Homolog of NCBI NO: 15241079 NR Description: pectinesterase family [Arabidopsis thaliana]
  misc_feature (4)..(565): Homolog of NCBI NO: 15230019 NR Description: pectinesterase family [Arabidopsis thaliana]
  misc_feature (4)..(565): Homolog of NCBI NO: 26451784 NR Description: putative pectinesterase [Arabidopsis thaliana]
  misc_feature (1)..(563): Homolog of NCBI NO: 25313441 NR Description: pectinesterase (EC 3.1.1.11) [imported] - Salix >gi|6714532|dbj|BAA89480.1| pectin methylesterase [Salix
MGSDGDKKKKFIVAGSVSGFLVIMVVSVAVVTSKHSPKDDENHIRKTTKAVQAVCAPTDFKDTCVNSLMGASPDSDDPVDLIKLGFKVTIKSINESLEKASGDIKAKADKNPEAKGAFELCEKLMIDAIDDLKKCMDHGFSVDQIEVFVEDLRVWLSGSIAFQQTCMDSFGEIKSNLMQDMLKIFKTSRELSSNSLAMVTRISTLIPNSNLTGLTGALAKYARKLLSTEDSIPTWVGPEARRLMAAQGGGPGPVKANAVVAQDGTGQFKTITDALNAVPKGNKVPFIIHIKEGIYKEKVTVTKKMPHVTFIGDGPNKTLITGSLNFGIGKVKTFLTATITIEGDHFTAKNIGIENTAGPEGGQAVALRVSADYAVFHSCQIDGHQDTLYVHSHRQFYRDCTVSGTVDFIFGDAKCILQNCKIVVRKPNKGQTCMVTAQGRSNVRESTGLVLHGCHITGDPAYIPMKSVNKAYLGRPWKEFSRTIIMKTTIDDVIDPAGWLPWSGDFALKTLYYAEHMNTGPGSNQAQRVKWPGIKKLTPQDALLYTGDRFLRGDTWIPQTQVPYTAKV

SEQ ID NO: 100362 - protein, 545 aa, Arabidopsis thaliana
  peptide (1)..(545): Ceres Seq. ID no. 13604935
  misc_feature (234)..(531): Pfam Name: Pectinesterase Pfam Description: Pectinesterase
  misc_feature (1)..(545): Homolog of NCBI NO: 22330893 NR Description: pectin methylesterase, putative [Arabidopsis >gi|26451728|dbj|BAC42959.1| putative pectin methylesterase
  misc_feature (1)..(544): Homolog of NCBI NO: 39104585 NR Description: putative pectin methylesterase [Arabidopsis
  misc_feature (1)..(545): Homolog of NCBI NO: 7549630 NR Description: pectin methylesterase, putative [Arabidopsis
  misc_feature (1)..(541): Homolog of NCBI NO: 15239814 NR Description: pectinesterase family [Arabidopsis thaliana] pectin methylesterase [Arabidopsis thaliana] AT5g49180/K21P3_5 [Arabidopsis thaliana]
  misc_feature (203)..(543): Homolog of NCBI NO: 15234768 NR Description: pectinesterase family [Arabidopsis thaliana]
  misc_feature (1)..(183): Homolog of NCBI NO: 15234768 NR Description: pectinesterase family [Arabidopsis thaliana]
  misc_feature (1)..(541): Homolog of NCBI NO: 15241079 NR Description: pectinesterase family [Arabidopsis thaliana]
  misc_feature (1)..(542): Homolog of NCBI NO: 15230019 NR Description: pectinesterase family [Arabidopsis thaliana]
  misc_feature (1)..(542): Homolog of NCBI NO: 26451784 NR Description: putative pectinesterase [Arabidopsis thaliana]
  misc_feature (1)..(540): Homolog of NCBI NO: 25313441 NR Description: pectinesterase (EC 3.1.1.11) [imported] - Salix >gi|6714532|dbj|BAA89480.1| pectin methylesterase [Salix
MVVSVAVVTSKHSPKDDENHIRKTTKAVQAVCAPTDFKDTCVNSLMGASPDSDDPVDLIKLGFKVTIKSINESLEKASGDIKAKADKNPEAKGAFELCEKLMIDAIDDLKKCMDHGFSVDQIEVFVEDLRVWLSGSIAFQQTCMDSFGEIKSNLMQDMLKIFKTSRELSSNSLAMVTRISTLIPNSNLTGLTGALAKYARKLLSTEDSIPTWVGPEARRLMAAQGGGPGPVKANAVVAQDGTGQFKTITDALNAVPKGNKVPFIIHIKEGIYKEKVTVTKKMPHVTFIGDGPNKTLITGSLNFGIGKVKTFLTATITIEGDHFTAKNIGIENTAGPEGGQAVALRVSADYAVFHSCQIDGHQDTLYVHSHRQFYRDCTVSGTVDFIFGDAKCILQNCKIVVRKPNKGQTCMVTAQGRSNVRESTGLVLHGCHITGDPAYIPMKSVNKAYLGRPWKEFSRTIIMKTTIDDVIDPAGWLPWSGDFALKTLYYAEHMNTGPGSNQAQRVKWPGIKKLTPQDALLYTGDRFLRGDTWIPQTQVPYTAKV

SEQ ID NO: 100363 - protein, 500 aa, Arabidopsis thaliana
  peptide (1)..(500): Ceres Seq. ID no. 13604936
  misc_feature (189)..(486): Pfam Name: Pectinesterase Pfam Description: Pectinesterase
  misc_feature (1)..(500): Homolog of NCBI NO: 22330893 NR Description: pectin methylesterase, putative [Arabidopsis >gi|26451728|dbj|BAC42959.1| putative pectin methylesterase
  misc_feature (1)..(499): Homolog of NCBI NO: 39104585 NR Description: putative pectin methylesterase [Arabidopsis
  misc_feature (1)..(500): Homolog of NCBI NO: 7549630 NR Description: pectin methylesterase, putative [Arabidopsis
  misc_feature (1)..(496): Homolog of NCBI NO: 15239814 NR Description: pectinesterase family [Arabidopsis thaliana] pectin methylesterase [Arabidopsis thaliana] AT5g49180/K21P3_5 [Arabidopsis thaliana]
  misc_feature (158)..(498): Homolog of NCBI NO: 15234768 NR Description: pectinesterase family [Arabidopsis thaliana]
  misc_feature (1)..(138): Homolog of NCBI NO: 15234768 NR Description: pectinesterase family [Arabidopsis thaliana]
  misc_feature (1)..(496): Homolog of NCBI NO: 15241079 NR Description: pectinesterase family [Arabidopsis thaliana]
  misc_feature (1)..(497): Homolog of NCBI NO: 15230019 NR Description: pectinesterase family [Arabidopsis thaliana]
  misc_feature (1)..(497): Homolog of NCBI NO: 26451784 NR Description: putative pectinesterase [Arabidopsis thaliana]
  misc_feature (1)..(495): Homolog of NCBI NO: 25313441 NR Description: pectinesterase (EC 3.1.1.11) [imported] - Salix >gi|6714532|dbj|BAA89480.1| pectin methylesterase [Salix
MGASPDSDDPVDLIKLGFKVTIKSINESLEKASGDIKAKADKNPEAKGAFELCEKLMIDAIDDLKKCMDHGFSVDQIEVFVEDLRVWLSGSIAFQQTCMDSFGEIKSNLMQDMLKIFKTSRELSSNSLAMVTRISTLIPNSNLTGLTGALAKYARKLLSTEDSIPTWVGPEARRLMAAQGGGPGPVKANAVVAQDGTGQFKTITDALNAVPKGNKVPFIIHIKEGIYKEKVTVTKKMPHVTFIGDGPNKTLITGSLNFGIGKVKTFLTATITIEGDHFTAKNIGIENTAGPEGGQAVALRVSADYAVFHSCQIDGHQDTLYVHSHRQFYRDCTVSGTVDFIFGDAKCILQNCKIVVRKPNKGQTCMVTAQGRSNVRESTGLVLHGCHITGDPAYIPMKSVNKAYLGRPWKEFSRTIIMKTTIDDVIDPAGWLPWSGDFALKTLYYAEHMNTGPGSNQAQRVKWPGIKKLTPQDALLYTGDRFLRGDTWIPQTQVPYTAKV

SEQ ID NO: 100364 - DNA, 2237 bp, Arabidopsis thaliana
  misc_feature (1)..(2237): Ceres Seq. ID no. 13604939
  misc_feature: MA Experiment ID: 20000185 Result: Up-regulated in Transcription
  misc_feature: MA Experiment 20000185 PARAMETER Experiment Name: At_Roots__P Parameter: Age (day) Value: 7 vs. 21
  misc_feature: MA Experiment 20000185 PARAMETER Experiment Name: At_Roots__P Parameter: Organism Value: A. thaliana
  misc_feature: MA Experiment 20000185 PARAMETER Experiment Name: At_Roots__P Parameter: Tissue Value: Roots vs. Whole Plant
  misc_feature: MA Experiment ID: 20000234 Result: Up-regulated in Transcription
  misc_feature: MA Experiment 20000234 PARAMETER Experiment Name: At_Siliques_P Parameter: Age (day) Value: 21
  misc_feature: MA Experiment 20000234 PARAMETER Experiment Name: At_Siliques_P Parameter: Organism Value: A. thaliana
  misc_feature: MA Experiment 20000234 PARAMETER Experiment Name: At_Siliques_P Parameter: Plant Line Value: WS
  misc_feature: MA Experiment 20000234 PARAMETER Experiment Name: At_Siliques_P Parameter: Tissue Value: Less Than 5mm Siliques vs. Whole Plant
  misc_feature: MA Experiment ID: 20000439 Result: Up-regulated in Transcription
  misc_feature: MA Experiment 20000439 PARAMETER Experiment Name: At_Roots__P Parameter: Age (day) Value: 14 vs. 21
  misc_feature: MA Experiment 20000439 PARAMETER Experiment Name: At_Roots__P Parameter: Organism Value: A. thaliana
  misc_feature: MA Experiment 20000439 PARAMETER Experiment Name: At_Roots__P Parameter: Tissue Value: Roots vs. Whole Plant
  misc_feature: MA Experiment ID: 20000496 Result: Up-regulated in Transcription
  misc_feature: MA Experiment 20000496 PARAMETER Experiment Name: At_Guard_Cells_P Parameter: Harvest Date Value: 7/19/2002
  misc_feature: MA Experiment 20000496 PARAMETER Experiment Name: At_Guard_Cells_P Parameter: Organism Value: Canola
  misc_feature: MA Experiment 20000496 PARAMETER Experiment Name: At_Guard_Cells_P Parameter: Tissue Value: Guard Cells vs. Leaves
catcgctgtctggaatgccgaactcaaggaacctcactaaactcaaatcttcctctcagtttctcccactcttcttcctcaaccttccgatttatcggattactctaaaatacccaaaatggaatctcatggaaaaacccatcagaaagagcacgataatgatctctctccgaaacccataacgttgtcaaagtattcgaaacgggtcgagttaaagactctgcttgatcggagcgaccgcggcgcaggattggctgggaaaagggttgtgattggtggttgggttaagtctgctagagcggttaagaaaaattctcctcctcctcctctgcctgtagttgccgccccttcgccgtcgagtggtggggatcaagctcatacgacggccaacattaggtgcacggagataatccaatcgaaaatgaatattttcaagagatttttcgatgtactgagcggtggtggtaagacttatccaatctttgataagacagaactcgccggtcagaaggccgtgccaccaccggagtatgttttttacttcttgatcagtgatggctcctccatctccagtctccaggttgttgttgattctgcgttgtcaactgttccagcaactcagcttatggctctagggacttgtattgtagctgaaggtgtgttaagactaccattggctgcttctgcaaaacatgtaattgagcttgaggcagagaagcttcttcatgttggaacagtggatccagagaagtatccactctcgaagaaacagcttcctctgcatatgcttagagacttctctcatttccgtccccgcacaactacggttgggtcggtgactcgagtccacagtgcgctaaccttagcaagccacacattccttcaataccatgggtttcagtatgttcaagtaccagtcatcacaacaaccactggatttggcgaaatgtttagggtcactactcttttaggtaaaactgatgataaagaggagaagaagcctcctgtccaagaaaaagatggatttagcattgacaccgtaaaggctgtgataaaggaaaagacgaggcttattgatcacctcaagagatccgacagcaaccgagaaaccgtggttgctgctgtacacgacttgaagaaaacgaacgatcttgcatcgcagattgagatgaaacaaaaatccaaaacaggaactttggtcaaacctgagaagcttgatttctcgaaagatttctttggtcgcgacacttatctgactgcttctgggaggtttcatcttgagagctatgcttctgcacttggaaaagtttatacctttggaccaagattcatagctgataaaattgacaatgcaaggcatttggcagagaagtggaatgtggaaaccgaaatggctttcgcggaattggatgatgctatggattgtgctgatgaatacttcaagttcctctgcaaatatgttctggaaaatcgcgatgaagacatgaaattcatatcaaaacgagttgacaagaccatcaccacacgtctcgaagcaacagcatccagctcccttttgagattctcctataccgaagtgattagtcttctgcaaaaggcaaccactacaaaatttgaaaccaagcctgagtggggagttgctttaacaacagagcatctaagttatctgactgatgagatctacaaaggtcctgtaattgtacatacctacccgaaagcaattaaacagttttacgtaaggttgaatgatgataagaagactgtagcagcgtttgatctggtcgtaccaaaggttggtgttgtgatcaccgggagccaaaacgaagaacggtttgagattctggatgcgaggatcggggaatccggattcacgagggagaagttcgagtggtacttagatttaaggaggcatgggacagtgaaacattcaggaataagcctaagcatggaacaaatgcttctgtatgcgaccgggcttcctgatatcaaagatgccattcctttcccaagaagttggggcaaagcaaacaattaaagcagcctcaagctatttatgtacaaacttgaagttacattgttgtgtattctctgtaaccatacttgggtgtgaaataataaggaacccctataccaaattgttcataatcctataccaagttttagtatatttgtattgataacatatctactcaaaattgtactcactgcgactagatttgatgttctatagttgattc

SEQ ID NO: 100365 - protein, 638 aa, Arabidopsis thaliana
  peptide (1)..(638): Ceres Seq. ID no. 13604940
  misc_feature (367)..(634): Pfam Name: tRNA synthetases class II (D, K and N) Pfam Description: tRNA synthetases class II (D, K and N)
  misc_feature (363)..(638): Homolog of NCBI NO: 2664212 NR Description: asparaginyl-tRNA synthetase [Arabidopsis thaliana]
  misc_feature (140)..(637): Homolog of NCBI NO: 15241897 NR Description: asparaginyl-tRNA synthetase, cytoplasmic 1 ligase 1) (SYNC1) [Arabidopsis thaliana]
  misc_feature (13)..(78): Homolog of NCBI NO: 15241897 NR Description: asparaginyl-tRNA synthetase, cytoplasmic 1 ligase 1) (SYNC1) [Arabidopsis thaliana]
  misc_feature (140)..(637): Homolog of NCBI NO: 34914792 NR Description: putative asparaginyl-tRNA synthetase [Oryza
  misc_feature (23)..(66): Homolog of NCBI NO: 34914792 NR Description: putative asparaginyl-tRNA synthetase [Oryza
  misc_feature (111)..(637): Homolog of NCBI NO: 15223302 NR Description: asparaginyl-tRNA synthetase, cytoplasmic ligase), putative [Arabidopsis thaliana]
  misc_feature (365)..(636): Homolog of NCBI NO: 28209914 NR Description: asparaginyl-tRNA synthetase [Clostridium tetani
  misc_feature (140)..(294): Homolog of NCBI NO: 28209914 NR Description: asparaginyl-tRNA synthetase [Clostridium tetani
  misc_feature (360)..(632): Homolog of NCBI NO: 23040758 NR Description: hypothetical protein [Trichodesmium erythraeum
  misc_feature (140)..(306): Homolog of NCBI NO: 23040758 NR Description: hypothetical protein [Trichodesmium erythraeum
MESHGKTHQKEHDNDLSPKPITLSKYSKRVELKTLLDRSDRGAGLAGKRVVIGGWVKSARAVKKNSPPPPLPVVAAPSPSSGGDQAHTTANIRCTEIIQSKMNIFKRFFDVLSGGGKTYPIFDKTELAGQKAVPPPEYVFYFLISDGSSISSLQVVVDSALSTVPATQLMALGTCIVAEGVLRLPLAASAKHVIELEAEKLLHVGTVDPEKYPLSKKQLPLHMLRDFSHFRPRTTTVGSVTRVHSALTLASHTFLQYHGFQYVQVPVITTTTGFGEMFRVTTLLGKTDDKEEKKPPVQEKDGFSIDTVKAVIKEKTRLIDHLKRSDSNRETVVAAVHDLKKTNDLASQIEMKQKSKTGTLVKPEKLDFSKDFFGRDTYLTASGRFHLESYASALGKVYTFGPRFIADKIDNARHLAEKWNVETEMAFAELDDAMDCADEYFKFLCKYVLENRDEDMKFISKRVDKTITTRLEATASSSLLRFSYTEVISLLQKATTTKFETKPEWGVALTTEHLSYLTDEIYKGPVIVHTYPKAIKQFYVRLNDDKKTVAAFDLVVPKVGVVITGSQNEERFEILDARIGESGFTREKFEWYLDLRRHGTVKHSGISLSMEQMLLYATGLPDIKDAIPFPRSWGKANN

SEQ ID NO: 100366 - protein, 537 aa, Arabidopsis thaliana
  peptide (1)..(537): Ceres Seq. ID no. 13604941
  misc_feature (266)..(533): Pfam Name: tRNA synthetases class II (D, K and N) Pfam Description: tRNA synthetases class II (D, K and N)
  misc_feature (262)..(537): Homolog of NCBI NO: 2664212 NR Description: asparaginyl-tRNA synthetase [Arabidopsis thaliana]
  misc_feature (39)..(536): Homolog of NCBI NO: 15241897 NR Description: asparaginyl-tRNA synthetase, cytoplasmic 1 ligase 1) (SYNC1) [Arabidopsis thaliana]
  misc_feature (39)..(536): Homolog of NCBI NO: 34914792 NR Description: putative asparaginyl-tRNA synthetase [Oryza
  misc_feature (10)..(536): Homolog of NCBI NO: 15223302 NR Description: asparaginyl-tRNA synthetase, cytoplasmic ligase), putative [Arabidopsis thaliana]
  misc_feature (264)..(535): Homolog of NCBI NO: 28209914 NR Description: asparaginyl-tRNA synthetase [Clostridium tetani
  misc_feature (39)..(193): Homolog of NCBI NO: 28209914 NR Description: asparaginyl-tRNA synthetase [Clostridium tetani
  misc_feature (259)..(531): Homolog of NCBI NO: 23040758 NR Description: hypothetical protein [Trichodesmium erythraeum
  misc_feature (39)..(205): Homolog of NCBI NO: 23040758 NR Description: hypothetical protein [Trichodesmium erythraeum
  misc_feature (265)..(535): Homolog of NCBI NO: 15896505 NR Description: Aspartyl/asparaginyl-tRNA synthetase [Clostridium
  misc_feature (23)..(202): Homolog of NCBI NO: 15896505 NR Description: Aspartyl/asparaginyl-tRNA synthetase [Clostridium
MNIFKRFFDVLSGGGKTYPIFDKTELAGQKAVPPPEYVFYFLISDGSSISSLQVVVDSALSTVPATQLMALGTCIVAEGVLRLPLAASAKHVIELEAEKLLHVGTVDPEKYPLSKKQLPLHMLRDFSHFRPRTTTVGSVTRVHSALTLASHTFLQYHGFQYVQVPVITTTTGFGEMFRVTTLLGKTDDKEEKKPPVQEKDGFSIDTVKAVIKEKTRLIDHLKRSDSNRETVVAAVHDLKKTNDLASQIEMKQKSKTGTLVKPEKLDFSKDFFGRDTYLTASGRFHLESYASALGKVYTFGPRFIADKIDNARHLAEKWNVETEMAFAELDDAMDCADEYFKFLCKYVLENRDEDMKFISKRVDKTITTRLEATASSSLLRFSYTEVISLLQKATTTKFETKPEWGVALTTEHLSYLTDEIYKGPVIVHTYPKAIKQFYVRLNDDKKTVAAFDLVVPKVGVVITGSQNEERFEILDARIGESGFTREKFEWYLDLRRHGTVKHSGISLSMEQMLLYATGLPDIKDAIPFPRSWGKANN

SEQ ID NO: 100367 - protein, 469 aa, Arabidopsis thaliana
  peptide (1)..(469): Ceres Seq. ID no. 13604942
  misc_feature (198)..(465): Pfam Name: tRNA synthetases class II (D, K and N) Pfam Description: tRNA synthetases class II (D, K and N)
  misc_feature (194)..(469): Homolog of NCBI NO: 2664212 NR Description: asparaginyl-tRNA synthetase [Arabidopsis thaliana]
  misc_feature (1)..(468): Homolog of NCBI NO: 15241897 NR Description: asparaginyl-tRNA synthetase, cytoplasmic 1 ligase 1) (SYNC1) [Arabidopsis thaliana]
  misc_feature (1)..(468): Homolog of NCBI NO: 34914792 NR Description: putative asparaginyl-tRNA synthetase [Oryza
  misc_feature (1)..(468): Homolog of NCBI NO: 15223302 NR Description: asparaginyl-tRNA synthetase, cytoplasmic ligase), putative [Arabidopsis thaliana]
  misc_feature (196)..(467): Homolog of NCBI NO: 28209914 NR Description: asparaginyl-tRNA synthetase [Clostridium tetani
  misc_feature (1)..(125): Homolog of NCBI NO: 28209914 NR Description: asparaginyl-tRNA synthetase [Clostridium tetani
  misc_feature (191)..(463): Homolog of NCBI NO: 23040758 NR Description: hypothetical protein [Trichodesmium erythraeum
  misc_feature (1)..(137): Homolog of NCBI NO: 23040758 NR Description: hypothetical protein [Trichodesmium erythraeum
  misc_feature (197)..(467): Homolog of NCBI NO: 15896505 NR Description: Aspartyl/asparaginyl-tRNA synthetase [Clostridium
  misc_feature (1)..(134): Homolog of NCBI NO: 15896505 NR Description: Aspartyl/asparaginyl-tRNA synthetase [Clostridium
MALGTCIVAEGVLRLPLAASAKHVIELEAEKLLHVGTVDPEKYPLSKKQLPLHMLRDFSHFRPRTTTVGSVTRVHSALTLASHTFLQYHGFQYVQVPVITTTTGFGEMFRVTTLLGKTDDKEEKKPPVQEKDGFSIDTVKAVIKEKTRLIDHLKRSDSNRETVVAAVHDLKKTNDLASQIEMKQKSKTGTLVKPEKLDFSKDFFGRDTYLTASGRFHLESYASALGKVYTFGPRFIADKIDNARHLAEKWNVETEMAFAELDDAMDCADEYFKFLCKYVLENRDEDMKFISKRVDKTITTRLEATASSSLLRFSYTEVISLLQKATTTKFETKPEWGVALTTEHLSYLTDEIYKGPVIVHTYPKAIKQFYVRLNDDKKTVAAFDLVVPKVGVVITGSQNEERFEILDARIGESGFTREKFEWYLDLRRHGTVKHSGISLSMEQMLLYATGLPDIKDAIPFPRSWGKANN

SEQ ID NO: 100368 - DNA, 1742 bp, Arabidopsis thaliana
  misc_feature (1)..(1742): Ceres Seq. ID no. 13604949
  misc_feature: MA Experiment ID: 20000184 Result: Up-regulated in Transcription
  misc_feature: MA Experiment 20000184 PARAMETER Experiment Name: At_Shoots__P Parameter: Age (day) Value: 7
  misc_feature: MA Experiment 20000184 PARAMETER Experiment Name: At_Shoots__P Parameter: Tissue Value: Shoots vs. Whole Plant
aaaataatatttattattgccattgaaaaagactcatttgatcgagagagaaaaagaatcatttgaaccaaaagcatctttttctatcttttcaaatgcttacttccttcaaatcctctagctcctcctccgaagatgccaccgctaccaccaccgagaatcctcctcctttgtgcatcgcctcctcctcggccgcaacctccgcctcacatcacctccgtcgtcttcttttcaccgctgcgaatttcgtctcccagtcaaacttcaccgccgctcaaaacttactctcaatcctctcccttaactcttctcctcacggcgactccaccgagcgacttgtacacctcttcactaaagccttgtccgtacgaatcaaccgtcagcaacaagatcagacggctgaaacggttgccacgtggacgacgaacgaaatgacgatgagtaactccacggtgttcacgagcagtgtatgcaaagaacagttcttgtttcgaaccaagaacaacaattctgacttcgagtcttgttactatctttggctaaaccaactaacgccgtttattcggttcggtcatttaacggcgaaccaagctatcctcgacgcgacggagacaaacgataacggagctctacatatacttgatttagatatatcacaaggacttcaatggcctccattgatgcaagccctagcagagaggtcatcaaaccctagcagtccacctccatctctccgcataaccggatgcggtcgagatgtaaccggattaaaccgaactggagaccggttaacccggttcgctgactctttaggtctccaattccagtttcacacgctagtgatcgtagaagaagatctcgccggacttttgctacagatccgattgttagctctctcagccgtacaaggagagaccattgccgtcaattgtgttcacttcctccacaaaatatttaacgacgatggagatatgatcggtcacttcttgtcagcgatcaagagcttaaactctagaatcgttacaatggcagagagagaagctaatcatggagatcactcgttcttgaatagattctctgaggcagtggatcattacatggcgatctttgattcgttggaagcgacgttgccgccaaatagccgagagagactaaccctagagcaacggtggttcggtaaggagattttggatgttgtggcggcggaagagacggagagaaagcaaagacatcggaggtttgagatttgggaagagatgatgaagaggtttggtttcgttaacgttcctattggaagctttgctttgtctcaagctaagcttcttcttagacttcattatccttcagaaggttataatcttcagttccttaacaattctttgtttcttggctggcaaaatcgtcccctcttctccgtttcgtcgtggaaatgatccaaagagaaggacaaaaaaacctatatatctaggtatatagtagacaaaaaaaaagatcgataatttttggtgttagggcaaaaaatgattaagcagatgatggaagaggacgatggctccggcgaagattgtcgacgccggcggattcttgggatgtgtgtctttttgtttcttgggaagctcaaacaaagagacaacctaatcttttgtgtttttaacctactaatatttactaatatctatattttttttgtcaaactcaatcttaggtgtatcgttttgacatatataatcccattctgtctc

SEQ ID NO: 100369 - protein, 445 aa, Arabidopsis thaliana
  peptide (1)..(445): Ceres Seq. ID no. 13604950
  misc_feature (15)..(353): Pfam Name: GRAS family transcription factor Pfam Description: GRAS family transcription factor
  misc_feature (1)..(445): Homolog of NCBI NO: 15222748 NR Description: scarecrow transcription factor family thaliana] >gi|8778485|gb|AAF79493.1|AC002328_1 F20N2.1 thaliana] >gi|30575370|gb|AAP20048.1| lateral suppressor
  misc_feature (1)..(445): Homolog of NCBI NO: 13620166 NR Description: hypothetical protein [Capsella rubella]
  misc_feature (36)..(445): Homolog of NCBI NO: 4160441 NR Description: lateral suppressor protein [Lycopersicon >gi|13620224|emb|CAC36399.1| lateral suppressor [Lycopersicon
  misc_feature (146)..(445): Homolog of NCBI NO: 30142081 NR Description: MONOCULM 1 [Oryza sativa (japonica
  misc_feature (65)..(445): Homolog of NCBI NO: 3021336 NR Description: RGA-like [Arabidopsis thaliana]
  misc_feature (76)..(445): Homolog of NCBI NO: 26451075 NR Description: putative RGA1 [Arabidopsis thaliana]
  misc_feature (65)..(445): Homolog of NCBI NO: 15219630 NR Description: gibberellin response modulator (RGAL)
  misc_feature (138)..(445): Homolog of NCBI NO: 15228553 NR Description: gibberellin response modulator, putative
  misc_feature (1)..(445): Homolog of NCBI NO: 31322802 NR Description: GAI-like protein [Lycopersicon esculentum]
  misc_feature (141)..(445): Homolog of NCBI NO: 15237971 NR Description: gibberellin response modulator, putative
MLTSFKSSSSSSEDATATTTENPPPLCIASSSAATSASHHLRRLLFTAANFVSQSNFTAAQNLLSILSLNSSPHGDSTERLVHLFTKALSVRINRQQQDQTAETVATWTTNEMTMSNSTVFTSSVCKEQFLFRTKNNNSDFESCYYLWLNQLTPFIRFGHLTANQAILDATETNDNGALHILDLDISQGLQWPPLMQALAERSSNPSSPPPSLRITGCGRDVTGLNRTGDRLTRFADSLGLQFQFHTLVIVEEDLAGLLLQIRLLALSAVQGETIAVNCVHFLHKIFNDDGDMIGHFLSAIKSLNSRIVTMAEREANHGDHSFLNRFSEAVDHYMAIFDSLEATLPPNSRERLTLEQRWFGKEILDVVAAEETERKQRHRRFEIWEEMMKRFGFVNVPIGSFALSQAKLLLRLHYPSEGYNLQFLNNSLFLGWQNRPLFSVSSWK

SEQ ID NO: 100370 - protein, 333 aa, Arabidopsis thaliana
  peptide (1)..(333): Ceres Seq. ID no. 13604951
  misc_feature (1)..(241): Pfam Name: GRAS family transcription factor Pfam Description: GRAS family transcription factor
  misc_feature (1)..(333): Homolog of NCBI NO: 15222748 NR Description: scarecrow transcription factor family thaliana] >gi|8778485|gb|AAF79493.1|AC002328_1 F20N2.1 thaliana] >gi|30575370|gb|AAP20048.1| lateral suppressor
  misc_feature (1)..(333): Homolog of NCBI NO: 13620166 NR Description: hypothetical protein [Capsella rubella]
  misc_feature (1)..(333): Homolog of NCBI NO: 4160441 NR Description: lateral suppressor protein [Lycopersicon >gi|13620224|emb|CAC36399.1| lateral suppressor [Lycopersicon
  misc_feature (34)..(333): Homolog of NCBI NO: 30142081 NR Description: MONOCULM 1 [Oryza sativa (japonica
  misc_feature (1)..(333): Homolog of NCBI NO: 3021336 NR Description: RGA-like [Arabidopsis thaliana]
  misc_feature (1)..(333): Homolog of NCBI NO: 26451075 NR Description: putative RGA1 [Arabidopsis thaliana]
  misc_feature (1)..(333): Homolog of NCBI NO: 15219630 NR Description: gibberellin response modulator (RGAL)
  misc_feature (26)..(333): Homolog of NCBI NO: 15228553 NR Description: gibberellin response modulator, putative
  misc_feature (1)..(333): Homolog of NCBI NO: 31322802 NR Description: GAI-like protein [Lycopersicon esculentum]
  misc_feature (29)..(333): Homolog of NCBI NO: 15237971 NR Description: gibberellin response modulator, putative
MTMSNSTVFTSSVCKEQFLFRTKNNNSDFESCYYLWLNQLTPFIRFGHLTANQAILDATETNDNGALHILDLDISQGLQWPPLMQALAERSSNPSSPPPSLRITGCGRDVTGLNRTGDRLTRFADSLGLQFQFHTLVIVEEDLAGLLLQIRLLALSAVQGETIAVNCVHFLHKIFNDDGDMIGHFLSAIKSLNSRIVTMAEREANHGDHSFLNRFSEAVDHYMAIFDSLEATLPPNSRERLTLEQRWFGKEILDVVAAEETERKQRHRRFEIWEEMMKRFGFVNVPIGSFALSQAKLLLRLHYPSEGYNLQFLNNSLFLGWQNRPLFSVSSWK

SEQ ID NO: 100371 - protein, 331 aa, Arabidopsis thaliana
  peptide (1)..(331): Ceres Seq. ID no. 13604952
  misc_feature (1)..(239): Pfam Name: GRAS family transcription factor Pfam Description: GRAS family transcription factor
  misc_feature (1)..(331): Homolog of NCBI NO: 15222748 NR Description: scarecrow transcription factor family thaliana] >gi|8778485|gb|AAF79493.1|AC002328_1 F20N2.1 thaliana] >gi|30575370|gb|AAP20048.1| lateral suppressor
  misc_feature (1)..(331): Homolog of NCBI NO: 13620166 NR Description: hypothetical protein [Capsella rubella]
  misc_feature (1)..(331): Homolog of NCBI NO: 4160441 NR Description: lateral suppressor protein [Lycopersicon >gi|13620224|emb|CAC36399.1| lateral suppressor [Lycopersicon
  misc_feature (32)..(331): Homolog of NCBI NO: 30142081 NR Description: MONOCULM 1 [Oryza sativa (japonica
  misc_feature (1)..(331): Homolog of NCBI NO: 3021336 NR Description: RGA-like [Arabidopsis thaliana]
  misc_feature (1)..(331): Homolog of NCBI NO: 26451075 NR Description: putative RGA1 [Arabidopsis thaliana]
  misc_feature (1)..(331): Homolog of NCBI NO: 15219630 NR Description: gibberellin response modulator (RGAL)
  misc_feature (24)..(331): Homolog of NCBI NO: 15228553 NR Description: gibberellin response modulator, putative
  misc_feature (1)..(331): Homolog of NCBI NO: 31322802 NR Description: GAI-like protein [Lycopersicon esculentum]
  misc_feature (27)..(331): Homolog of NCBI NO: 15237971 NR Description: gibberellin response modulator, putative
MSNSTVFTSSVCKEQFLFRTKNNNSDFESCYYLWLNQLTPFIRFGHLTANQAILDATETNDNGALHILDLDISQGLQWPPLMQALAERSSNPSSPPPSLRITGCGRDVTGLNRTGDRLTRFADSLGLQFQFHTLVIVEEDLAGLLLQIRLLALSAVQGETIAVNCVHFLHKIFNDDGDMIGHFLSAIKSLNSRIVTMAEREANHGDHSFLNRFSEAVDHYMAIFDSLEATLPPNSRERLTLEQRWFGKEILDVVAAEETERKQRHRRFEIWEEMMKRFGFVNVPIGSFALSQAKLLLRLHYPSEGYNLQFLNNSLFLGWQNRPLFSVSSWK

SEQ ID NO: 100372 - DNA, 499 bp, Arabidopsis thaliana
  misc_feature (1)..(499): Ceres Seq. ID no. 13604965
  misc_feature: MA Experiment ID: 20000185 Result: Down-regulated in Transcription
  misc_feature: MA Experiment 20000185 PARAMETER Experiment Name: At_Roots__P Parameter: Age (day) Value: 7 vs. 21
  misc_feature: MA Experiment 20000185 PARAMETER Experiment Name: At_Roots__P Parameter: Organism Value: A. thaliana
  misc_feature: MA Experiment 20000185 PARAMETER Experiment Name: At_Roots__P Parameter: Tissue Value: Roots vs. Whole Plant
  misc_feature: MA Experiment ID: 20000213 Result: Down-regulated in Transcription
  misc_feature: MA Experiment 20000213 PARAMETER Experiment Name: At_4deg_Cold_P Parameter: Timepoint (hr) Value: 2
  misc_feature: MA Experiment ID: 20000234 Result: Down-regulated in Transcription
  misc_feature: MA Experiment 20000234 PARAMETER Experiment Name: At_Siliques_P Parameter: Age (day) Value: 21
  misc_feature: MA Experiment 20000234 PARAMETER Experiment Name: At_Siliques_P Parameter: Organism Value: A. thaliana
  misc_feature: MA Experiment 20000234 PARAMETER Experiment Name: At_Siliques_P Parameter: Plant Line Value: WS
  misc_feature: MA Experiment 20000234 PARAMETER Experiment Name: At_Siliques_P Parameter: Tissue Value: Less Than 5mm Siliques vs. Whole Plant
  misc_feature: MA Experiment ID: 20000264 Result: Down-regulated in Transcription
  misc_feature: MA Experiment 20000264 PARAMETER Experiment Name: At_Open_Flower_P Parameter: Age (day) Value: 21
  misc_feature: MA Experiment 20000264 PARAMETER Experiment Name: At_Open_Flower_P Parameter: Plant Line Value: WS
  misc_feature: MA Experiment 20000264 PARAMETER Experiment Name: At_Open_Flower_P Parameter: Tissue Value: Open Flower vs. Whole Plant
  misc_feature: MA Experiment ID: 20000265 Result: Down-regulated in Transcription
  misc_feature: MA Experiment 20000265 PARAMETER Experiment Name: At_Open_Flower_P Parameter: Age (day) Value: 21
  misc_feature: MA Experiment 20000265 PARAMETER Experiment Name: At_Open_Flower_P Parameter: Plant Line Value: WS
  misc_feature: MA Experiment 20000265 PARAMETER Experiment Name: At_Open_Flower_P Parameter: Tissue Value: Closed Flower vs. Whole Plant
  misc_feature: MA Experiment ID: 20000286 Result: Down-regulated in Transcription
  misc_feature: MA Experiment 20000286 PARAMETER Experiment Name: At_Open_Flower_P Parameter: Age (day) Value: 21
  misc_feature: MA Experiment 20000286 PARAMETER Experiment Name: At_Open_Flower_P Parameter: Plant Line Value: WS
  misc_feature: MA Experiment 20000286 PARAMETER Experiment Name: At_Open_Flower_P Parameter: Tissue Value: Half Open vs. Whole Plant
  misc_feature: MA Experiment ID: 20000438 Result: Down-regulated in Transcription
  misc_feature: MA Experiment 20000438 PARAMETER Experiment Name: At_Shoots__P Parameter: Age (day) Value: 14
  misc_feature: MA Experiment 20000438 PARAMETER Experiment Name: At_Shoots__P Parameter: Tissue Value: Shoots vs. Whole Plant
  misc_feature: MA Experiment ID: 20000439 Result: Down-regulated in Transcription
  misc_feature: MA Experiment 20000439 PARAMETER Experiment Name: At_Roots__P Parameter: Age (day) Value: 14 vs. 21
  misc_feature: MA Experiment 20000439 PARAMETER Experiment Name: At_Roots__P Parameter: Organism Value: A. thaliana
  misc_feature: MA Experiment 20000439 PARAMETER Experiment Name: At_Roots__P Parameter: Tissue Value: Roots vs. Whole Plant
  misc_feature: MA Experiment ID: 20000441 Result: Up-regulated in Transcription
  misc_feature: MA Experiment 20000441 PARAMETER Experiment Name: At_1uM_BR-BRZ__P Parameter: Tissue Value: Shoot Apices
  misc_feature: MA Experiment 20000441 PARAMETER Experiment Name: At_1uM_BR-BRZ__P Parameter: Treatment Value: 1uM BR vs. No Treatment
  misc_feature: MA Experiment ID: 20000443 Result: Up-regulated in Transcription
  misc_feature: MA Experiment 20000443 PARAMETER Experiment Name: At_1uM_BR-BRZ__P Parameter: Tissue Value: Shoot Apices
  misc_feature: MA Experiment 20000443 PARAMETER Experiment Name: At_1uM_BR-BRZ__P Parameter: Treatment Value: 1uM BRZ vs. No Treatment
  misc_feature: MA Experiment ID: 20000453 Result: Up-regulated in Transcription
  misc_feature: MA Experiment 20000453 PARAMETER Experiment Name: At_100uM_ABA_P Parameter: Age (day) Value: 15
  misc_feature: MA Experiment 20000453 PARAMETER Experiment Name: At_100uM_ABA_P Parameter: Organism Value: A. thaliana
  misc_feature: MA Experiment 20000453 PARAMETER Experiment Name: At_100uM_ABA_P Parameter: Plant Line Value: WS
  misc_feature: MA Experiment 20000453 PARAMETER Experiment Name: At_100uM_ABA_P Parameter: Timepoint (hr) Value: 24
  misc_feature: MA Experiment 20000453 PARAMETER Experiment Name: At_100uM_ABA_P Parameter: Tissue Value: Aerial
  misc_feature: MA Experiment 20000453 PARAMETER Experiment Name: At_100uM_ABA_P Parameter: Treatment Value: 100uM ABA vs. No Treatment
  misc_feature: MA Experiment ID: 20000456 Result: Down-regulated in Transcription
  misc_feature: MA Experiment 20000456 PARAMETER Experiment Name: At_100uM_BA_P Parameter: Age (day) Value: 14
  misc_feature: MA Experiment 20000456 PARAMETER Experiment Name: At_100uM_BA_P Parameter: Organism Value: A. thaliana
  misc_feature: MA Experiment 20000456 PARAMETER Experiment Name: At_100uM_BA_P Parameter: Plant Line Value: WS
  misc_feature: MA Experiment 20000456 PARAMETER Experiment Name: At_100uM_BA_P Parameter: Timepoint (hr) Value: 6
  misc_feature: MA Experiment 20000456 PARAMETER Experiment Name: At_100uM_BA_P Parameter: Tissue Value: Aerial
  misc_feature: MA Experiment 20000456 PARAMETER Experiment Name: At_100uM_BA_P Parameter: Treatment Value: 100uM BA vs. No Treatment
  misc_feature: MA Experiment ID: 20000573 Result: Up-regulated in Transcription
  misc_feature: MA Experiment 20000573 PARAMETER Experiment Name: At_100uM_ABA_Mutants__P Parameter: Organism Value: A. thaliana
  misc_feature: MA Experiment 20000573 PARAMETER Experiment Name: At_100uM_ABA_Mutants__P Parameter: Plant Line Value: CS22 vs. Ler wt
  misc_feature: MA Experiment 20000573 PARAMETER Experiment Name: At_100uM_ABA_Mutants__P Parameter: Timepoint (hr) Value: N/A
  misc_feature: MA Experiment 20000573 PARAMETER Experiment Name: At_100uM_ABA_Mutants__P Parameter: Tissue Value: Whole Plant
  misc_feature: MA Experiment 20000573 PARAMETER Experiment Name: At_100uM_ABA_Mutants__P Parameter: Treatment Value: None
  misc_feature: MA Experiment ID: 20000574 Result: Up-regulated in Transcription
  misc_feature: MA Experiment 20000574 PARAMETER Experiment Name: At_100uM_ABA_Mutants__P Parameter: Organism Value: A. thaliana
  misc_feature: MA Experiment 20000574 PARAMETER Experiment Name: At_100uM_ABA_Mutants__P Parameter: Plant Line Value: CS23 vs. Ler wt
  misc_feature: MA Experiment 20000574 PARAMETER Experiment Name: At_100uM_ABA_Mutants__P Parameter: Timepoint (hr) Value: N/A
  misc_feature: MA Experiment 20000574 PARAMETER Experiment Name: At_100uM_ABA_Mutants__P Parameter: Tissue Value: Whole Plant
  misc_feature: MA Experiment 20000574 PARAMETER Experiment Name: At_100uM_ABA_Mutants__P Parameter: Treatment Value: None
  misc_feature: MA Experiment ID: 20000709 Result: Down-regulated in Transcription
  misc_feature: MA Experiment 20000709 PARAMETER Experiment Name: At_15mM_NH4NO3_L-to-H_P Parameter: Age (hr) Value: 14
  misc_feature: MA Experiment 20000709 PARAMETER Experiment Name: At_15mM_NH4NO3_L-to-H_P Parameter: Organism Value: A. thaliana
  misc_feature: MA Experiment 20000709 PARAMETER Experiment Name: At_15mM_NH4NO3_L-to-H_P Parameter: Plant Line Value: WS
  misc_feature: MA Experiment 20000709 PARAMETER Experiment Name: At_15mM_NH4NO3_L-to-H_P Parameter: Timepoint (hr) Value: 4
  misc_feature: MA Experiment 20000709 PARAMETER Experiment Name: At_15mM_NH4NO3_L-to-H_P Parameter: Tissue Value: Aerial
  misc_feature: MA Experiment 20000709 PARAMETER Experiment Name: At_15mM_NH4NO3_L-to-H_P Parameter: Treatment Value: 15mM NH4NO3 vs. 30mM Mannitol
  misc_feature: MA Experiment ID: 20000794 Result: Down-regulated in Transcription
  misc_feature: MA Experiment 20000794 PARAMETER Experiment Name: At_Petals_P Parameter: Age (day) Value: 23-25 days
  misc_feature: MA Experiment 20000794 PARAMETER Experiment Name: At_Petals_P Parameter: Plant Line Value: WS
  misc_feature: MA Experiment 20000794 PARAMETER Experiment Name: At_Petals_P Parameter: Tissue Value: Petals vs. Whole plant
  misc_feature: MA Experiment ID: 20001248 Result: Up-regulated in Transcription
  misc_feature: MA Experiment 20001248 PARAMETER Experiment Name: At_Far-red-induction_P Parameter: Age (day) Value: 7
  misc_feature: MA Experiment 20001248 PARAMETER Experiment Name: At_Far-red-induction_P Parameter: Light Value: Far-red vs. White
  misc_feature: MA Experiment 20001248 PARAMETER Experiment Name: At_Far-red-induction_P Parameter: Organism Value: A. thaliana
  misc_feature: MA Experiment 20001248 PARAMETER Experiment Name: At_Far-red-induction_P Parameter: Plant Line Value: Columbia
  misc_feature: MA Experiment 20001248 PARAMETER Experiment Name: At_Far-red-induction_P Parameter: Timepoint (hr) Value: 4
  misc_feature: MA Experiment 20001248 PARAMETER Experiment Name: At_Far-red-induction_P Parameter: Tissue Value: Whole Plant
gcctcttgtaaatcacactactcggctctttagaggttctttggacgatgaaacaactaatccgccgtttatcgcgtgtcgcggactcaacacagtatagcctcctccggtctgaatcccagcgtggccgcaccaagaaggagaaacacaaatcttgggttcccgaggggcacgtgcctgtttacgtaggccacgagatggagcggttcgtggtgaatgcggagctgctcaaccaccccgttttcgtagcgttgctgaagcagtcggctcaagagtatggatacgagcaacaaggagtgcttcgcatcccttgccacgtgcttgtgttcgaacgcatcttggagtctctccgtctcggactcgccgatcgagtcacatgacctacacgatctcttttgagatttaagaagtttctagtgtcttatagtatcttgctagctataggggaaacagagttatgtaaattacatattctttatctaattggtttatcagatct

SEQ ID NO: 100373 - protein, 110 aa, Arabidopsis thaliana
  peptide (1)..(110): Ceres Seq. ID no. 13604966
  misc_feature (4)..(102): Pfam Name: Auxin responsive protein Pfam Description: Auxin responsive protein
  misc_feature (1)..(110): Homolog of NCBI NO: 15223462 NR Description: auxin-induced (indole-3-acetic acid induced) family [Arabidopsis thaliana] >gi|25296219|pir||H96602 unknown
  misc_feature (1)..(105): Homolog of NCBI NO: 15230601 NR Description: auxin-induced (indole-3-acetic acid induced)
  misc_feature (1)..(104): Homolog of NCBI NO: 15219275 NR Description: auxin-induced (indole-3-acetic acid induced)
  misc_feature (1)..(107): Homolog of NCBI NO: 15219296 NR Description: auxin-induced (indole-3-acetic acid induced) family [Arabidopsis thaliana] >gi|7487901|pir||T01042
  misc_feature (1)..(104): Homolog of NCBI NO: 38345606 NR Description: OSJNBa0093O08.8 [Oryza sativa (japonica
  misc_feature (1)..(104): Homolog of NCBI NO: 5852079 NR Description: zwh0002.1 [Oryza sativa (indica cultivar-group)]
  misc_feature (39)..(107): Homolog of NCBI NO: 38567890 NR Description: OSJNBa0060N03.10 [Oryza sativa (japonica
  misc_feature (2)..(107): Homolog of NCBI NO: 30687983 NR Description: auxin-induced (indole-3-acetic acid induced) putative (SAUR_b) [Arabidopsis thaliana] unknown protein [Arabidopsis thaliana]
  misc_feature (35)..(108): Homolog of NCBI NO: 6906857 NR Description: unknown [Zea mays]
  misc_feature (38)..(107): Homolog of NCBI NO: 15235917 NR Description: auxin-induced (indole-3-acetic acid induced)
MKQLIRRLSRVADSTQYSLLRSESQRGRTKKEKHKSWVPEGHVPVYVGHEMERFVVNAELLNHPVFVALLKQSAQEYGYEQQGVLRIPCHVLVFERILESLRLGLADRVT

SEQ ID NO: 100374 - protein, 60 aa, Arabidopsis thaliana
  peptide (1)..(60): Ceres Seq. ID no. 13604967
  misc_feature (1)..(52): Pfam Name: Auxin responsive protein Pfam Description: Auxin responsive protein
  misc_feature (1)..(60): Homolog of NCBI NO: 15223462 NR Description: auxin-induced (indole-3-acetic acid induced) family [Arabidopsis thaliana] >gi|25296219|pir||H96602 unknown
  misc_feature (1)..(55): Homolog of NCBI NO: 15230601 NR Description: auxin-induced (indole-3-acetic acid induced)
  misc_feature (1)..(54): Homolog of NCBI NO: 15219275 NR Description: auxin-induced (indole-3-acetic acid induced)
  misc_feature (1)..(57): Homolog of NCBI NO: 15219296 NR Description: auxin-induced (indole-3-acetic acid induced) family [Arabidopsis thaliana] >gi|7487901|pir||T01042
  misc_feature (1)..(54): Homolog of NCBI NO: 38345606 NR Description: OSJNBa0093O08.8 [Oryza sativa (japonica
  misc_feature (1)..(54): Homolog of NCBI NO: 5852079 NR Description: zwh0002.1 [Oryza sativa (indica cultivar-group)]
  misc_feature (1)..(57): Homolog of NCBI NO: 38567890 NR Description: OSJNBa0060N03.10 [Oryza sativa (japonica
  misc_feature (1)..(57): Homolog of NCBI NO: 30687983 NR Description: auxin-induced (indole-3-acetic acid induced) putative (SAUR_b) [Arabidopsis thaliana] unknown protein [Arabidopsis thaliana]
  misc_feature (1)..(58): Homolog of NCBI NO: 6906857 NR Description: unknown [Zea mays]
  misc_feature (1)..(57): Homolog of NCBI NO: 15235917 NR Description: auxin-induced (indole-3-acetic acid induced)
MERFVVNAELLNHPVFVALLKQSAQEYGYEQQGVLRIPCHVLVFERILESLRLGLADRVT

SEQ ID NO: 100375 - DNA, 924 bp, Arabidopsis thaliana
  misc_feature (1)..(924): Ceres Seq. ID no. 13604976
  misc_feature: MA Experiment ID: 20000169 Result: Up-regulated in Transcription
  misc_feature: MA Experiment 20000169 PARAMETER Experiment Name: At_100uM_ABA_P Parameter: Age (day) Value: 14
  misc_feature: MA Experiment 20000169 PARAMETER Experiment Name: At_100uM_ABA_P Parameter: Organism Value: A. thaliana
  misc_feature: MA Experiment 20000169 PARAMETER Experiment Name: At_100uM_ABA_P Parameter: Plant Line Value: WS
  misc_feature: MA Experiment 20000169 PARAMETER Experiment Name: At_100uM_ABA_P Parameter: Timepoint (hr) Value: 6
  misc_feature: MA Experiment 20000169 PARAMETER Experiment Name: At_100uM_ABA_P Parameter: Tissue Value: Aerial
  misc_feature: MA Experiment 20000169 PARAMETER Experiment Name: At_100uM_ABA_P Parameter: Treatment Value: 100uM ABA vs. No Treatment
  misc_feature: MA Experiment ID: 20000268 Result: Up-regulated in Transcription
  misc_feature: MA Experiment 20000268 PARAMETER Experiment Name: At_100mM_NaCl__P Parameter: Age (day) Value: 14
  misc_feature: MA Experiment 20000268 PARAMETER Experiment Name: At_100mM_NaCl__P Parameter: Organism Value: A. thaliana
  misc_feature: MA Experiment 20000268 PARAMETER Experiment Name: At_100mM_NaCl__P Parameter: Plant Line Value: WS
  misc_feature: MA Experiment 20000268 PARAMETER Experiment Name: At_100mM_NaCl__P Parameter: Timepoint (hr) Value: 6
  misc_feature: MA Experiment 20000268 PARAMETER Experiment Name: At_100mM_NaCl__P Parameter: Tissue Value: Whole Plant
  misc_feature: MA Experiment 20000268 PARAMETER Experiment Name: At_100mM_NaCl__P Parameter: Treatment Value: 100mM NaCl vs. No Treatment
  misc_feature: MA Experiment ID: 20000308 Result: Up-regulated in Transcription
  misc_feature: MA Experiment 20000308 PARAMETER Experiment Name: At_100mM_NaCl__P Parameter: Age (day) Value: 17
  misc_feature: MA Experiment 20000308 PARAMETER Experiment Name: At_100mM_NaCl__P Parameter: Organism Value: A. thaliana
  misc_feature: MA Experiment 20000308 PARAMETER Experiment Name: At_100mM_NaCl__P Parameter: Plant Line Value: WS
  misc_feature: MA Experiment 20000308 PARAMETER Experiment Name: At_100mM_NaCl__P Parameter: Timepoint (hr) Value: 72
  misc_feature: MA Experiment 20000308 PARAMETER Experiment Name: At_100mM_NaCl__P Parameter: Tissue Value: Whole Plant
  misc_feature: MA Experiment 20000308 PARAMETER Experiment Name: At_100mM_NaCl__P Parameter: Treatment Value: 100mM NaCl vs. No Treatment
  misc_feature: MA Experiment ID: 20000436 Result: Up-regulated in Transcription
  misc_feature: MA Experiment 20000436 PARAMETER Experiment Name: At_Drought_P Parameter: Age (day) Value: 7
  misc_feature: MA Experiment 20000436 PARAMETER Experiment Name: At_Drought_P Parameter: Organism Value: A. thaliana
  misc_feature: MA Experiment 20000436 PARAMETER Experiment Name: At_Drought_P Parameter: Plant Line Value: WS
  misc_feature: MA Experiment 20000436 PARAMETER Experiment Name: At_Drought_P Parameter: Timepoint (hr) Value: 12
  misc_feature: MA Experiment 20000436 PARAMETER Experiment Name: At_Drought_P Parameter: Tissue Value: Whole Plant
  misc_feature: MA Experiment 20000436 PARAMETER Experiment Name: At_Drought_P Parameter: Treatment Value: Drought vs. No Drought
  misc_feature: MA Experiment ID: 20000527 Result: Down-regulated in Transcription
  misc_feature: MA Experiment 20000527 PARAMETER Experiment Name: At_10percent_PEG_P Parameter: Age (day) Value: 20
  misc_feature: MA Experiment 20000527 PARAMETER Experiment Name: At_10percent_PEG_P Parameter: Organism Value: A. thaliana
  misc_feature: MA Experiment 20000527 PARAMETER Experiment Name: At_10percent_PEG_P Parameter: Plant Line Value: WS
  misc_feature: MA Experiment 20000527 PARAMETER Experiment Name: At_10percent_PEG_P Parameter: Timepoint (day) Value: 20
  misc_feature: MA Experiment 20000527 PARAMETER Experiment Name: At_10percent_PEG_P Parameter: Tissue Value: Whole Plant
  misc_feature: MA Experiment 20000527 PARAMETER Experiment Name: At_10percent_PEG_P Parameter: Treatment Value: 10percent PEG vs. No Treatment
  misc_feature: MA Experiment ID: 20000709 Result: Down-regulated in Transcription
  misc_feature: MA Experiment 20000709 PARAMETER Experiment Name: At_15mM_NH4NO3_L-to-H_P Parameter: Age (hr) Value: 14
  misc_feature: MA Experiment 20000709 PARAMETER Experiment Name: At_15mM_NH4NO3_L-to-H_P Parameter: Organism Value: A. thaliana
  misc_feature: MA Experiment 20000709 PARAMETER Experiment Name: At_15mM_NH4NO3_L-to-H_P Parameter: Plant Line Value: WS
  misc_feature: MA Experiment 20000709 PARAMETER Experiment Name: At_15mM_NH4NO3_L-to-H_P Parameter: Timepoint (hr) Value: 4
  misc_feature: MA Experiment 20000709 PARAMETER Experiment Name: At_15mM_NH4NO3_L-to-H_P Parameter: Tissue Value: Aerial
  misc_feature: MA Experiment 20000709 PARAMETER Experiment Name: At_15mM_NH4NO3_L-to-H_P Parameter: Treatment Value: 15mM NH4NO3 vs. 30mM Mannitol
  misc_feature: MA Experiment ID: 20001457 Result: Down-regulated in Transcription
  misc_feature: MA Experiment 20001457 PARAMETER Experiment Name: At_50mM_NH4NO3_L-to-H_P Parameter: Age (day) Value: Undefined
  misc_feature: MA Experiment 20001457 PARAMETER Experiment Name: At_50mM_NH4NO3_L-to-H_P Parameter: Organism Value: Undefined
  misc_feature: MA Experiment 20001457 PARAMETER Experiment Name: At_50mM_NH4NO3_L-to-H_P Parameter: Plant Line Value: Undefined
  misc_feature: MA Experiment 20001457 PARAMETER Experiment Name: At_50mM_NH4NO3_L-to-H_P Parameter: Timepoint (hr) Value: 0.5
  misc_feature: MA Experiment 20001457 PARAMETER Experiment Name: At_50mM_NH4NO3_L-to-H_P Parameter: Tissue Value: Siliques
  misc_feature: MA Experiment 20001457 PARAMETER Experiment Name: At_50mM_NH4NO3_L-to-H_P Parameter: Treatment Value: 50mM NH4NO3 vs. 100mM Manitol
  misc_feature: MA Experiment ID: 20001554 Result: Up-regulated in Transcription
  misc_feature: MA Experiment 20001554 PARAMETER Experiment Name: At_Drought_Soil_Dry_P Parameter: Age (day) Value: 21
  misc_feature: MA Experiment 20001554 PARAMETER Experiment Name: At_Drought_Soil_Dry_P Parameter: Organism Value: A. thaliana
  misc_feature: MA Experiment 20001554 PARAMETER Experiment Name: At_Drought_Soil_Dry_P Parameter: Plant Line Value: WS
  misc_feature: MA Experiment 20001554 PARAMETER Experiment Name: At_Drought_Soil_Dry_P Parameter: Post Timepoint (hr) Value: None
  misc_feature: MA Experiment 20001554 PARAMETER Experiment Name: At_Drought_Soil_Dry_P Parameter: Post-Treatment Value: None
  misc_feature: MA Experiment 20001554 PARAMETER Experiment Name: At_Drought_Soil_Dry_P Parameter: Timepoint (day) Value: 7
  misc_feature: MA Experiment 20001554 PARAMETER Experiment Name: At_Drought_Soil_Dry_P Parameter: Treatment Value: Drought vs. No Drought
  misc_feature: MA Experiment ID: 20001555 Result: Up-regulated in Transcription
  misc_feature: MA Experiment 20001555 PARAMETER Experiment Name: At_Drought_Soil_Dry_P Parameter: Age (day) Value: 24
  misc_feature: MA Experiment 20001555 PARAMETER Experiment Name: At_Drought_Soil_Dry_P Parameter: Organism Value: A. thaliana
  misc_feature: MA Experiment 20001555 PARAMETER Experiment Name: At_Drought_Soil_Dry_P Parameter: Plant Line Value: WS
  misc_feature: MA Experiment 20001555 PARAMETER Experiment Name: At_Drought_Soil_Dry_P Parameter: Post Timepoint (hr) Value: None
  misc_feature: MA Experiment 20001555 PARAMETER Experiment Name: At_Drought_Soil_Dry_P Parameter: Post-Treatment Value: None
  misc_feature: MA Experiment 20001555 PARAMETER Experiment Name: At_Drought_Soil_Dry_P Parameter: Timepoint (day) Value: 10
  misc_feature: MA Experiment 20001555 PARAMETER Experiment Name: At_Drought_Soil_Dry_P Parameter: Treatment Value: Drought vs. No Drought
  misc_feature: MA Experiment ID: 20001556 Result: Up-regulated in Transcription
  misc_feature: MA Experiment 20001556 PARAMETER Experiment Name: At_Drought_Soil_Dry_P Parameter: Age (day) Value: 26
  misc_feature: MA Experiment 20001556 PARAMETER Experiment Name: At_Drought_Soil_Dry_P Parameter: Organism Value: A. thaliana
  misc_feature: MA Experiment 20001556 PARAMETER Experiment Name: At_Drought_Soil_Dry_P Parameter: Plant Line Value: WS
  misc_feature: MA Experiment 20001556 PARAMETER Experiment Name: At_Drought_Soil_Dry_P Parameter: Post Timepoint (hr) Value: None
  misc_feature: MA Experiment 20001556 PARAMETER Experiment Name: At_Drought_Soil_Dry_P Parameter: Post-Treatment Value: None
  misc_feature: MA Experiment 20001556 PARAMETER Experiment Name: At_Drought_Soil_Dry_P Parameter: Timepoint (day) Value: 12
  misc_feature: MA Experiment 20001556 PARAMETER Experiment Name: At_Drought_Soil_Dry_P Parameter: Treatment Value: Drought vs. No Drought
  misc_feature: MA Experiment ID: 20001559 Result: Up-regulated in Transcription
  misc_feature: MA Experiment 20001559 PARAMETER Experiment Name: At_Drought_Soil_Dry_P Parameter: Age (day) Value: 28
  misc_feature: MA Experiment 20001559 PARAMETER Experiment Name: At_Drought_Soil_Dry_P Parameter: Organism Value: A. thaliana
  misc_feature: MA Experiment 20001559 PARAMETER Experiment Name: At_Drought_Soil_Dry_P Parameter: Plant Line Value: WS
  misc_feature: MA Experiment 20001559 PARAMETER Experiment Name: At_Drought_Soil_Dry_P Parameter: Post Timepoint (hr) Value: 29
  misc_feature: MA Experiment 20001559 PARAMETER Experiment Name: At_Drought_Soil_Dry_P Parameter: Post-Treatment Value: Re-Water vs. No Drought
  misc_feature: MA Experiment 20001559 PARAMETER Experiment Name: At_Drought_Soil_Dry_P Parameter: Timepoint (day) Value: 14
  misc_feature: MA Experiment 20001559 PARAMETER Experiment Name: At_Drought_Soil_Dry_P Parameter: Treatment Value: Drought vs. No Drought
  misc_feature: MA Experiment ID: 20001757 Result: Down-regulated in Transcription
  misc_feature: MA Experiment 20001757 PARAMETER Experiment Name: At_50mM_NH4NO3_L-to-H_P Parameter: Timepoint (hr) Value: 6
  misc_feature: MA Experiment 20001757 PARAMETER Experiment Name: At_50mM_NH4NO3_L-to-H_P Parameter: Tissue Value: Leaf
  misc_feature: MA Experiment 20001757 PARAMETER Experiment Name: At_50mM_NH4NO3_L-to-H_P Parameter: Treatment Value: 50mM NH4NO3 vs 100mM Mannitol
  misc_feature: MA Experiment ID: 20001761 Result: Down-regulated in Transcription
  misc_feature: MA Experiment 20001761 PARAMETER Experiment Name: At_50mM_NH4NO3_L-to-H_P Parameter: Timepoint (hr) Value: 4
  misc_feature: MA Experiment 20001761 PARAMETER Experiment Name: At_50mM_NH4NO3_L-to-H_P Parameter: Tissue Value: Siliques
  misc_feature: MA Experiment 20001761 PARAMETER Experiment Name: At_50mM_NH4NO3_L-to-H_P Parameter: Treatment Value: 50mM NH4NO3 vs 100mM Mannitol
ccacgcgtccgtaccttttacaatttgtttatatattttacgtatctatctttgttccatggagggttcgtccaaagggctgcgaaaaggtgcttggactactgaagaagatagtctcttgagacagtgcattaataagtatggagaaggcaaatggcaccaagttcctgtaagagctgggctaaaccggtgcaggaaaagttgtagattaagatggttgaactatttgaagccaagtatcaagagaggaaaacttagctctgatgaagtcgatcttcttcttcgccttcataggcttctagggaataggtggtctttaattgctggaagattacctggtcggaccgcaaatgacgtcaagaattactggaacactcatctgagtaagaaacatgaaccgtgttgtaagataaagatgaaaaagagagacattacgcccattcctacaacaccggcactaaaaaacaatgtttataagcctcgacctcgatccttcacagttaacaacgactgcaaccatctcaatgccccaccaaaagttgacgttaatcctccatgccttggacttaacatcaataatgtttgtgacaatagtatcatatacaacaaagataagaagaaagaccaactagtgaataatttgattgatggagataatatgtggttagagaaattcctagaggaaagccaagaggtagatattttggttcctgaagcgacgacaacagaaaagggggacaccttggcttttgacgttgatcaactttggagtcttttcgatggagagactgtgaaatttgattagtgtttcgaacatttgtttgcgtttgtgtataggtttgctttcaccttttaatttgtgtgttttgataaataagctaatagtttttagcattttaatgaaatatttcaagtttccgtgtt

SEQ ID NO: 100376 - protein, 267 aa, Arabidopsis thaliana
  peptide (1)..(267): Ceres Seq. ID no. 13604977
  misc_feature (29)..(76): Pfam Name: Myb-like DNA-binding domain Pfam Description: Myb-like DNA-binding domain
  misc_feature (20)..(267): Homolog of NCBI NO: 15223582 NR Description: myb-related protein anthocyanin2, putative thaliana] >gi|25294091|pir||B96608 probable transcription factor
  misc_feature (20)..(230): Homolog of NCBI NO: 11358560 NR Description: myb-related transcription factor MYB75 [imported] Arabidopsis thaliana >gi|3941508|gb|AAC83630.1| putative
  misc_feature (20)..(267): Homolog of NCBI NO: 15219651 NR Description: myb family transcription factor [Arabidopsis
  misc_feature (20)..(267): Homolog of NCBI NO: 15219632 NR Description: myb family transcription factor (MYB113)
  misc_feature (20)..(158): Homolog of NCBI NO: 15219650 NR Description: myb family transcription factor (MYB114)
  misc_feature (17)..(261): Homolog of NCBI NO: 7673088 NR Description: An2 protein [Petunia integrifolia]
  misc_feature (17)..(236): Homolog of NCBI NO: 7673086 NR Description: An2 protein [Petunia integrifolia]
  misc_feature (17)..(261): Homolog of NCBI NO: 7673084 NR Description: An2 protein [Petunia x hybrida]
  misc_feature (26)..(218): Homolog of NCBI NO: 40643886 NR Description: MYB10 protein [Gerbera hybrid cv. 'Terra Regina']
  misc_feature (17)..(130): Homolog of NCBI NO: 7673092 NR Description: An2 truncated protein [Petunia x hybrida]
HASVPFTICLYILRIYLCSMEGSSKGLRKGAWTTEEDSLLRQCINKYGEGKWHQVPVRAGLNRCRKSCRLRWLNYLKPSIKRGKLSSDEVDLLLRLHRLLGNRWSLIAGRLPGRTANDVKNYWNTHLSKKHEPCCKIKMKKRDITPIPTTPALKNNVYKPRPRSFTVNNDCNHLNAPPKVDVNPPCLGLNINNVCDNSIIYNKDKKKDQLVNNLIDGDNMWLEKFLEESQEVDILVPEATTTEKGDTLAFDVDQLWSLFDGETVKFD

SEQ ID NO: 100377 - protein, 248 aa, Arabidopsis thaliana
  peptide (1)..(248): Ceres Seq. ID no. 13604978
  misc_feature (10)..(57): Pfam Name: Myb-like DNA-binding domain Pfam Description: Myb-like DNA-binding domain
  misc_feature (1)..(248): Homolog of NCBI NO: 15223582 NR Description: myb-related protein anthocyanin2, putative thaliana] >gi|25294091|pir||B96608 probable transcription factor
  misc_feature (1)..(211): Homolog of NCBI NO: 11358560 NR Description: myb-related transcription factor MYB75 [imported] Arabidopsis thaliana >gi|3941508|gb|AAC83630.1| putative
  misc_feature (1)..(248): Homolog of NCBI NO: 15219651 NR Description: myb family transcription factor [Arabidopsis
  misc_feature (1)..(248): Homolog of NCBI NO: 15219632 NR Description: myb family transcription factor (MYB113)
  misc_feature (1)..(139): Homolog of NCBI NO: 15219650 NR Description: myb family transcription factor (MYB114)
  misc_feature (1)..(242): Homolog of NCBI NO: 7673088 NR Description: An2 protein [Petunia integrifolia]
  misc_feature (1)..(217): Homolog of NCBI NO: 7673086 NR Description: An2 protein [Petunia integrifolia]
  misc_feature (1)..(242): Homolog of NCBI NO: 7673084 NR Description: An2 protein [Petunia x hybrida]
  misc_feature (7)..(199): Homolog of NCBI NO: 40643886 NR Description: MYB10 protein [Gerbera hybrid cv. 'Terra Regina']
  misc_feature (1)..(111): Homolog of NCBI NO: 7673092 NR Description: An2 truncated protein [Petunia x hybrida]
MEGSSKGLRKGAWTTEEDSLLRQCINKYGEGKWHQVPVRAGLNRCRKSCRLRWLNYLKPSIKRGKLSSDEVDLLLRLHRLLGNRWSLIAGRLPGRTANDVKNYWNTHLSKKHEPCCKIKMKKRDITPIPTTPALKNNVYKPRPRSFTVNNDCNHLNAPPKVDVNPPCLGLNINNVCDNSIIYNKDKKKDQLVNNLIDGDNMWLEKFLEESQEVDILVPEATTTEKGDTLAFDVDQLWSLFDGETVKFD

SEQ ID NO: 100378 - DNA, 933 bp, Arabidopsis thaliana
  misc_feature (1)..(933): Ceres Seq. ID no. 13604979
  misc_feature: MA Experiment ID: 20000180 Result: Up-regulated in Transcription
  misc_feature: MA Experiment 20000180 PARAMETER Experiment Name: At_Germinating_Seeds_P Parameter: Age (hr) Value: 24 vs. 0
  misc_feature: MA Experiment 20000180 PARAMETER Experiment Name: At_Germinating_Seeds_P Parameter: Tissue Value: Germinating Seeds
  misc_feature: MA Experiment ID: 20000185 Result: Up-regulated in Transcription
  misc_feature: MA Experiment 20000185 PARAMETER Experiment Name: At_Roots__P Parameter: Age (day) Value: 7 vs. 21
  misc_feature: MA Experiment 20000185 PARAMETER Experiment Name: At_Roots__P Parameter: Organism Value: A. thaliana
  misc_feature: MA Experiment 20000185 PARAMETER Experiment Name: At_Roots__P Parameter: Tissue Value: Roots vs. Whole Plant
  misc_feature: MA Experiment ID: 20000227 Result: Up-regulated in Transcription
  misc_feature: MA Experiment 20000227 PARAMETER Experiment Name: At_Root-Tips-vs-Tops_P Parameter: Tissue Value: Root Tips vs. Root Tops
  misc_feature: MA Experiment ID: 20000234 Result: Up-regulated in Transcription
  misc_feature: MA Experiment 20000234 PARAMETER Experiment Name: At_Siliques_P Parameter: Age (day) Value: 21
  misc_feature: MA Experiment 20000234 PARAMETER Experiment Name: At_Siliques_P Parameter: Organism Value: A. thaliana
  misc_feature: MA Experiment 20000234 PARAMETER Experiment Name: At_Siliques_P Parameter: Plant Line Value: WS
  misc_feature: MA Experiment 20000234 PARAMETER Experiment Name: At_Siliques_P Parameter: Tissue Value: Less Than 5mm Siliques vs. Whole Plant
  misc_feature: MA Experiment ID: 20001910 Result: Down-regulated in Transcription
  misc_feature: MA Experiment 20001910 PARAMETER Experiment Name: At_Drought_Reproduction_P Parameter: Age (day) Value: 37
  misc_feature: MA Experiment 20001910 PARAMETER Experiment Name: At_Drought_Reproduction_P Parameter: Organism Value: A. thaliana
  misc_feature: MA Experiment 20001910 PARAMETER Experiment Name: At_Drought_Reproduction_P Parameter: Plant Line Value: WS
  misc_feature: MA Experiment 20001910 PARAMETER Experiment Name: At_Drought_Reproduction_P Parameter: Timepoint (day) Value: 7
  misc_feature: MA Experiment 20001910 PARAMETER Experiment Name: At_Drought_Reproduction_P Parameter: Tissue Value: Flowers
  misc_feature: MA Experiment 20001910 PARAMETER Experiment Name: At_Drought_Reproduction_P Parameter: Treatment Value: Drought vs. No Drought
atggcaacacaaaacaagattcagaaaaactctctcatcattttcctcttcaccttagtcgtcatcgcccagaccgctacctctcagaactgcctcaccattggttgtcctggcattaacgagtgttgtagccatacgggttactgcggcaccaatgtagagcactgcggcttttggtgcctcagcggcccttgccaactttctaagagttccagctcttacagactcaatgatggcccacgcgggaagatcgaaagcattgttacacctgcattattccacagactcatgcgtaaagtcggaagtaattgcacgggaaaaggtttctacacccgtgaggctttcatcacagcagtcaaatctttcgaaggctacaagggaacggtagctaaacgcgagattgcggccatattggctcagttctcttacgaatctggaaatttttgttacaaagaagaagtaacgagtgagacatattgctcgtcaagcaagacatacccttgtcaatcgggaaagaagtactatggtcgcggtctcttgcagtcaatcaaatggaacgagttctatggtgaggcgggaaagtaccttggcctccctctattgaaagatccagatatggtggctcgtagtccggaagtggctttcaaatttgcaatgtggttttggaagaccgaagttggtccatcactaagactaggatttggagcgaccacgatgaggatcaatggcatagagtgtggtggtatgagttggaatgctgaggctatgcagaacaggattaaccaatacttggagatctgcaagtggtttggggtgaatcctggtaaagatctatattgctaaaaggcattccatgtgatagtacgtttaacttaatttaagttgtcgattgtaatgtttccaataattagaggtttcgattgtggtgtttcc

SEQ ID NO: 100379 - protein, 280 aa, Arabidopsis thaliana
  peptide (1)..(280): Ceres Seq. ID no. 13604980
  misc_feature (87)..(280): Pfam Name: Chitinase class I Pfam Description: Chitinase class I
  misc_feature (1)..(280): Homolog of NCBI NO: 15223591 NR Description: glycosyl hydrolase family 19 (chitinase)
  misc_feature (9)..(280): Homolog of NCBI NO: 15224314 NR Description: glycosyl hydrolase family 19 (chitinase)
  misc_feature (1)..(280): Homolog of NCBI NO: 15224319 NR Description: glycosyl hydrolase family 19 (chitinase)
  misc_feature (1)..(280): Homolog of NCBI NO: 15224321 NR Description: glycosyl hydrolase family 19 (chitinase)
  misc_feature (9)..(280): Homolog of NCBI NO: 15224312 NR Description: glycosyl hydrolase family 19 (chitinase)
  misc_feature (7)..(280): Homolog of NCBI NO: 584929 NR Description: Basic endochitinase CHB4 precursor
  misc_feature (11)..(280): Homolog of NCBI NO: 38345417 NR Description: OSJNBb0091E11.8 [Oryza sativa (japonica
  misc_feature (5)..(280): Homolog of NCBI NO: 33414046 NR Description: class IV chitinase [Galega orientalis]
  misc_feature (16)..(280): Homolog of NCBI NO: 15213850 NR Description: chitinase-B [Sorghum arundinaceum]
  misc_feature (16)..(280): Homolog of NCBI NO: 15529119 NR Description: chitinase-B1 [Sorghum bicolor]
MATQNKIQKNSLIIFLFTLVVIAQTATSQNCLTIGCPGINECCSHTGYCGTNVEHCGFWCLSGPCQLSKSSSSYRLNDGPRGKIESIVTPALFHRLMRKVGSNCTGKGFYTREAFITAVKSFEGYKGTVAKREIAAILAQFSYESGNFCYKEEVTSETYCSSSKTYPCQSGKKYYGRGLLQSIKWNEFYGEAGKYLGLPLLKDPDMVARSPEVAFKFAMWFWKTEVGPSLRLGFGATTMRINGIECGGMSWNAEAMQNRINQYLEICKWFGVNPGKDLYC

SEQ ID NO: 100380 - protein, 184 aa, Arabidopsis thaliana
  peptide (1)..(184): Ceres Seq. ID no. 13604981
  misc_feature (1)..(184): Pfam Name: Chitinase class I Pfam Description: Chitinase class I
  misc_feature (1)..(184): Homolog of NCBI NO: 15223591 NR Description: glycosyl hydrolase family 19 (chitinase)
  misc_feature (1)..(184): Homolog of NCBI NO: 15224314 NR Description: glycosyl hydrolase family 19 (chitinase)
  misc_feature (1)..(184): Homolog of NCBI NO: 15224319 NR Description: glycosyl hydrolase family 19 (chitinase)
  misc_feature (1)..(184): Homolog of NCBI NO: 15224321 NR Description: glycosyl hydrolase family 19 (chitinase)
  misc_feature (1)..(184): Homolog of NCBI NO: 15224312 NR Description: glycosyl hydrolase family 19 (chitinase)
  misc_feature (1)..(184): Homolog of NCBI NO: 584929 NR Description: Basic endochitinase CHB4 precursor
  misc_feature (1)..(184): Homolog of NCBI NO: 38345417 NR Description: OSJNBb0091E11.8 [Oryza sativa (japonica
  misc_feature (1)..(184): Homolog of NCBI NO: 33414046 NR Description: class IV chitinase [Galega orientalis]
  misc_feature (1)..(184): Homolog of NCBI NO: 15213850 NR Description: chitinase-B [Sorghum arundinaceum]
  misc_feature (1)..(184): Homolog of NCBI NO: 15529119 NR Description: chitinase-B1 [Sorghum bicolor]
MRKVGSNCTGKGFYTREAFITAVKSFEGYKGTVAKREIAAILAQFSYESGNFCYKEEVTSETYCSSSKTYPCQSGKKYYGRGLLQSIKWNEFYGEAGKYLGLPLLKDPDMVARSPEVAFKFAMWFWKTEVGPSLRLGFGATTMRINGIECGGMSWNAEAMQNRINQYLEICKWFGVNPGKDLYC

SEQ ID NO: 100381 - DNA, 1069 bp, Arabidopsis thaliana
  misc_feature (1)..(1069): Ceres Seq. ID no. 13604988
  misc_feature: MA Experiment ID: 20000173 Result: Up-regulated in Transcription
  misc_feature: MA Experiment 20000173 PARAMETER Experiment Name: At_42deg_Heat_P Parameter: Age (day) Value: 14
  misc_feature: MA Experiment 20000173 PARAMETER Experiment Name: At_42deg_Heat_P Parameter: Organism Value: A. thaliana
  misc_feature: MA Experiment 20000173 PARAMETER Experiment Name: At_42deg_Heat_P Parameter: Plant Line Value: WS
  misc_feature: MA Experiment 20000173 PARAMETER Experiment Name: At_42deg_Heat_P Parameter: Temperature (deg C) Value: 42 vs. 22
  misc_feature: MA Experiment 20000173 PARAMETER Experiment Name: At_42deg_Heat_P Parameter: Timepoint (hr) Value: 6
  misc_feature: MA Experiment 20000173 PARAMETER Experiment Name: At_42deg_Heat_P Parameter: Tissue Value: Aerial
  misc_feature: MA Experiment ID: 20000179 Result: Up-regulated in Transcription
  misc_feature: MA Experiment 20000179 PARAMETER Experiment Name: At_Germinating_Seeds_P Parameter: Age (hr) Value: 6 vs. 0
  misc_feature: MA Experiment 20000179 PARAMETER Experiment Name: At_Germinating_Seeds_P Parameter: Tissue Value: Germinating Seeds
  misc_feature: MA Experiment ID: 20001911 Result: Up-regulated in Transcription
  misc_feature: MA Experiment 20001911 PARAMETER Experiment Name: At_Drought_Reproduction_P Parameter: Age (day) Value: 40
  misc_feature: MA Experiment 20001911 PARAMETER Experiment Name: At_Drought_Reproduction_P Parameter: Organism Value: A. thaliana
  misc_feature: MA Experiment 20001911 PARAMETER Experiment Name: At_Drought_Reproduction_P Parameter: Plant Line Value: WS
  misc_feature: MA Experiment 20001911 PARAMETER Experiment Name: At_Drought_Reproduction_P Parameter: Timepoint (day) Value: 10
  misc_feature: MA Experiment 20001911 PARAMETER Experiment Name: At_Drought_Reproduction_P Parameter: Tissue Value: Flowers
  misc_feature: MA Experiment 20001911 PARAMETER Experiment Name: At_Drought_Reproduction_P Parameter: Treatment Value: Drought vs. No Drought
acttttcagttttcatataataatgaaataacttggttactctctttcctcgccgtagtctgagtctgaaccctaaaacatcccgcttcgctgctcaggaccaagaatctcagattcaactgatctttgcaacatgacgagggtttatgtcgggaatttggacccacgcgtcaccgaaagagaactcgaagacgaattcaaggccttcggtgttcttcgcaatgtctgggtagctcgtagacctcctggctacgcattcctcgagttcgatgacgaaagagatgctttggatgcaatcagcgcattggatcgaaagaatgggtggcgtgtggagctttctcataaagataaaggaggtcgtggaggtggtggtggtcgtcgtggaggtattgaggattccaagtgctatgagtgtggtgagcttggacattttgctcgcgagtgtcgccgtggtcgaggctctgtgaggcgtagaagccctagtccccgtcgtcgtaggagtccagattatgggtatgctcgcaggagtataagcccgcgtggaagaagatctcctccaaggcgtcgcagtgttactccacctcgccgtgggaggagctacagcagatcccctccttatcgtggttcacgccgtgattctcctcgccgcagagactcgccctatggtcgacgttcgccatatgccaatggggtgtgaaactggaccctgaagagaaagaagctattactaagctatgatgctatatctactctgtggcgccttttaggatagatctttatatctgctattatggtattagctcttctaggtttggttgttgagcatggacatgtcatggtatgttcgagttttattagacaattggatttggtgagttctccttcatgctgttttccaacagccgtcttgacttattctctataacacgcactggcctgctgtcttcacacagcgtccttgaacccctacacttgaggtcgttctttcgtatccataaatgttttgtctcttgttgaatgcactttccttattatatagacatatctaaaaagctcaactgtttccact

SEQ ID NO: 100382 - protein, 187 aa, Arabidopsis thaliana
  peptide (1)..(187): Ceres Seq. ID no. 13604989
  misc_feature (4)..(61): Pfam Name: RNA recognition motif. (a.k.a. RRM, RBD, or RNP domain) Pfam Description: RNA recognition motif. (a.k.a. RRM, RBD, or RNP
  misc_feature (1)..(187): Homolog of NCBI NO: 18395314 NR Description: splicing factor SRZ_21 [Arabidopsis thaliana]
  misc_feature (1)..(186): Homolog of NCBI NO: 25294317 NR Description: protein T23E23.2 [imported] - Arabidopsis >gi|9369411|gb|AAF87159.1|AC002423_24 T23E23.2 [Arabidopsis
  misc_feature (1)..(187): Homolog of NCBI NO: 25294319 NR Description: splicing factor RSZp21 [imported] - Arabidopsis
  misc_feature (1)..(170): Homolog of NCBI NO: 15236000 NR Description: splicing factor SRZ_22 [Arabidopsis thaliana]
  misc_feature (1)..(170): Homolog of NCBI NO: 25294318 NR Description: splicing factor RSZp22 [validated] - Arabidopsis
  misc_feature (1)..(170): Homolog of NCBI NO: 15224171 NR Description: RSZp22 splicing factor -related [Arabidopsis
  misc_feature (3)..(181): Homolog of NCBI NO: 31222328 NR Description: ENSANGP00000018287 [Anopheles gambiae]
  misc_feature (2)..(175): Homolog of NCBI NO: 3929380 NR Description: Splicing factor, arginine/serine-rich 7 (Splicing
  misc_feature (2)..(175): Homolog of NCBI NO: 30584739 NR Description: Homo sapiens splicing factor,
  misc_feature (3)..(185): Homolog of NCBI NO: 24582360 NR Description: CG10203-PA [Drosophila melanogaster] DXl6 protein [Drosophila melanogaster]
MTRVYVGNLDPRVTERELEDEFKAFGVLRNVWVARRPPGYAFLEFDDERDALDAISALDRKNGWRVELSHKDKGGRGGGGGRRGGIEDSKCYECGELGHFARECRRGRGSVRRRSPSPRRRRSPDYGYARRSISPRGRRSPPRRRSVTPPRRGRSYSRSPPYRGSRRDSPRRRDSPYGRRSPYANGV

SEQ ID NO: 100383 - DNA, 2554 bp, Arabidopsis thaliana
  misc_feature (1)..(2554): Ceres Seq. ID no. 13604994
  misc_feature: MA Experiment ID: 20001451 Result: Down-regulated in Transcription
  misc_feature: MA Experiment 20001451 PARAMETER Experiment Name: At_Far-red-induction_P Parameter: Age (day) Value: 7
  misc_feature: MA Experiment 20001451 PARAMETER Experiment Name: At_Far-red-induction_P Parameter: Light Value: Far-red vs. White
  misc_feature: MA Experiment 20001451 PARAMETER Experiment Name: At_Far-red-induction_P Parameter: Organism Value: A. thaliana
  misc_feature: MA Experiment 20001451 PARAMETER Experiment Name: At_Far-red-induction_P Parameter: Plant Line Value: Columbia
  misc_feature: MA Experiment 20001451 PARAMETER Experiment Name: At_Far-red-induction_P Parameter: Timepoint (hr) Value: 24
  misc_feature: MA Experiment 20001451 PARAMETER Experiment Name: At_Far-red-induction_P Parameter: Tissue Value: Whole Plant
atctgatttagcaatctggatcaggtctgcaatttctgatgattcactctccattgttgtaaatctatgtttcagcttatgatcaaaaaccaatgcgtatgaatcgtctatgttcaccaaatcagtacacgtaaaagcgaatgtgatttctctaattctaccggagagcttattcaaacctgtaattcgcttcgtgttttgcgtatacgtctgctcaatcttcaagatcataactttttgattaacctatggctcttttaatatcttgtggggaagttacctcttctcaattcactgtatttcgcttactcaaccaaagccttgattttgttagtgacaatgtctctaggctcttagctcctattttcaccaacctcagggactttgaaatgcgtctttcttgtatcgaacgtcctccatccatttctggcaatcattctcatttgtgcactgagaaatggttttctgatcaaaaagattatgatcaaaaggaagacccggaagctattttcaatgtgttggattatatcttgaaaagcagcttggatcgtctggcttcattgagggagagtgtatgtcagacaaagagttttgattacgatgattgtttatctattcactcgtctataatgagggatctttgtttgcaagggaagttggatgctgctctctggctacggaaaaaaatgatatatagtggagttattccaggtttgatcacgcacaatcatcttttaaatgggttgtgtaaagcaggttatatcgagaaggcggatgggcttgttagagagatgagggagatgggtccttcgcctaattgtgtctcttataacaccttaatcaagggtctttgcagtgttaacaatgtagataaagctctgtacctcttcaatactatgaataaatatggtattaggccaaatagagtgacttgcaatataattgtgcatgcactttgccagaaaggtgttataggaaacaacaacaaaaagcttcttgaagagatcttagatagtagccaggcgaacgcacccttggatatagtcatctgtaccattctgatggatagttgttttaagaatggaaatgtggttcaagcccttgaggtttggaaggagatgtcacagaaaaatgtccctgctgattcagttgtgtacaatgtcattattcgtgggttatgttcgagtggaaacatggtagctgcttatgggttcatgtgtgacatggtaaagagaggagtgaatcctgatgttttcacttacaacactctcattagcgccttgtgcaaagagggaaagtttgatgaggcatgtgatctccatggtaccatgcaaaatggtggtgttgctcctgatcagatctcatacaaagttattattcaaggtttatgtatacatggagatgtgaacagggcgaacgagttccttctaagcatgctaaaaagttctctgcttccagaggttctgctatggaatgtggttattgatggttatggaagatatggtgatactagcagtgctttatctgttctgaatctaatgctttcgtacggtgttaaaccaaatgtttacacaaacaatgctttgattcatgggtatgtgaaagggggaagattaattgatgcatggtgggtcaaaaatgaaatgcgatctaccaaaatccacccagatactaccacctataatctgctactaggtgctgcttgtacattgggtcacttgcggttggcatttcagttgtatgatgaaatgctgagaaggggatgtcaacctgatatcattacgtatactgagctggttagagggctctgttggaagggtcgattgaagaaagccgaaagccttctgtcgagaatacaagcaactggtataacaatagatcatgttccatttttgatactagcaaagaaatataccagattgcagaggccaggcgaggcgtatttagtttacaaaaagtggttagcgacgaggaacagaggagtttcttgtccaagcatactaaatcacatgcatacagaagagcagtaatgcagctggtttaatcaagaaacagagcaaatttatcctaccccgaaatgcctattgcctctccggtagttgtttaaggacacctgagccaagtttagtttcttttcgaaacgtagaagattcgacacgaggaacgacagaactttgttccagatatcgatcttggtggagtcacaagaagtcactttattactacaaatggttttgatggatggttgaacgcacacagggctgtttcttcaaaaactcccaatatagtttcttgtctgaaacacgagaagcctttcatttcaatttacagggaaaatgtgaatatccctttcaagcaatgattctcgggtcagtaagagtcatgttatgctatcatattggcttattgcgtttgaaagttaatgatgataattggttcatgtacaacaagatgtttaatcatccattctggttggctttgtagaacaataatttctcaacttctgtaatattatcccaaaattttgaaattaagaaagaagctgtgttaaaac

SEQ ID NO: 100384 - protein, 593 aa, Arabidopsis thaliana
  peptide (1)..(593): Ceres Seq. ID no. 13604995
  misc_feature (441)..(475): Pfam Name: PPR repeat Pfam Description: PPR repeat
  misc_feature (135)..(572): Homolog of NCBI NO: 34902570 NR Description: Putative indole-3-acetate
  misc_feature (126)..(570): Homolog of NCBI NO: 15221282 NR Description: pentatricopeptide (PPR) repeat-containing protein
  misc_feature (92)..(593): Homolog of NCBI NO: 15242446 NR Description: pentatricopeptide (PPR) repeat-containing protein
  misc_feature (90)..(570): Homolog of NCBI NO: 15221691 NR Description: pentatricopeptide (PPR) repeat-containing protein
  misc_feature (83)..(544): Homolog of NCBI NO: 11994279 NR Description: gb|AAD43616.1~gene_id:F16J14.3~strong similarity
  misc_feature (83)..(544): Homolog of NCBI NO: 15228763 NR Description: pentatricopeptide (PPR) repeat-containing protein
  misc_feature (121)..(570): Homolog of NCBI NO: 15221674 NR Description: pentatricopeptide (PPR) repeat-containing protein
  misc_feature (138)..(551): Homolog of NCBI NO: 25518293 NR Description: hypothetical protein F13K23.2 - Arabidopsis >gi|8698724|gb|AAF78482.1|AC012187_2 Contains similarity to an protein F16M19.7 gi|6598837 from Arabidopsis thaliana BAC
  misc_feature (124)..(544): Homolog of NCBI NO: 34902570 NR Description: Putative indole-3-acetate
  misc_feature (122)..(570): Homolog of NCBI NO: 25518293 NR Description: hypothetical protein F13K23.2 - Arabidopsis >gi|8698724|gb|AAF78482.1|AC012187_2 Contains similarity to an protein F16M19.7 gi|6598837 from Arabidopsis thaliana BAC
MALLISCGEVTSSQFTVFRLLNQSLDFVSDNVSRLLAPIFTNLRDFEMRLSCIERPPSISGNHSHLCTEKWFSDQKDYDQKEDPEAIFNVLDYILKSSLDRLASLRESVCQTKSFDYDDCLSIHSSIMRDLCLQGKLDAALWLRKKMIYSGVIPGLITHNHLLNGLCKAGYIEKADGLVREMREMGPSPNCVSYNTLIKGLCSVNNVDKALYLFNTMNKYGIRPNRVTCNIIVHALCQKGVIGNNNKKLLEEILDSSQANAPLDIVICTILMDSCFKNGNVVQALEVWKEMSQKNVPADSVVYNVIIRGLCSSGNMVAAYGFMCDMVKRGVNPDVFTYNTLISALCKEGKFDEACDLHGTMQNGGVAPDQISYKVIIQGLCIHGDVNRANEFLLSMLKSSLLPEVLLWNVVIDGYGRYGDTSSALSVLNLMLSYGVKPNVYTNNALIHGYVKGGRLIDAWWVKNEMRSTKIHPDTTTYNLLLGAACTLGHLRLAFQLYDEMLRRGCQPDIITYTELVRGLCWKGRLKKAESLLSRIQATGITIDHVPFLILAKKYTRLQRPGEAYLVYKKWLATRNRGVSCPSILNHMHTEEQ

SEQ ID NO: 100385 - protein, 546 aa, Arabidopsis thaliana
  peptide (1)..(546): Ceres Seq. ID no. 13604996
  misc_feature (394)..(428): Pfam Name: PPR repeat Pfam Description: PPR repeat
  misc_feature (88)..(525): Homolog of NCBI NO: 34902570 NR Description: Putative indole-3-acetate
  misc_feature (79)..(523): Homolog of NCBI NO: 15221282 NR Description: pentatricopeptide (PPR) repeat-containing protein
  misc_feature (45)..(546): Homolog of NCBI NO: 15242446 NR Description: pentatricopeptide (PPR) repeat-containing protein
  misc_feature (43)..(523): Homolog of NCBI NO: 15221691 NR Description: pentatricopeptide (PPR) repeat-containing protein
  misc_feature (36)..(497): Homolog of NCBI NO: 11994279 NR Description: gb|AAD43616.1~gene_id:F16J14.3~strong similarity
  misc_feature (36)..(497): Homolog of NCBI NO: 15228763 NR Description: pentatricopeptide (PPR) repeat-containing protein
  misc_feature (74)..(523): Homolog of NCBI NO: 15221674 NR Description: pentatricopeptide (PPR) repeat-containing protein
  misc_feature (91)..(504): Homolog of NCBI NO: 25518293 NR Description: hypothetical protein F13K23.2 - Arabidopsis >gi|8698724|gb|AAF78482.1|AC012187_2 Contains similarity to an protein F16M19.7 gi|6598837 from Arabidopsis thaliana BAC
  misc_feature (77)..(497): Homolog of NCBI NO: 34902570 NR Description: Putative indole-3-acetate
  misc_feature (75)..(523): Homolog of NCBI NO: 25518293 NR Description: hypothetical protein F13K23.2 - Arabidopsis >gi|8698724|gb|AAF78482.1|AC012187_2 Contains similarity to an protein F16M19.7 gi|6598837 from Arabidopsis thaliana BAC
MRLSCIERPPSISGNHSHLCTEKWFSDQKDYDQKEDPEAIFNVLDYILKSSLDRLASLRESVCQTKSFDYDDCLSIHSSIMRDLCLQGKLDAALWLRKKMIYSGVIPGLITHNHLLNGLCKAGYIEKADGLVREMREMGPSPNCVSYNTLIKGLCSVNNVDKALYLFNTMNKYGIRPNRVTCNIIVHALCQKGVIGNNNKKLLEEILDSSQANAPLDIVICTILMDSCFKNGNVVQALEVWKEMSQKNVPADSVVYNVIIRGLCSSGNMVAAYGFMCDMVKRGVNPDVFTYNTLISALCKEGKFDEACDLHGTMQNGGVAPDQISYKVIIQGLCIHGDVNRANEFLLSMLKSSLLPEVLLWNVVIDGYGRYGDTSSALSVLNLMLSYGVKPNVYTNNALIHGYVKGGRLIDAWWVKNEMRSTKIHPDTTTYNLLLGAACTLGHLRLAFQLYDEMLRRGCQPDIITYTELVRGLCWKGRLKKAESLLSRIQATGITIDHVPFLILAKKYTRLQRPGEAYLVYKKWLATRNRGVSCPSILNHMHTEEQ

SEQ ID NO: 100386 - protein, 466 aa, Arabidopsis thaliana
  peptide (1)..(466): Ceres Seq. ID no. 13604997
  misc_feature (314)..(348): Pfam Name: PPR repeat Pfam Description: PPR repeat
  misc_feature (8)..(445): Homolog of NCBI NO: 34902570 NR Description: Putative indole-3-acetate
  misc_feature (1)..(443): Homolog of NCBI NO: 15221282 NR Description: pentatricopeptide (PPR) repeat-containing protein
  misc_feature (1)..(466): Homolog of NCBI NO: 15242446 NR Description: pentatricopeptide (PPR) repeat-containing protein
  misc_feature (1)..(443): Homolog of NCBI NO: 15221691 NR Description: pentatricopeptide (PPR) repeat-containing protein
  misc_feature (1)..(417): Homolog of NCBI NO: 11994279 NR Description: gb|AAD43616.1~gene_id:F16J14.3~strong similarity
  misc_feature (1)..(417): Homolog of NCBI NO: 15228763 NR Description: pentatricopeptide (PPR) repeat-containing protein
  misc_feature (1)..(443): Homolog of NCBI NO: 15221674 NR Description: pentatricopeptide (PPR) repeat-containing protein
  misc_feature (11)..(424): Homolog of NCBI NO: 25518293 NR Description: hypothetical protein F13K23.2 - Arabidopsis >gi|8698724|gb|AAF78482.1|AC012187_2 Contains similarity to an protein F16M19.7 gi|6598837 from Arabidopsis thaliana BAC
  misc_feature (1)..(417): Homolog of NCBI NO: 34902570 NR Description: Putative indole-3-acetate
  misc_feature (1)..(443): Homolog of NCBI NO: 25518293 NR Description: hypothetical protein F13K23.2 - Arabidopsis >gi|8698724|gb|AAF78482.1|AC012187_2 Contains similarity to an protein F16M19.7 gi|6598837 from Arabidopsis thaliana BAC
MRDLCLQGKLDAALWLRKKMIYSGVIPGLITHNHLLNGLCKAGYIEKADGLVREMREMGPSPNCVSYNTLIKGLCSVNNVDKALYLFNTMNKYGIRPNRVTCNIIVHALCQKGVIGNNNKKLLEEILDSSQANAPLDIVICTILMDSCFKNGNVVQALEVWKEMSQKNVPADSVVYNVIIRGLCSSGNMVAAYGFMCDMVKRGVNPDVFTYNTLISALCKEGKFDEACDLHGTMQNGGVAPDQISYKVIIQGLCIHGDVNRANEFLLSMLKSSLLPEVLLWNVVIDGYGRYGDTSSALSVLNLMLSYGVKPNVYTNNALIHGYVKGGRLIDAWWVKNEMRSTKIHPDTTTYNLLLGAACTLGHLRLAFQLYDEMLRRGCQPDIITYTELVRGLCWKGRLKKAESLLSRIQATGITIDHVPFLILAKKYTRLQRPGEAYLVYKKWLATRNRGVSCPSILNHMHTEEQ

SEQ ID NO: 100387 - DNA, 934 bp, Arabidopsis thaliana
  misc_feature (1)..(934): Ceres Seq. ID no. 13604998
  misc_feature: MA Experiment ID: 20000180 Result: Down-regulated in Transcription
  misc_feature: MA Experiment 20000180 PARAMETER Experiment Name: At_Germinating_Seeds_P Parameter: Age (hr) Value: 24 vs. 0
  misc_feature: MA Experiment 20000180 PARAMETER Experiment Name: At_Germinating_Seeds_P Parameter: Tissue Value: Germinating Seeds
  misc_feature: MA Experiment ID: 20000227 Result: Up-regulated in Transcription
  misc_feature: MA Experiment 20000227 PARAMETER Experiment Name: At_Root-Tips-vs-Tops_P Parameter: Tissue Value: Root Tips vs. Root Tops
  misc_feature: MA Experiment ID: 20000496 Result: Up-regulated in Transcription
  misc_feature: MA Experiment 20000496 PARAMETER Experiment Name: At_Guard_Cells_P Parameter: Harvest Date Value: 7/19/2002
  misc_feature: MA Experiment 20000496 PARAMETER Experiment Name: At_Guard_Cells_P Parameter: Organism Value: Canola
  misc_feature: MA Experiment 20000496 PARAMETER Experiment Name: At_Guard_Cells_P Parameter: Tissue Value: Guard Cells vs. Leaves
  misc_feature: MA Experiment ID: 20000794 Result: Down-regulated in Transcription
  misc_feature: MA Experiment 20000794 PARAMETER Experiment Name: At_Petals_P Parameter: Age (day) Value: 23-25 days
  misc_feature: MA Experiment 20000794 PARAMETER Experiment Name: At_Petals_P Parameter: Plant Line Value: WS
  misc_feature: MA Experiment 20000794 PARAMETER Experiment Name: At_Petals_P Parameter: Tissue Value: Petals vs. Whole plant
  misc_feature: MA Experiment ID: 20001557 Result: Up-regulated in Transcription
  misc_feature: MA Experiment 20001557 PARAMETER Experiment Name: At_Drought_Soil_Dry_P Parameter: Age (day) Value: 27
  misc_feature: MA Experiment 20001557 PARAMETER Experiment Name: At_Drought_Soil_Dry_P Parameter: Organism Value: A. thaliana
  misc_feature: MA Experiment 20001557 PARAMETER Experiment Name: At_Drought_Soil_Dry_P Parameter: Plant Line Value: WS
  misc_feature: MA Experiment 20001557 PARAMETER Experiment Name: At_Drought_Soil_Dry_P Parameter: Post Timepoint (hr) Value: 3
  misc_feature: MA Experiment 20001557 PARAMETER Experiment Name: At_Drought_Soil_Dry_P Parameter: Post-Treatment Value: Re-Water vs. No Drought
  misc_feature: MA Experiment 20001557 PARAMETER Experiment Name: At_Drought_Soil_Dry_P Parameter: Timepoint (day) Value: 13
  misc_feature: MA Experiment 20001557 PARAMETER Experiment Name: At_Drought_Soil_Dry_P Parameter: Treatment Value: Drought vs. No Drought
  misc_feature: MA Experiment ID: 20001558 Result: Up-regulated in Transcription
  misc_feature: MA Experiment 20001558 PARAMETER Experiment Name: At_Drought_Soil_Dry_P Parameter: Age (day) Value: 27
  misc_feature: MA Experiment 20001558 PARAMETER Experiment Name: At_Drought_Soil_Dry_P Parameter: Organism Value: A. thaliana
  misc_feature: MA Experiment 20001558 PARAMETER Experiment Name: At_Drought_Soil_Dry_P Parameter: Plant Line Value: WS
  misc_feature: MA Experiment 20001558 PARAMETER Experiment Name: At_Drought_Soil_Dry_P Parameter: Post Timepoint (hr) Value: 6
  misc_feature: MA Experiment 20001558 PARAMETER Experiment Name: At_Drought_Soil_Dry_P Parameter: Post-Treatment Value: Re-Water vs. No Drought
  misc_feature: MA Experiment 20001558 PARAMETER Experiment Name: At_Drought_Soil_Dry_P Parameter: Timepoint (day) Value: 13
  misc_feature: MA Experiment 20001558 PARAMETER Experiment Name: At_Drought_Soil_Dry_P Parameter: Treatment Value: Drought vs. No Drought
gagggttagttttcgaagaacgacgagctcgagattattgattttcaagtggagattgaatcagtgataatggacaatgagacgaaagcaaccaccttcagcaaatcaacagggcttcctaggaagagattctacagagcaagagctcatagtaacccacttagcgattctcacttcccaatccccatatctccagctcatgtcgactattcacttcacttccccaaattcgttgaagctgacaacaaattcatcaagaaggttgagtttgcggatatcggatgcgggtttggtggcctactaatctcccttgcgacgcttttccccgatacgctaatgatcggtatggagctcagagataaagtgacggagtacgttaaagaacggatcttagctttaaggagaacaagctcggagggacagtatgagaacatctccgttgttaggacaaactcgatgaagtacattccgaattacttcgagaaaggacagctttcgaagatgtttttcctcttccctgatccacattttaaggagaagaatcataggaggagagtgattagtactcatttgttagatgagtatgcttatgttcttagagctggtgggattatttacacaatcactgatgtagaggagcttggagagtggatgaagtcttgcttagagaaacatccgatgtttgaatctctaacacaagaagagcttgtttcggatcctgttgttgagcttctatgcagtgctactgaggaaggacagaaagttgctagaaatggtggacagactttcagagcagtttttagacgcattgcatatgtttcttgaattctttatttctcgttgtagtaatctttgttgtaacacagcttctttcttaatttcaaaattttgggataatattacagaagttgagaaattattgttctacaaagcc

SEQ ID NO: 100388 - protein, 251 aa, Arabidopsis thaliana
  peptide (1)..(251): Ceres Seq. ID no. 13604999
  misc_feature (38)..(247): Pfam Name: Putative methyltransferase Pfam Description: Putative methyltransferase
  misc_feature (1)..(251): Homolog of NCBI NO: 15238631 NR Description: methyltransferase-related protein [Arabidopsis >gi|26451686|dbj|BAC42938.1| putative methyltransferase thaliana] >gi|29824305|gb|AAP04113.1| putative methyltransferase
  misc_feature (15)..(247): Homolog of NCBI NO: 17536689 NR Description: Putative methyltransferase [Caenorhabditis
  misc_feature (1)..(247): Homolog of NCBI NO: 39597269 NR Description: Hypothetical protein CBG02883 [Caenorhabditis
  misc_feature (3)..(247): Homolog of NCBI NO: 6320000 NR Description: Transfer RNA methyltransferase; Trm8p
  misc_feature (17)..(247): Homolog of NCBI NO: 4160294 NR Description: methyltransferase-like protein 1 [Mus musculus]
  misc_feature (17)..(247): Homolog of NCBI NO: 6754682 NR Description: methyltransferase-like 1; methyltransferase-like (S. cerevisiae) [Mus musculus] >gi|4512325|dbj|BAA75230.1|
  misc_feature (17)..(247): Homolog of NCBI NO: 15215058 NR Description: methyltransferase-like 1 [Mus musculus]
  misc_feature (11)..(247): Homolog of NCBI NO: 20128915 NR Description: CG4045-PA [Drosophila melanogaster]
  misc_feature (1)..(247): Homolog of NCBI NO: 1418767 NR Description: D1075-like [Homo sapiens]
  misc_feature (17)..(247): Homolog of NCBI NO: 10880981 NR Description: methyltransferase-like protein 1 isoform a;
MDNETKATTFSKSTGLPRKRFYRARAHSNPLSDSHFPIPISPAHVDYSLHFPKFVEADNKFIKKVEFADIGCGFGGLLISLATLFPDTLMIGMELRDKVTEYVKERILALRRTSSEGQYENISVVRTNSMKYIPNYFEKGQLSKMFFLFPDPHFKEKNHRRRVISTHLLDEYAYVLRAGGIIYTITDVEELGEWMKSCLEKHPMFESLTQEELVSDPVVELLCSATEEGQKVARNGGQTFRAVFRRIAYVS

SEQ ID NO: 100389 - protein, 162 aa, Arabidopsis thaliana
  peptide (1)..(162): Ceres Seq. ID no. 13605000
  misc_feature (1)..(158): Pfam Name: Putative methyltransferase Pfam Description: Putative methyltransferase
  misc_feature (1)..(162): Homolog of NCBI NO: 15238631 NR Description: methyltransferase-related protein [Arabidopsis >gi|26451686|dbj|BAC42938.1| putative methyltransferase thaliana] >gi|29824305|gb|AAP04113.1| putative methyltransferase
  misc_feature (1)..(158): Homolog of NCBI NO: 17536689 NR Description: Putative methyltransferase [Caenorhabditis
  misc_feature (1)..(158): Homolog of NCBI NO: 39597269 NR Description: Hypothetical protein CBG02883 [Caenorhabditis
  misc_feature (1)..(158): Homolog of NCBI NO: 6320000 NR Description: Transfer RNA methyltransferase; Trm8p
  misc_feature (1)..(158): Homolog of NCBI NO: 4160294 NR Description: methyltransferase-like protein 1 [Mus musculus]
  misc_feature (1)..(158): Homolog of NCBI NO: 6754682 NR Description: methyltransferase-like 1; methyltransferase-like (S. cerevisiae) [Mus musculus] >gi|4512325|dbj|BAA75230.1|
  misc_feature (1)..(158): Homolog of NCBI NO: 15215058 NR Description: methyltransferase-like 1 [Mus musculus]
  misc_feature (1)..(158): Homolog of NCBI NO: 20128915 NR Description: CG4045-PA [Drosophila melanogaster]
  misc_feature (1)..(158): Homolog of NCBI NO: 1418767 NR Description: D1075-like [Homo sapiens]
  misc_feature (1)..(158): Homolog of NCBI NO: 10880981 NR Description: methyltransferase-like protein 1 isoform a;
MIGMELRDKVTEYVKERILALRRTSSEGQYENISVVRTNSMKYIPNYFEKGQLSKMFFLFPDPHFKEKNHRRRVISTHLLDEYAYVLRAGGIIYTITDVEELGEWMKSCLEKHPMFESLTQEELVSDPVVELLCSATEEGQKVARNGGQTFRAVFRRIAYVS

SEQ ID NO: 100390 - protein, 159 aa, Arabidopsis thaliana
  peptide (1)..(159): Ceres Seq. ID no. 13605001
  misc_feature (1)..(155): Pfam Name: Putative methyltransferase Pfam Description: Putative methyltransferase
  misc_feature (1)..(159): Homolog of NCBI NO: 15238631 NR Description: methyltransferase-related protein [Arabidopsis >gi|26451686|dbj|BAC42938.1| putative methyltransferase thaliana] >gi|29824305|gb|AAP04113.1| putative methyltransferase
  misc_feature (1)..(155): Homolog of NCBI NO: 17536689 NR Description: Putative methyltransferase [Caenorhabditis
  misc_feature (1)..(155): Homolog of NCBI NO: 39597269 NR Description: Hypothetical protein CBG02883 [Caenorhabditis
  misc_feature (1)..(155): Homolog of NCBI NO: 6320000 NR Description: Transfer RNA methyltransferase; Trm8p
  misc_feature (1)..(155): Homolog of NCBI NO: 4160294 NR Description: methyltransferase-like protein 1 [Mus musculus]
  misc_feature (1)..(155): Homolog of NCBI NO: 15215058 NR Description: methyltransferase-like 1 [Mus musculus]
  misc_feature (1)..(155): Homolog of NCBI NO: 6754682 NR Description: methyltransferase-like 1; methyltransferase-like (S. cerevisiae) [Mus musculus] >gi|4512325|dbj|BAA75230.1|
  misc_feature (1)..(155): Homolog of NCBI NO: 20128915 NR Description: CG4045-PA [Drosophila melanogaster]
  misc_feature (1)..(155): Homolog of NCBI NO: 1418767 NR Description: D1075-like [Homo sapiens]
  misc_feature (1)..(155): Homolog of NCBI NO: 10880981 NR Description: methyltransferase-like protein 1 isoform a;
MELRDKVTEYVKERILALRRTSSEGQYENISVVRTNSMKYIPNYFEKGQLSKMFFLFPDPHFKEKNHRRRVISTHLLDEYAYVLRAGGIIYTITDVEELGEWMKSCLEKHPMFESLTQEELVSDPVVELLCSATEEGQKVARNGGQTFRAVFRRIAYVS

SEQ ID NO: 100391 - DNA, 859 bp, Arabidopsis thaliana
  misc_feature (1)..(859): Ceres Seq. ID no. 13605010
  misc_feature: MA Experiment ID: 20000173 Result: Down-regulated in Transcription
  misc_feature: MA Experiment 20000173 PARAMETER Experiment Name: At_42deg_Heat_P Parameter: Age (day) Value: 14
  misc_feature: MA Experiment 20000173 PARAMETER Experiment Name: At_42deg_Heat_P Parameter: Organism Value: A. thaliana
  misc_feature: MA Experiment 20000173 PARAMETER Experiment Name: At_42deg_Heat_P Parameter: Plant Line Value: WS
  misc_feature: MA Experiment 20000173 PARAMETER Experiment Name: At_42deg_Heat_P Parameter: Temperature (deg C) Value: 42 vs. 22
  misc_feature: MA Experiment 20000173 PARAMETER Experiment Name: At_42deg_Heat_P Parameter: Timepoint (hr) Value: 6
  misc_feature: MA Experiment 20000173 PARAMETER Experiment Name: At_42deg_Heat_P Parameter: Tissue Value: Aerial
  misc_feature: MA Experiment ID: 20000794 Result: Down-regulated in Transcription
  misc_feature: MA Experiment 20000794 PARAMETER Experiment Name: At_Petals_P Parameter: Age (day) Value: 23-25 days
  misc_feature: MA Experiment 20000794 PARAMETER Experiment Name: At_Petals_P Parameter: Plant Line Value: WS
  misc_feature: MA Experiment 20000794 PARAMETER Experiment Name: At_Petals_P Parameter: Tissue Value: Petals vs. Whole plant
  misc_feature: MA Experiment ID: 20001911 Result: Down-regulated in Transcription
  misc_feature: MA Experiment 20001911 PARAMETER Experiment Name: At_Drought_Reproduction_P Parameter: Age (day) Value: 40
  misc_feature: MA Experiment 20001911 PARAMETER Experiment Name: At_Drought_Reproduction_P Parameter: Organism Value: A. thaliana
  misc_feature: MA Experiment 20001911 PARAMETER Experiment Name: At_Drought_Reproduction_P Parameter: Plant Line Value: WS
  misc_feature: MA Experiment 20001911 PARAMETER Experiment Name: At_Drought_Reproduction_P Parameter: Timepoint (day) Value: 10
  misc_feature: MA Experiment 20001911 PARAMETER Experiment Name: At_Drought_Reproduction_P Parameter: Tissue Value: Flowers
  misc_feature: MA Experiment 20001911 PARAMETER Experiment Name: At_Drought_Reproduction_P Parameter: Treatment Value: Drought vs. No Drought
ataagctcttacactcatttcaactctctttttcgtttccattaccctcagaagaagatgaataggccgggagattggaactgcagattgtgtagccacctcaacttccagaggagggattcatgccaacgttgtagagagcctagaccgggcgggatcagtaccgatttactcagcggttttggtggccgtccggttagtagctccttcggtttcaacaccgggcccgatgtgcgacccggggattggtattgcaaccttggggattgtgggacacataattttgccaataggtccagttgtttcaagtgtggtgccgcaaaagatgagttttcatgctcaagtgctgctgcaacaaccgggtttatggacatgaatgttggtccgagacgtggcctttttggttttggcggcagcagtagtggtggtggtggtacgggccgttctccttggaaatctggagattggatttgcccaaggtcaggctgtaacgaacataacttcgcaagcaggtcagagtgtttcaggtgtaacgcaccaaaggaacttgccaccgaaccaccctattagtcatttagtcctcctaccttcttcatcatttccaatactctggaagcattagaggagagcagaaaggtgaagaatcgaagcaagataccgaccgcccttaatctcttgatttgtttaatttcttagatttgactcgttttatatctcgtagtagtcagacctatgttagaatgtaagcatgtcgagagttttccgaagcattttgttctgatatcggtctcctagctagtatgtaagtttgtttgaatgtattcttatttctgataaagttgtttccttctgattccgc

SEQ ID NO: 100392 - protein, 189 aa, Arabidopsis thaliana
  peptide (1)..(189): Ceres Seq. ID no. 13605011
  misc_feature (79)..(110): Pfam Name: Zn-finger in Ran binding protein and others Pfam Description: Zn-finger in Ran binding protein and others
  misc_feature (20)..(189): Homolog of NCBI NO: 15239445 NR Description: expressed protein [Arabidopsis thaliana] unknown protein [Arabidopsis thaliana]
  misc_feature (20)..(189): Homolog of NCBI NO: 15232662 NR Description: zinc finger protein -related [Arabidopsis
  misc_feature (20)..(189): Homolog of NCBI NO: 21595771 NR Description: putative zinc finger protein [Arabidopsis
  misc_feature (20)..(186): Homolog of NCBI NO: 28849863 NR Description: zinc finger transcription factor ZFP30 [Oryza
  misc_feature (24)..(112): Homolog of NCBI NO: 15225776 NR Description: second messenger-dependent protein kinase [Arabidopsis thaliana] >gi|25387151|pir||G84663 hypothetical
  misc_feature (142)..(182): Homolog of NCBI NO: 15225776 NR Description: second messenger-dependent protein kinase [Arabidopsis thaliana] >gi|25387151|pir||G84663 hypothetical
  misc_feature (22)..(109): Homolog of NCBI NO: 5803246 NR Description: ESTs AU077984(C62969),D41648(S4289), correspond to a region of the predicted gene.~Similar to putative
  misc_feature (22)..(109): Homolog of NCBI NO: 5679336 NR Description: putative zinc finger protein [Oryza sativa]
  misc_feature (20)..(83): Homolog of NCBI NO: 27368046 NR Description: zinc finger protein [Gossypium hirsutum]
  misc_feature (20)..(122): Homolog of NCBI NO: 34913970 NR Description: B1110C07.23 [Oryza sativa (japonica
ISSYTHFNSLFRFHYPQKKMNRPGDWNCRLCSHLNFQRRDSCQRCREPRPGGISTDLLSGFGGRPVSSSFGFNTGPDVRPGDWYCNLGDCGTHNFANRSSCFKCGAAKDEFSCSSAAATTGFMDMNVGPRRGLFGFGGSSSGGGGTGRSPWKSGDWICPRSGCNEHNFASRSECFRCNAPKELATEPPY

SEQ ID NO: 100393 - protein, 170 aa, Arabidopsis thaliana
  peptide (1)..(170): Ceres Seq. ID no. 13605012
  misc_feature (60)..(91): Pfam Name: Zn-finger in Ran binding protein and others Pfam Description: Zn-finger in Ran binding protein and others
  misc_feature (1)..(170): Homolog of NCBI NO: 15239445 NR Description: expressed protein [Arabidopsis thaliana] unknown protein [Arabidopsis thaliana]
  misc_feature (1)..(170): Homolog of NCBI NO: 15232662 NR Description: zinc finger protein -related [Arabidopsis
  misc_feature (1)..(170): Homolog of NCBI NO: 21595771 NR Description: putative zinc finger protein [Arabidopsis
  misc_feature (1)..(167): Homolog of NCBI NO: 28849863 NR Description: zinc finger transcription factor ZFP30 [Oryza
  misc_feature (5)..(93): Homolog of NCBI NO: 15225776 NR Description: second messenger-dependent protein kinase [Arabidopsis thaliana] >gi|25387151|pir||G84663 hypothetical
  misc_feature (123)..(163): Homolog of NCBI NO: 15225776 NR Description: second messenger-dependent protein kinase [Arabidopsis thaliana] >gi|25387151|pir||G84663 hypothetical
  misc_feature (3)..(90): Homolog of NCBI NO: 5803246 NR Description: ESTs AU077984(C62969),D41648(S4289), correspond to a region of the predicted gene.~Similar to putative
  misc_feature (3)..(90): Homolog of NCBI NO: 5679336 NR Description: putative zinc finger protein [Oryza sativa]
  misc_feature (1)..(64): Homolog of NCBI NO: 27368046 NR Description: zinc finger protein [Gossypium hirsutum]
  misc_feature (1)..(103): Homolog of NCBI NO: 34913970 NR Description: B1110C07.23 [Oryza sativa (japonica
MNRPGDWNCRLCSHLNFQRRDSCQRCREPRPGGISTDLLSGFGGRPVSSSFGFNTGPDVRPGDWYCNLGDCGTHNFANRSSCFKCGAAKDEFSCSSAAATTGFMDMNVGPRRGLFGFGGSSSGGGGTGRSPWKSGDWICPRSGCNEHNFASRSECFRCNAPKELATEPPY

SEQ ID NO: 100394 - DNA, 1994 bp, Arabidopsis thaliana
  misc_feature (1)..(1994): Ceres Seq. ID no. 13605032
  misc_feature: MA Experiment ID: 20000306 Result: Down-regulated in Transcription
  misc_feature: MA Experiment 20000306 PARAMETER Experiment Name: At_Germinating_Seeds_Sub_P Parameter: Age (hr) Value: 6 vs. 0
  misc_feature: MA Experiment 20000306 PARAMETER Experiment Name: At_Germinating_Seeds_Sub_P Parameter: Organism Value: A. thaliana
  misc_feature: MA Experiment 20000306 PARAMETER Experiment Name: At_Germinating_Seeds_Sub_P Parameter: Plant Line Value: WS
  misc_feature: MA Experiment 20000306 PARAMETER Experiment Name: At_Germinating_Seeds_Sub_P Parameter: Tissue Value: Germinating Seeds
  misc_feature: MA Experiment ID: 20000307 Result: Down-regulated in Transcription
  misc_feature: MA Experiment 20000307 PARAMETER Experiment Name: At_Germinating_Seeds_Sub_P Parameter: Age (hr) Value: 24 vs. 0
  misc_feature: MA Experiment 20000307 PARAMETER Experiment Name: At_Germinating_Seeds_Sub_P Parameter: Organism Value: A. thaliana
  misc_feature: MA Experiment 20000307 PARAMETER Experiment Name: At_Germinating_Seeds_Sub_P Parameter: Plant Line Value: WS
  misc_feature: MA Experiment 20000307 PARAMETER Experiment Name: At_Germinating_Seeds_Sub_P Parameter: Tissue Value: Germinating Seeds
  misc_feature: MA Experiment ID: 20000352 Result: Up-regulated in Transcription
  misc_feature: MA Experiment 20000352 PARAMETER Experiment Name: At_Drought_Sub_P Parameter: Age (day) Value: 7
  misc_feature: MA Experiment 20000352 PARAMETER Experiment Name: At_Drought_Sub_P Parameter: Organism Value: A. thaliana
  misc_feature: MA Experiment 20000352 PARAMETER Experiment Name: At_Drought_Sub_P Parameter: Plant Line Value: WS
  misc_feature: MA Experiment 20000352 PARAMETER Experiment Name: At_Drought_Sub_P Parameter: Timepoint (hr) Value: 6
  misc_feature: MA Experiment 20000352 PARAMETER Experiment Name: At_Drought_Sub_P Parameter: Tissue Value: Whole Plant
  misc_feature: MA Experiment 20000352 PARAMETER Experiment Name: At_Drought_Sub_P Parameter: Treatment Value: Drought vs. No Drought
  misc_feature: MA Experiment ID: 20000634 Result: Down-regulated in Transcription
  misc_feature: MA Experiment 20000634 PARAMETER Experiment Name: At_10percent_PEG_Sub_P Parameter: Age (day) Value: 12
  misc_feature: MA Experiment 20000634 PARAMETER Experiment Name: At_10percent_PEG_Sub_P Parameter: Organism Value: A. thaliana
  misc_feature: MA Experiment 20000634 PARAMETER Experiment Name: At_10percent_PEG_Sub_P Parameter: Plant Line Value: WS
  misc_feature: MA Experiment 20000634 PARAMETER Experiment Name: At_10percent_PEG_Sub_P Parameter: Timepoint (day) Value: 12
  misc_feature: MA Experiment 20000634 PARAMETER Experiment Name: At_10percent_PEG_Sub_P Parameter: Tissue Value: Whole Plant
  misc_feature: MA Experiment 20000634 PARAMETER Experiment Name: At_10percent_PEG_Sub_P Parameter: Treatment Value: 10% PEG vs. No Treatment
atggacaccaaaattggagccatcgacacgtgtaagccaacaactggtgacatcggaagtccaccaagcaacgccgtcgcaacaatccaagactccgctcccatcaccacaacctccgaatcgactctaggacgtcacttatcccgccgtcttgtccaagccggagtcaccgatgttttctctgttcccggtgatttcaacctaactcttctcgaccacctcatcgccgagccagagctcaacaacatcggatgctgtaacgagcttaacgccggttacgccgccgatggatacgctcgatctcgtggagtcggtgcttgcgtcgtgactttcaccgttggtggactcagcgttttgaacgctatcgctggtgcgtacagtgagaacctaccagttatatgtatcgttggaggtcctaactccaacgattttggcactaaccggattcttcatcacaccatcggtttacctgactttagccaagagcttaggtgtttccaaactgttacttgctaccaggctgtggtgaacaatttggaggatgctcatgaacagatcgacaaggcgatagcaacagctttgaaagagagcaagcctgtgtacattagcatcagttgcaacttagctgcaactcctcatcctacgtttgctcgtgatcctgtcccttttgacctaactcctaggatgagcaacacgatgggtttagaagctgcggtggaagcaacattggagtttctgaacaaggcagtgaagccagttatggttggtggcccaaagttgcgtgtggctaaagcaagtgaggcctttttggagctagctgatgcttcaggctaccctctcgcagtgatgccttctacaaaaggccttgtaccagagaaccatcctcatttcattggcacttactggggagcagtaagcacacctttctgctctgagattgtcgaatctgcggatgcttacatcttcgcaggtccaatcttcaacgactacagctccgtaggttactctcttctcctcaagaaagaaaaagcaataattgtgcatcctgatcgagtcgttgtggctaatggtccaacgtttggttgcgttctgatgagcgatttcttcagggagttggctaagagggttaagcgtaacgagacagcttatgagaactatgagaggatctttgtacctgaaggtaagccattgaaatgcaaaccaggagagccattgagggtcaacgcaatgttccaacacattcagaagatgctctctagtgaaaccgctgtgattgctgaaactggtgattcttggttcaattgtcagaagctaaagctgcctaaaggatgtgggtacgagtttcagatgcagtatggatccattggttggtctgttggtgcgactctaggatacgcccaagcaaccccggagaagagagtgttgtctttcattggagatgggagtttccaagtgactgctcaggacatatccacgatgattcgtaacggacagaaggcgatcatcttcttgatcaacaacggtggctacaccattgaagttgagattcatgatggtccttacaatgttatcaagaactggaactacactggtcttgtcgatgctattcataacggtgaaggaaaatgctggaccacaaaggtgagatacgaggaggagttagtggaagcgattaagactgcgacaacggagaagaaagatagtctttgtttcattgaagtgattgttcacaaagatgatacaagcaaagagttgcttgagtggggatctcgcgtctcagctgctaatggtcgtcctcccaatcctcagtagaagcaagagaaaagaatcttgagtgtgactcaagcatctctcgtttctttgcaattgaattagattgttttctgttcgaattttcgaattttcgaccgttggttttaattgcttttgatactttccagttagttgtactgtaccattaccattgatggtgtaatacaattccctttttccct

SEQ ID NO: 100395 - protein, 603 aa, Arabidopsis thaliana
  peptide (1)..(603): Ceres Seq. ID no. 13605033
  misc_feature (40)..(603): Homolog of NCBI NO: 28393679 NR Description: putative pyruvate decarboxylase [Arabidopsis
  misc_feature (1)..(603): Homolog of NCBI NO: 15234062 NR Description: pyruvate decarboxylase-1 (Pdc1) [Arabidopsis
  misc_feature (17)..(603): Homolog of NCBI NO: 15240952 NR Description: pyruvate decarboxylase-related protein
  misc_feature (1)..(603): Homolog of NCBI NO: 1616785 NR Description: pyruvate decarboxylase [Arabidopsis thaliana]
  misc_feature (1)..(603): Homolog of NCBI NO: 10121330 NR Description: pyruvate decarboxylase [Fragaria x ananassa]
  misc_feature (1)..(603): Homolog of NCBI NO: 17225598 NR Description: pyruvate decarboxylase [Fragaria x ananassa]
  misc_feature (1)..(603): Homolog of NCBI NO: 29373077 NR Description: pyruvate decarboxylase 1 [Lotus corniculatus]
  misc_feature (1)..(603): Homolog of NCBI NO: 15240423 NR Description: pyruvate decarboxylase (gb|AAB16855.1) thaliana] >gi|9758276|dbj|BAB08775.1| pyruvate decarboxylase
  misc_feature (12)..(603): Homolog of NCBI NO: 24745919 NR Description: pyruvate decarboxylase [Solanum tuberosum]
  misc_feature (1)..(603): Homolog of NCBI NO: 34896032 NR Description: Similar to Zea mays mRNA for pyruvate
MDTKIGAIDTCKPTTGDIGSPPSNAVATIQDSAPITTTSESTLGRHLSRRLVQAGVTDVFSVPGDFNLTLLDHLIAEPELNNIGCCNELNAGYAADGYARSRGVGACVVTFTVGGLSVLNAIAGAYSENLPVICIVGGPNSNDFGTNRILHHTIGLPDFSQELRCFQTVTCYQAVVNNLEDAHEQIDKAIATALKESKPVYISISCNLAATPHPTFARDPVPFDLTPRMSNTMGLEAAVEATLEFLNKAVKPVMVGGPKLRVAKASEAFLELADASGYPLAVMPSTKGLVPENHPHFIGTYWGAVSTPFCSEIVESADAYIFAGPIFNDYSSVGYSLLLKKEKAIIVHPDRVVVANGPTFGCVLMSDFFRELAKRVKRNETAYENYERIFVPEGKPLKCKPGEPLRVNAMFQHIQKMLSSETAVIAETGDSWFNCQKLKLPKGCGYEFQMQYGSIGWSVGATLGYAQATPEKRVLSFIGDGSFQVTAQDISTMIRNGQKAIIFLINNGGYTIEVEIHDGPYNVIKNWNYTGLVDAIHNGEGKCWTTKVRYEEELVEAIKTATTEKKDSLCFIEVIVHKDDTSKELLEWGSRVSAANGRPPNPQ

SEQ ID NO: 100396 - protein, 375 aa, Arabidopsis thaliana
  peptide (1)..(375): Ceres Seq. ID no. 13605034
  misc_feature (1)..(375): Homolog of NCBI NO: 28393679 NR Description: putative pyruvate decarboxylase [Arabidopsis
  misc_feature (1)..(375): Homolog of NCBI NO: 15234062 NR Description: pyruvate decarboxylase-1 (Pdc1) [Arabidopsis
  misc_feature (1)..(375): Homolog of NCBI NO: 15240952 NR Description: pyruvate decarboxylase-related protein
  misc_feature (1)..(375): Homolog of NCBI NO: 1616785 NR Description: pyruvate decarboxylase [Arabidopsis thaliana]
  misc_feature (1)..(375): Homolog of NCBI NO: 10121330 NR Description: pyruvate decarboxylase [Fragaria x ananassa]
  misc_feature (1)..(375): Homolog of NCBI NO: 17225598 NR Description: pyruvate decarboxylase [Fragaria x ananassa]
  misc_feature (1)..(375): Homolog of NCBI NO: 29373077 NR Description: pyruvate decarboxylase 1 [Lotus corniculatus]
  misc_feature (1)..(375): Homolog of NCBI NO: 15240423 NR Description: pyruvate decarboxylase (gb|AAB16855.1) thaliana] >gi|9758276|dbj|BAB08775.1| pyruvate decarboxylase
  misc_feature (1)..(375): Homolog of NCBI NO: 24745919 NR Description: pyruvate decarboxylase [Solanum tuberosum]
  misc_feature (1)..(375): Homolog of NCBI NO: 34896032 NR Description: Similar to Zea mays mRNA for pyruvate
MSNTMGLEAAVEATLEFLNKAVKPVMVGGPKLRVAKASEAFLELADASGYPLAVMPSTKGLVPENHPHFIGTYWGAVSTPFCSEIVESADAYIFAGPIFNDYSSVGYSLLLKKEKAIIVHPDRVVVANGPTFGCVLMSDFFRELAKRVKRNETAYENYERIFVPEGKPLKCKPGEPLRVNAMFQHIQKMLSSETAVIAETGDSWFNCQKLKLPKGCGYEFQMQYGSIGWSVGATLGYAQATPEKRVLSFIGDGSFQVTAQDISTMIRNGQKAIIFLINNGGYTIEVEIHDGPYNVIKNWNYTGLVDAIHNGEGKCWTTKVRYEEELVEAIKTATTEKKDSLCFIEVIVHKDDTSKELLEWGSRVSAANGRPPNPQ

SEQ ID NO: 100397 - protein, 371 aa, Arabidopsis thaliana
  peptide (1)..(371): Ceres Seq. ID no. 13605035
  misc_feature (1)..(371): Homolog of NCBI NO: 28393679 NR Description: putative pyruvate decarboxylase [Arabidopsis
  misc_feature (1)..(371): Homolog of NCBI NO: 15234062 NR Description: pyruvate decarboxylase-1 (Pdc1) [Arabidopsis
  misc_feature (1)..(371): Homolog of NCBI NO: 15240952 NR Description: pyruvate decarboxylase-related protein
  misc_feature (1)..(371): Homolog of NCBI NO: 1616785 NR Description: pyruvate decarboxylase [Arabidopsis thaliana]
  misc_feature (1)..(371): Homolog of NCBI NO: 10121330 NR Description: pyruvate decarboxylase [Fragaria x ananassa]
  misc_feature (1)..(371): Homolog of NCBI NO: 17225598 NR Description: pyruvate decarboxylase [Fragaria x ananassa]
  misc_feature (1)..(371): Homolog of NCBI NO: 29373077 NR Description: pyruvate decarboxylase 1 [Lotus corniculatus]
  misc_feature (1)..(371): Homolog of NCBI NO: 15240423 NR Description: pyruvate decarboxylase (gb|AAB16855.1) thaliana] >gi|9758276|dbj|BAB08775.1| pyruvate decarboxylase
  misc_feature (1)..(371): Homolog of NCBI NO: 24745919 NR Description: pyruvate decarboxylase [Solanum tuberosum]
  misc_feature (1)..(371): Homolog of NCBI NO: 34896032 NR Description: Similar to Zea mays mRNA for pyruvate
MGLEAAVEATLEFLNKAVKPVMVGGPKLRVAKASEAFLELADASGYPLAVMPSTKGLVPENHPHFIGTYWGAVSTPFCSEIVESADAYIFAGPIFNDYSSVGYSLLLKKEKAIIVHPDRVVVANGPTFGCVLMSDFFRELAKRVKRNETAYENYERIFVPEGKPLKCKPGEPLRVNAMFQHIQKMLSSETAVIAETGDSWFNCQKLKLPKGCGYEFQMQYGSIGWSVGATLGYAQATPEKRVLSFIGDGSFQVTAQDISTMIRNGQKAIIFLINNGGYTIEVEIHDGPYNVIKNWNYTGLVDAIHNGEGKCWTTKVRYEEELVEAIKTATTEKKDSLCFIEVIVHKDDTSKELLEWGSRVSAANGRPPNPQ

SEQ ID NO: 100398 - DNA, 1416 bp, Arabidopsis thaliana
  misc_feature (1)..(1416): Ceres Seq. ID no. 13605036
  misc_feature: MA Experiment ID: 20000171 Result: Up-regulated in Transcription
  misc_feature: MA Experiment 20000171 PARAMETER Experiment Name: At_42deg_Heat_P Parameter: Age (day) Value: 14
  misc_feature: MA Experiment 20000171 PARAMETER Experiment Name: At_42deg_Heat_P Parameter: Organism Value: A. thaliana
  misc_feature: MA Experiment 20000171 PARAMETER Experiment Name: At_42deg_Heat_P Parameter: Plant Line Value: WS
  misc_feature: MA Experiment 20000171 PARAMETER Experiment Name: At_42deg_Heat_P Parameter: Temperature (deg C) Value: 42 vs. 22
  misc_feature: MA Experiment 20000171 PARAMETER Experiment Name: At_42deg_Heat_P Parameter: Timepoint (hr) Value: 1
  misc_feature: MA Experiment 20000171 PARAMETER Experiment Name: At_42deg_Heat_P Parameter: Tissue Value: Aerial
  misc_feature: MA Experiment ID: 20000173 Result: Up-regulated in Transcription
  misc_feature: MA Experiment 20000173 PARAMETER Experiment Name: At_42deg_Heat_P Parameter: Age (day) Value: 14
  misc_feature: MA Experiment 20000173 PARAMETER Experiment Name: At_42deg_Heat_P Parameter: Organism Value: A. thaliana
  misc_feature: MA Experiment 20000173 PARAMETER Experiment Name: At_42deg_Heat_P Parameter: Plant Line Value: WS
  misc_feature: MA Experiment 20000173 PARAMETER Experiment Name: At_42deg_Heat_P Parameter: Temperature (deg C) Value: 42 vs. 22
  misc_feature: MA Experiment 20000173 PARAMETER Experiment Name: At_42deg_Heat_P Parameter: Timepoint (hr) Value: 6
  misc_feature: MA Experiment 20000173 PARAMETER Experiment Name: At_42deg_Heat_P Parameter: Tissue Value: Aerial
atcatcatcaccctcatcgtcttcttctcttttaccctaatttatcttcttatccccagcgaagttttctcgattttgatctgattggtatagatctccggtgaagtaatacactggagggagatgaagtcatcgagaatgaagtttgcaaagaagttgaaatcaattagagccggagaatatctgaatcaggatcgaattctccaggttctttctgctgcagatgagtttcttccaaagatatctaaccacattcctcagattacatccgccgcttctatctggagaacccctcaaaagtctgaaaatcaaattgcaaatgtaacggaacttttggaaaacgtgagacaaggagaagaagaagcttctggaaattttgtcggcgacgaggagaacgtacggcctccggtgaatcagattccgagagttccgtgtgatcggaaagagagtaaactggcagtttcatgcggatctgatacaggaatcggaagaaagagtttcggatctggatttagaagacctgatttgaattcgaccacacttttcgatccgaaactgttagaagcatttgaattagctgcgttatgctttaggaagattaaggatttttccagagaagccagagtcaatgatgaagacgacatcgtctttcccgaggaagaggaaatcagaaaagacgggaatagcattcctccggtgattagcgtcgtagagtatagacggaaagacgaaaatgtcgtcgttcttcacaaagatgatggaaatgcccttcagattgtaaatgcgatcagggaagaagtcatcggagaagaagacattggaaaagacggaaatacccttatggatccgttgttggaattcgaggaacggtgtcctccgggaggagaggaatccgttgttttctacacaacgactcttcgaggaatcagaaaaacgttcgacgattgcaacatgatccgatttctgctggatagttttaaggttaagtactacgagagagatgtgtcgatgcatagagagtatagagaagagctccgacgaatctcagcggcggaaacagaggtgttgcctccggttctgttcgtaaaaggaaggtgtatcggtggagctcagagagtgttgggactgcacgagcaagggaagtttaagattctctttgagggcattccaatcaccggagatgaacgttgccggcggtgcgatggttttaggtttttgatgtgtgatggatgcagaggtagtcgccggattatctctggtgatggatcaagaattcagtgtttgatatgtaatgagaatgggttaattgtgtgcgttggttgctcctaataccattttttttgtttggtctatatatatcaaattacattattcgtttattatttttcttagtattgtaacgatttttttatacag

SEQ ID NO: 100399 - protein, 401 aa, Arabidopsis thaliana
  peptide (1)..(401): Ceres Seq. ID no. 13605037
  misc_feature (257)..(345): Pfam Name: Glutaredoxin Pfam Description: Glutaredoxin
  misc_feature (1)..(401): Homolog of NCBI NO: 15240974 NR Description: expressed protein [Arabidopsis thaliana]
  misc_feature (1)..(401): Homolog of NCBI NO: 26451045 NR Description: unknown protein [Arabidopsis thaliana]
  misc_feature (243)..(401): Homolog of NCBI NO: 15237554 NR Description: expressed protein [Arabidopsis thaliana]
  misc_feature (243)..(401): Homolog of NCBI NO: 15240060 NR Description: hypothetical protein [Arabidopsis thaliana] emb|CAB81925.1~gene_id:MHF15.1~similar to unknown protein
  misc_feature (241)..(400): Homolog of NCBI NO: 34899868 NR Description: OJ1714_H10.16 [Oryza sativa (japonica
  misc_feature (242)..(401): Homolog of NCBI NO: 38346321 NR Description: OJ000126_13.3 [Oryza sativa (japonica
  misc_feature (245)..(401): Homolog of NCBI NO: 15235179 NR Description: hypothetical protein [Arabidopsis thaliana]
  misc_feature (240)..(401): Homolog of NCBI NO: 15223291 NR Description: expressed protein [Arabidopsis thaliana]
  misc_feature (234)..(400): Homolog of NCBI NO: 15217659 NR Description: peptide transporter -related [Arabidopsis
  misc_feature (234)..(400): Homolog of NCBI NO: 17381052 NR Description: putative peptide transporter protein [Arabidopsis
MKSSRMKFAKKLKSIRAGEYLNQDRILQVLSAADEFLPKISNHIPQITSAASIWRTPQKSENQIANVTELLENVRQGEEEASGNFVGDEENVRPPVNQIPRVPCDRKESKLAVSCGSDTGIGRKSFGSGFRRPDLNSTTLFDPKLLEAFELAALCFRKIKDFSREARVNDEDDIVFPEEEEIRKDGNSIPPVISVVEYRRKDENVVVLHKDDGNALQIVNAIREEVIGEEDIGKDGNTLMDPLLEFEERCPPGGEESVVFYTTTLRGIRKTFDDCNMIRFLLDSFKVKYYERDVSMHREYREELRRISAAETEVLPPVLFVKGRCIGGAQRVLGLHEQGKFKILFEGIPITGDERCRRCDGFRFLMCDGCRGSRRIISGDGSRIQCLICNENGLIVCVGCS

SEQ ID NO: 100400 - protein, 396 aa, Arabidopsis thaliana
  peptide (1)..(396): Ceres Seq. ID no. 13605038
  misc_feature (252)..(340): Pfam Name: Glutaredoxin Pfam Description: Glutaredoxin
  misc_feature (1)..(396): Homolog of NCBI NO: 15240974 NR Description: expressed protein [Arabidopsis thaliana]
  misc_feature (1)..(396): Homolog of NCBI NO: 26451045 NR Description: unknown protein [Arabidopsis thaliana]
  misc_feature (238)..(396): Homolog of NCBI NO: 15237554 NR Description: expressed protein [Arabidopsis thaliana]
  misc_feature (238)..(396): Homolog of NCBI NO: 15240060 NR Description: hypothetical protein [Arabidopsis thaliana] emb|CAB81925.1~gene_id:MHF15.1~similar to unknown protein
  misc_feature (236)..(395): Homolog of NCBI NO: 34899868 NR Description: OJ1714_H10.16 [Oryza sativa (japonica
  misc_feature (237)..(396): Homolog of NCBI NO: 38346321 NR Description: OJ000126_13.3 [Oryza sativa (japonica
  misc_feature (240)..(396): Homolog of NCBI NO: 15235179 NR Description: hypothetical protein [Arabidopsis thaliana]
  misc_feature (235)..(396): Homolog of NCBI NO: 15223291 NR Description: expressed protein [Arabidopsis thaliana]
  misc_feature (229)..(395): Homolog of NCBI NO: 15217659 NR Description: peptide transporter -related [Arabidopsis
  misc_feature (229)..(395): Homolog of NCBI NO: 17381052 NR Description: putative peptide transporter protein [Arabidopsis
MKFAKKLKSIRAGEYLNQDRILQVLSAADEFLPKISNHIPQITSAASIWRTPQKSENQIANVTELLENVRQGEEEASGNFVGDEENVRPPVNQIPRVPCDRKESKLAVSCGSDTGIGRKSFGSGFRRPDLNSTTLFDPKLLEAFELAALCFRKIKDFSREARVNDEDDIVFPEEEEIRKDGNSIPPVISVVEYRRKDENVVVLHKDDGNALQIVNAIREEVIGEEDIGKDGNTLMDPLLEFEERCPPGGEESVVFYTTTLRGIRKTFDDCNMIRFLLDSFKVKYYERDVSMHREYREELRRISAAETEVLPPVLFVKGRCIGGAQRVLGLHEQGKFKILFEGIPITGDERCRRCDGFRFLMCDGCRGSRRIISGDGSRIQCLICNENGLIVCVGCS

SEQ ID NO: 100401 - DNA, 3508 bp, Arabidopsis thaliana
  misc_feature (1)..(3508): Ceres Seq. ID no. 13605039
atggcagaaactcgttcgcagatgttttatcgggaggtttcagctattcacgaaactatgtatccgtcattgaaagtggtttgtggtcacaaatctgatgtgcgttccggcaaagcggcgacgacgaatcagcaatttggtgttcaatcctcaccgtgcatcggagaatcaatgttggatacgagagcttacaacattggaagatcctcacagctgatatctacagctccgatcgtcactcctgacaccagcaaagagagagtcggtatgtcgaacaaatattttccattggaagagagatctgattttgcgagacttgagcatctcagatttaatggtgatagaattacagaatggttgttccagattgaacaatttttcttaattgatcgtactccggaggaattgaaagttggcttcgcttcactccatttcgatgacactgctgcgactttgcaccaatcaattgtacaatcgatgtggtggaagcatgttaggcatgattggtggagttacaaactgttgttgcaagtgagatatgatgagcatgttaatgactcgattgcaaaactgacacagttgcaggagactgaaggaatagaggagtatcatgctcgatttgagttgattagcactagattgaacttcgctgaagattacttggttagtgtttacttggcaggtttgagaactgatactcaactgaatgttaggatgtttggacctcagacaattcaacaatgtttaatgttgggaagattatatgagatggctcacccaaagagtgtgcttatcagaaaaaagagtgatgattatcagaaagaagctcaacatgtttcaagtaatgctgcaggaacttctatgattaatgatggtaattgcatgataggtaatgatggagatcgattccttagtggttcagacttggtagagaatgcggttgcgacggtgaagaaatatttggttgaaattgatgatgctatgtctagtgatgatgatcaaaattcggatgctggggacgtctttggattcaacatagaagagtgtgaaacagattcatggattgaacataagccgttgattcaagatcaagccgcgtttcactccatagacatagaaggtgtctcacaacttcagaaggttcgttcaaaccttaaggattttgataaagttgatgcaacaatgaatcaaatgctgtcatcaattggatttgttgttgatgaattacactctagttgtggaagtgctaccgtccatgtccagaagaagcctagtaagtctctcaaatcctggaagttcaaatttaaaaccagctcacaagaccaaggggatcatgaatcacttccaatagggttacatatcagattcaagtcctggaaatttaagttcgtgaatagaaatttacaaatgatgagagaacatggatatacaacacactttcagctaatgtctgataagagagaacatcaagagatgttcattgtggccaggattgttgatgtgagatgtttgcttagcatgatacttgggataacagagagtgatgcaggtcatggagaacaatttgtgtatgaccggattacaatggtaaagaggctgctgttgcaaaccagtttagtcattcaagaagtgatgagaaacaaaaagatcaagtttaccaaacggtggtggttcaagtataaatttggggaagagggtttcacgagactgaattctttcaatttgcgtatgacttatcattttgcggtttggcattgttggaagagcaagaccatggtgcatgttgaaatgagtggtgatcactggtcttggatggtcttagtcatgaaatctacaacatctagctttttgtcacttctctatgatcgaagaatgggagatccaagcagacatgaaacgggtcgggagattgtgtcacttcagggtcaaattcacactggttctcctatgattcagtgcataaagatgagcttcagcattctccttcttcagggtctgtttcagagtttgacaatgaagatgctcacatatatgcacttgtttggtagcaaaagttgtgtttcaactttgggaagacttctagatttccctcatcgttttaccggagctctcgtcgagtctcttgtaggtgagaagttgatatcgcgtctctttacgaacgttgtatcaaatggtgagagaagcagagttgcatgctcagaaagacaaagaaaagaattgatcgacaccaagaacacagctgacacaacaatttacagcatagagaagagtcttggtgaatacagagagaagatcccaagtgaaatcgccaaggagattgaagatgctgtggcagatctaaggagcgcttcctctggggatgatctcaacgagatcaaggccaagattgaggcggcaaacaaagctgtttctaagattggggagcacatgtctggtggttctggtggaggctctgcaccaggaggaggatctgagggaggcagtgatcaagctccagaggcagagtacgaggaagtgaaaaaggctgatttaatcgagatcccatttcttttgttggcttacttctctcgaatttacgcaggaagatcattagcagagaattctcatctgattcagtccatggctgccacggctcttttccgatcgattcgtcgacgcgacgtcgtctccgcgcctctttccgtttacaaatcccttgctggtaatgctcaaccttcctggggtagttcatacattggtcagaactatgcaagtttctccagagctttcgggtcaaaacctgttgtgaatgacattcttggtactggtttgggcactaacaatgccattagagaggagagagagaagtcaaaatctactgaagctgcaattgttggtgctcaattgactcgatctttccgtgctcttgatgtgggaacatcgaaacgattgttttctacaatctcaggggatataaagacaacacaggaggaaccaaaaatcaaaagctttcgccctttatctcctcacctttctgtttaccagcctcagatgaactccatgctatcgattttcaacagaatctcaggggtttacttgaccggtgtcactttcgctggctaccttctctacctgaagatgggtatgatctgcctcacctacccgagtttctaccaagtcctttaccatacacaacagcaacttccagtcatcacctcggttactgcattagccgctatttatcatactatcaagagtactcactcactcttgacccattaaaaacctttaccaaagctctttcgatgaagccgccaaagtctccagtaagagtttctttgagatgattaataaggagacaagaaaacatttgttaaactctgtcttgaaaaggtaaagatttagcacctgtttctttggattcgaggcttttttgggggtatgtttgttgcttttctttgttctcagaccttttttgaatgatgtaataaatgtttaccaaagttctgttgctacgttactctttttg

SEQ ID NO: 100402 - protein, 1086 aa, Arabidopsis thaliana
  peptide (1)..(1086): Ceres Seq. ID no. 13605040
  misc_feature (139)..(231): Pfam Name: Retrotransposon gag protein Pfam Description: Retrotransposon gag protein
  misc_feature (847)..(1086): Homolog of NCBI NO: 11022654 NR Description: gene_id:MTH16.1~pir||T05407~strong similarity to
  misc_feature (874)..(1086): Homolog of NCBI NO: 15242460 NR Description: expressed protein [Arabidopsis thaliana]
  misc_feature (874)..(1086): Homolog of NCBI NO: 21593777 NR Description: unknown [Arabidopsis thaliana]
  misc_feature (7)..(290): Homolog of NCBI NO: 25403488 NR Description: protein F28J9.14 [imported] - Arabidopsis >gi|6272383|gb|AAF06089.1|AC007918_13 F28J9.14 [Arabidopsis
  misc_feature (305)..(441): Homolog of NCBI NO: 25403488 NR Description: protein F28J9.14 [imported] - Arabidopsis >gi|6272383|gb|AAF06089.1|AC007918_13 F28J9.14 [Arabidopsis
  misc_feature (305)..(473): Homolog of NCBI NO: 15220434 NR Description: hypothetical protein [Arabidopsis thaliana]
  misc_feature (7)..(137): Homolog of NCBI NO: 15220434 NR Description: hypothetical protein [Arabidopsis thaliana]
  misc_feature (162)..(290): Homolog of NCBI NO: 15220434 NR Description: hypothetical protein [Arabidopsis thaliana]
  misc_feature (29)..(425): Homolog of NCBI NO: 25405220 NR Description: F16N3.16 [imported] - Arabidopsis thaliana
  misc_feature (421)..(466): Homolog of NCBI NO: 25405220 NR Description: F16N3.16 [imported] - Arabidopsis thaliana
MAETRSQMFYREVSAIHETMYPSLKVVCGHKSDVRSGKAATTNQQFGVQSSPCIGESMLDTRAYNIGRSSQLISTAPIVTPDTSKERVGMSNKYFPLEERSDFARLEHLRFNGDRITEWLFQIEQFFLIDRTPEELKVGFASLHFDDTAATLHQSIVQSMWWKHVRHDWWSYKLLLQVRYDEHVNDSIAKLTQLQETEGIEEYHARFELISTRLNFAEDYLVSVYLAGLRTDTQLNVRMFGPQTIQQCLMLGRLYEMAHPKSVLIRKKSDDYQKEAQHVSSNAAGTSMINDGNCMIGNDGDRFLSGSDLVENAVATVKKYLVEIDDAMSSDDDQNSDAGDVFGFNIEECETDSWIEHKPLIQDQAAFHSIDIEGVSQLQKVRSNLKDFDKVDATMNQMLSSIGFVVDELHSSCGSATVHVQKKPSKSLKSWKFKFKTSSQDQGDHESLPIGLHIRFKSWKFKFVNRNLQMMREHGYTTHFQLMSDKREHQEMFIVARIVDVRCLLSMILGITESDAGHGEQFVYDRITMVKRLLLQTSLVIQEVMRNKKIKFTKRWWFKYKFGEEGFTRLNSFNLRMTYHFAVWHCWKSKTMVHVEMSGDHWSWMVLVMKSTTSSFLSLLYDRRMGDPSRHETGREIVSLQGQIHTGSPMIQCIKMSFSILLLQGLFQSLTMKMLTYMHLFGSKSCVSTLGRLLDFPHRFTGALVESLVGEKLISRLFTNVVSNGERSRVACSERQRKELIDTKNTADTTIYSIEKSLGEYREKIPSEIAKEIEDAVADLRSASSGDDLNEIKAKIEAANKAVSKIGEHMSGGSGGGSAPGGGSEGGSDQAPEAEYEEVKKADLIEIPFLLLAYFSRIYAGRSLAENSHLIQSMAATALFRSIRRRDVVSAPLSVYKSLAGNAQPSWGSSYIGQNYASFSRAFGSKPVVNDILGTGLGTNNAIREEREKSKSTEAAIVGAQLTRSFRALDVGTSKRLFSTISGDIKTTQEEPKIKSFRPLSPHLSVYQPQMNSMLSIFNRISGVYLTGVTFAGYLLYLKMGMICLTYPSFYQVLYHTQQQLPVITSVTALAAIYHTIKSTHSLLTH

SEQ ID NO: 100403 - protein, 1079 aa, Arabidopsis thaliana
  peptide (1)..(1079): Ceres Seq. ID no. 13605041
  misc_feature (132)..(224): Pfam Name: Retrotransposon gag protein Pfam Description: Retrotransposon gag protein
  misc_feature (840)..(1079): Homolog of NCBI NO: 11022654 NR Description: gene_id:MTH16.1~pir||T05407~strong similarity to
  misc_feature (867)..(1079): Homolog of NCBI NO: 15242460 NR Description: expressed protein [Arabidopsis thaliana]
  misc_feature (867)..(1079): Homolog of NCBI NO: 21593777 NR Description: unknown [Arabidopsis thaliana]
  misc_feature (1)..(283): Homolog of NCBI NO: 25403488 NR Description: protein F28J9.14 [imported] - Arabidopsis >gi|6272383|gb|AAF06089.1|AC007918_13 F28J9.14 [Arabidopsis
  misc_feature (298)..(434): Homolog of NCBI NO: 25403488 NR Description: protein F28J9.14 [imported] - Arabidopsis >gi|6272383|gb|AAF06089.1|AC007918_13 F28J9.14 [Arabidopsis
  misc_feature (298)..(466): Homolog of NCBI NO: 15220434 NR Description: hypothetical protein [Arabidopsis thaliana]
  misc_feature (1)..(130): Homolog of NCBI NO: 15220434 NR Description: hypothetical protein [Arabidopsis thaliana]
  misc_feature (155)..(283): Homolog of NCBI NO: 15220434 NR Description: hypothetical protein [Arabidopsis thaliana]
  misc_feature (22)..(418): Homolog of NCBI NO: 25405220 NR Description: F16N3.16 [imported] - Arabidopsis thaliana
  misc_feature (414)..(459): Homolog of NCBI NO: 25405220 NR Description: F16N3.16 [imported] - Arabidopsis thaliana
MFYREVSAIHETMYPSLKVVCGHKSDVRSGKAATTNQQFGVQSSPCIGESMLDTRAYNIGRSSQLISTAPIVTPDTSKERVGMSNKYFPLEERSDFARLEHLRFNGDRITEWLFQIEQFFLIDRTPEELKVGFASLHFDDTAATLHQSIVQSMWWKHVRHDWWSYKLLLQVRYDEHVNDSIAKLTQLQETEGIEEYHARFELISTRLNFAEDYLVSVYLAGLRTDTQLNVRMFGPQTIQQCLMLGRLYEMAHPKSVLIRKKSDDYQKEAQHVSSNAAGTSMINDGNCMIGNDGDRFLSGSDLVENAVATVKKYLVEIDDAMSSDDDQNSDAGDVFGFNIEECETDSWIEHKPLIQDQAAFHSIDIEGVSQLQKVRSNLKDFDKVDATMNQMLSSIGFVVDELHSSCGSATVHVQKKPSKSLKSWKFKFKTSSQDQGDHESLPIGLHIRFKSWKFKFVNRNLQMMREHGYTTHFQLMSDKREHQEMFIVARIVDVRCLLSMILGITESDAGHGEQFVYDRITMVKRLLLQTSLVIQEVMRNKKIKFTKRWWFKYKFGEEGFTRLNSFNLRMTYHFAVWHCWKSKTMVHVEMSGDHWSWMVLVMKSTTSSFLSLLYDRRMGDPSRHETGREIVSLQGQIHTGSPMIQCIKMSFSILLLQGLFQSLTMKMLTYMHLFGSKSCVSTLGRLLDFPHRFTGALVESLVGEKLISRLFTNVVSNGERSRVACSERQRKELIDTKNTADTTIYSIEKSLGEYREKIPSEIAKEIEDAVADLRSASSGDDLNEIKAKIEAANKAVSKIGEHMSGGSGGGSAPGGGSEGGSDQAPEAEYEEVKKADLIEIPFLLLAYFSRIYAGRSLAENSHLIQSMAATALFRSIRRRDVVSAPLSVYKSLAGNAQPSWGSSYIGQNYASFSRAFGSKPVVNDILGTGLGTNNAIREEREKSKSTEAAIVGAQLTRSFRALDVGTSKRLFSTISGDIKTTQEEPKIKSFRPLSPHLSVYQPQMNSMLSIFNRISGVYLTGVTFAGYLLYLKMGMICLTYPSFYQVLYHTQQQLPVITSVTALAAIYHTIKSTHSLLTH

SEQ ID NO: 100404 - protein, 1067 aa, Arabidopsis thaliana
  peptide (1)..(1067): Ceres Seq. ID no. 13605042
  misc_feature (120)..(212): Pfam Name: Retrotransposon gag protein Pfam Description: Retrotransposon gag protein
  misc_feature (828)..(1067): Homolog of NCBI NO: 11022654 NR Description: gene_id:MTH16.1~pir||T05407~strong similarity to
  misc_feature (855)..(1067): Homolog of NCBI NO: 15242460 NR Description: expressed protein [Arabidopsis thaliana]
  misc_feature (855)..(1067): Homolog of NCBI NO: 21593777 NR Description: unknown [Arabidopsis thaliana]
  misc_feature (1)..(271): Homolog of NCBI NO: 25403488 NR Description: protein F28J9.14 [imported] - Arabidopsis >gi|6272383|gb|AAF06089.1|AC007918_13 F28J9.14 [Arabidopsis
  misc_feature (286)..(422): Homolog of NCBI NO: 25403488 NR Description: protein F28J9.14 [imported] - Arabidopsis >gi|6272383|gb|AAF06089.1|AC007918_13 F28J9.14 [Arabidopsis
  misc_feature (286)..(454): Homolog of NCBI NO: 15220434 NR Description: hypothetical protein [Arabidopsis thaliana]
  misc_feature (1)..(118): Homolog of NCBI NO: 15220434 NR Description: hypothetical protein [Arabidopsis thaliana]
  misc_feature (143)..(271): Homolog of NCBI NO: 15220434 NR Description: hypothetical protein [Arabidopsis thaliana]
  misc_feature (10)..(406): Homolog of NCBI NO: 25405220 NR Description: F16N3.16 [imported] - Arabidopsis thaliana
  misc_feature (402)..(447): Homolog of NCBI NO: 25405220 NR Description: F16N3.16 [imported] - Arabidopsis thaliana
MYPSLKVVCGHKSDVRSGKAATTNQQFGVQSSPCIGESMLDTRAYNIGRSSQLISTAPIVTPDTSKERVGMSNKYFPLEERSDFARLEHLRFNGDRITEWLFQIEQFFLIDRTPEELKVGFASLHFDDTAATLHQSIVQSMWWKHVRHDWWSYKLLLQVRYDEHVNDSIAKLTQLQETEGIEEYHARFELISTRLNFAEDYLVSVYLAGLRTDTQLNVRMFGPQTIQQCLMLGRLYEMAHPKSVLIRKKSDDYQKEAQHVSSNAAGTSMINDGNCMIGNDGDRFLSGSDLVENAVATVKKYLVEIDDAMSSDDDQNSDAGDVFGFNIEECETDSWIEHKPLIQDQAAFHSIDIEGVSQLQKVRSNLKDFDKVDATMNQMLSSIGFVVDELHSSCGSATVHVQKKPSKSLKSWKFKFKTSSQDQGDHESLPIGLHIRFKSWKFKFVNRNLQMMREHGYTTHFQLMSDKREHQEMFIVARIVDVRCLLSMILGITESDAGHGEQFVYDRITMVKRLLLQTSLVIQEVMRNKKIKFTKRWWFKYKFGEEGFTRLNSFNLRMTYHFAVWHCWKSKTMVHVEMSGDHWSWMVLVMKSTTSSFLSLLYDRRMGDPSRHETGREIVSLQGQIHTGSPMIQCIKMSFSILLLQGLFQSLTMKMLTYMHLFGSKSCVSTLGRLLDFPHRFTGALVESLVGEKLISRLFTNVVSNGERSRVACSERQRKELIDTKNTADTTIYSIEKSLGEYREKIPSEIAKEIEDAVADLRSASSGDDLNEIKAKIEAANKAVSKIGEHMSGGSGGGSAPGGGSEGGSDQAPEAEYEEVKKADLIEIPFLLLAYFSRIYAGRSLAENSHLIQSMAATALFRSIRRRDVVSAPLSVYKSLAGNAQPSWGSSYIGQNYASFSRAFGSKPVVNDILGTGLGTNNAIREEREKSKSTEAAIVGAQLTRSFRALDVGTSKRLFSTISGDIKTTQEEPKIKSFRPLSPHLSVYQPQMNSMLSIFNRISGVYLTGVTFAGYLLYLKMGMICLTYPSFYQVLYHTQQQLPVITSVTALAAIYHTIKSTHSLLTH

SEQ ID NO: 100405 - DNA, 1861 bp, Arabidopsis thaliana
  misc_feature (1)..(1861): Ceres Seq. ID no. 13605051
  misc_feature: MA Experiment ID: 20000171 Result: Down-regulated in Transcription
  misc_feature: MA Experiment 20000171 PARAMETER Experiment Name: At_42deg_Heat_P Parameter: Age (day) Value: 14
  misc_feature: MA Experiment 20000171 PARAMETER Experiment Name: At_42deg_Heat_P Parameter: Organism Value: A. thaliana
  misc_feature: MA Experiment 20000171 PARAMETER Experiment Name: At_42deg_Heat_P Parameter: Plant Line Value: WS
  misc_feature: MA Experiment 20000171 PARAMETER Experiment Name: At_42deg_Heat_P Parameter: Temperature (deg C) Value: 42 vs. 22
  misc_feature: MA Experiment 20000171 PARAMETER Experiment Name: At_42deg_Heat_P Parameter: Timepoint (hr) Value: 1
  misc_feature: MA Experiment 20000171 PARAMETER Experiment Name: At_42deg_Heat_P Parameter: Tissue Value: Aerial
  misc_feature: MA Experiment ID: 20000173 Result: Down-regulated in Transcription
  misc_feature: MA Experiment 20000173 PARAMETER Experiment Name: At_42deg_Heat_P Parameter: Age (day) Value: 14
  misc_feature: MA Experiment 20000173 PARAMETER Experiment Name: At_42deg_Heat_P Parameter: Organism Value: A. thaliana
  misc_feature: MA Experiment 20000173 PARAMETER Experiment Name: At_42deg_Heat_P Parameter: Plant Line Value: WS
  misc_feature: MA Experiment 20000173 PARAMETER Experiment Name: At_42deg_Heat_P Parameter: Temperature (deg C) Value: 42 vs. 22
  misc_feature: MA Experiment 20000173 PARAMETER Experiment Name: At_42deg_Heat_P Parameter: Timepoint (hr) Value: 6
  misc_feature: MA Experiment 20000173 PARAMETER Experiment Name: At_42deg_Heat_P Parameter: Tissue Value: Aerial
  misc_feature: MA Experiment ID: 20000179 Result: Up-regulated in Transcription
  misc_feature: MA Experiment 20000179 PARAMETER Experiment Name: At_Germinating_Seeds_P Parameter: Age (hr) Value: 6 vs. 0
  misc_feature: MA Experiment 20000179 PARAMETER Experiment Name: At_Germinating_Seeds_P Parameter: Tissue Value: Germinating Seeds
  misc_feature: MA Experiment ID: 20000184 Result: Down-regulated in Transcription
  misc_feature: MA Experiment 20000184 PARAMETER Experiment Name: At_Shoots__P Parameter: Age (day) Value: 7
  misc_feature: MA Experiment 20000184 PARAMETER Experiment Name: At_Shoots__P Parameter: Tissue Value: Shoots vs. Whole Plant
  misc_feature: MA Experiment ID: 20000264 Result: Down-regulated in Transcription
  misc_feature: MA Experiment 20000264 PARAMETER Experiment Name: At_Open_Flower_P Parameter: Age (day) Value: 21
  misc_feature: MA Experiment 20000264 PARAMETER Experiment Name: At_Open_Flower_P Parameter: Plant Line Value: WS
  misc_feature: MA Experiment 20000264 PARAMETER Experiment Name: At_Open_Flower_P Parameter: Tissue Value: Open Flower vs. Whole Plant
  misc_feature: MA Experiment ID: 20001247 Result: Up-regulated in Transcription
  misc_feature: MA Experiment 20001247 PARAMETER Experiment Name: At_Far-red-induction_P Parameter: Age (day) Value: 7
  misc_feature: MA Experiment 20001247 PARAMETER Experiment Name: At_Far-red-induction_P Parameter: Light Value: Far-red vs. White
  misc_feature: MA Experiment 20001247 PARAMETER Experiment Name: At_Far-red-induction_P Parameter: Organism Value: A. thaliana
  misc_feature: MA Experiment 20001247 PARAMETER Experiment Name: At_Far-red-induction_P Parameter: Plant Line Value: Columbia
  misc_feature: MA Experiment 20001247 PARAMETER Experiment Name: At_Far-red-induction_P Parameter: Timepoint (hr) Value: 1
  misc_feature: MA Experiment 20001247 PARAMETER Experiment Name: At_Far-red-induction_P Parameter: Tissue Value: Whole Plant
  misc_feature: MA Experiment ID: 20001560 Result: Up-regulated in Transcription
  misc_feature: MA Experiment 20001560 PARAMETER Experiment Name: At_Drought_Soil_Dry_P Parameter: Age (day) Value: 28
  misc_feature: MA Experiment 20001560 PARAMETER Experiment Name: At_Drought_Soil_Dry_P Parameter: Organism Value: A. thaliana
  misc_feature: MA Experiment 20001560 PARAMETER Experiment Name: At_Drought_Soil_Dry_P Parameter: Plant Line Value: WS
  misc_feature: MA Experiment 20001560 PARAMETER Experiment Name: At_Drought_Soil_Dry_P Parameter: Post Timepoint (hr) Value: None
  misc_feature: MA Experiment 20001560 PARAMETER Experiment Name: At_Drought_Soil_Dry_P Parameter: Post-Treatment Value: None
  misc_feature: MA Experiment 20001560 PARAMETER Experiment Name: At_Drought_Soil_Dry_P Parameter: Timepoint (day) Value: 14
  misc_feature: MA Experiment 20001560 PARAMETER Experiment Name: At_Drought_Soil_Dry_P Parameter: Treatment Value: Drought vs. No Drought
  misc_feature: MA Experiment ID: 20001905 Result: Down-regulated in Transcription
  misc_feature: MA Experiment 20001905 PARAMETER Experiment Name: At_Drought_Reproduction_P Parameter: Age (day) Value: 40
  misc_feature: MA Experiment 20001905 PARAMETER Experiment Name: At_Drought_Reproduction_P Parameter: Organism Value: A. thaliana
  misc_feature: MA Experiment 20001905 PARAMETER Experiment Name: At_Drought_Reproduction_P Parameter: Plant Line Value: WS
  misc_feature: MA Experiment 20001905 PARAMETER Experiment Name: At_Drought_Reproduction_P Parameter: Timepoint (day) Value: 10
  misc_feature: MA Experiment 20001905 PARAMETER Experiment Name: At_Drought_Reproduction_P Parameter: Tissue Value: Rosettes
  misc_feature: MA Experiment 20001905 PARAMETER Experiment Name: At_Drought_Reproduction_P Parameter: Treatment Value: Drought vs. No Drought
  misc_feature: MA Experiment ID: 20001911 Result: Down-regulated in Transcription
  misc_feature: MA Experiment 20001911 PARAMETER Experiment Name: At_Drought_Reproduction_P Parameter: Age (day) Value: 40
  misc_feature: MA Experiment 20001911 PARAMETER Experiment Name: At_Drought_Reproduction_P Parameter: Organism Value: A. thaliana
  misc_feature: MA Experiment 20001911 PARAMETER Experiment Name: At_Drought_Reproduction_P Parameter: Plant Line Value: WS
  misc_feature: MA Experiment 20001911 PARAMETER Experiment Name: At_Drought_Reproduction_P Parameter: Timepoint (day) Value: 10
  misc_feature: MA Experiment 20001911 PARAMETER Experiment Name: At_Drought_Reproduction_P Parameter: Tissue Value: Flowers
  misc_feature: MA Experiment 20001911 PARAMETER Experiment Name: At_Drought_Reproduction_P Parameter: Treatment Value: Drought vs. No Drought
atgttgaatttgtggctacgagaacatttagtatacgtttgccaccagcagaacctagtggctaagtttaggagtcagaaagcaatgaaattgttaagatttgctggtcttgttttcatttttatcacaaccttccagtttgtgaacatacgttattatggtggtgatatattctctttatcttctcaagataagtttccagtatcaattgatgtaagcacagaacccgtaagcacgttgtccggtcctgaaagattgaattctagtagttcaagatccgttgaggtagatgaagaggaaagcaccggtttaaaagaagaccatgtgattggctttgataagaatgacacagttcaaggccatgatagtttcgtagaggatgtcaaagataaggaaactcttgatttgcttccaggaaccaagagcagctcaaacgagagttacgagaaaatagtagaagatgctgatattgcttttgaaaatattaggaaaatggagattctggagagtaagtctgatccttctgttgataatctttcctcagaggtgaaaaagtttatgaatgtttcaaattctggggtggtttctatcactgagatgatgaatttactgcatcaaagccgcacttctcatgtctcactgaaagtaaaacggtcttccacaattgatcatgagctgttatatgcaagaactcaaattgagaacccaccgctgatagagaacgaccctttactgcatactcctctgtattggaatctctccatgttcaaaaggagctatgagctaatggagaaaaagctcaaggtatatgtctacagggaaggcaaaagacctgtactgcataagccggtgctgaaaggaatatatgcttctgaaggatggtttatgaaacaactcaagtccagcagaacatttgtcacaaaagaccctcgtaaagctcacctattttatcttcctttcagctccaaaatgttggaagaaactctgtatgtcccaggttctcacagcgataagaatctcattcagtttttgaagaactacctggacatgatttcttccaaatatagtttctggaataaaactggaggatcagatcattttctggttgcttgccacgactgggctccttccgagacgaggcagtacatggccaagtgcatcagagcattatgcaattctgatgtttcagaaggttttgtgttcggtaaagatgtagctcttcctgagacgactattcttgttcctaggagaccgcttagggctctcggaggcaaacctgtttcacaaaggcaaatacttgccttctttgcaggcggaatgcacggttaccttagacctctcctattgcaaaactggggaggaaacagagatccagacatgaaaatattcagtgagatacccaaatctaaagggaaaaagagttacatggagtacatgaagagcagcaagtattgcatctgcccaaaagggcacgaagtcaatagccctcgggtcgtggaggcattgttctatgagtgtgtcccggttatcatatccgataactttgtacctcccttcttcgaagttctgaattgggagtcttttgcggtatttgtcttggagaaagatattcctgatttgaagaacatattagtgtccataactgaggaaaggtatagagagatgcagatgagagtcaagatggtgcagaagcatttcctttggcattctaaacctgagagattcgatatatttcatatgatacttcactccatttggtacaatagagtttttcaaatttaaaaccacagagtaggtttgtgactgtagaacaagtaactaacagagattcattcgttaatatagcaaaaaagcaggttac

SEQ ID NO: 100406 - protein, 593 aa, Arabidopsis thaliana
  peptide (1)..(593): Ceres Seq. ID no. 13605052
  misc_feature (269)..(559): Pfam Name: Exostosin family Pfam Description: Exostosin family
  misc_feature (137)..(593): Homolog of NCBI NO: 15239502 NR Description: expressed protein [Arabidopsis thaliana]
  misc_feature (324)..(593): Homolog of NCBI NO: 26451681 NR Description: unknown protein [Arabidopsis thaliana]
  misc_feature (132)..(592): Homolog of NCBI NO: 15241150 NR Description: expressed protein [Arabidopsis thaliana]
  misc_feature (115)..(592): Homolog of NCBI NO: 26450497 NR Description: unknown protein [Arabidopsis thaliana]
  misc_feature (194)..(592): Homolog of NCBI NO: 15239118 NR Description: expressed protein [Arabidopsis thaliana]
  misc_feature (126)..(593): Homolog of NCBI NO: 9758523 NR Description: contains similarity to limonene
  misc_feature (226)..(592): Homolog of NCBI NO: 30683790 NR Description: expressed protein [Arabidopsis thaliana] unknown protein [Arabidopsis thaliana]
  misc_feature (223)..(593): Homolog of NCBI NO: 34911614 NR Description: limonene cyclase-like protein [Oryza sativa
  misc_feature (177)..(572): Homolog of NCBI NO: 15239475 NR Description: hypothetical protein [Arabidopsis thaliana]
  misc_feature (226)..(592): Homolog of NCBI NO: 7488129 NR Description: probable limonene cyclase - Arabidopsis thaliana limonene cyclase like protein [Arabidopsis thaliana]
MLNLWLREHLVYVCHQQNLVAKFRSQKAMKLLRFAGLVFIFITTFQFVNIRYYGGDIFSLSSQDKFPVSIDVSTEPVSTLSGPERLNSSSSRSVEVDEEESTGLKEDHVIGFDKNDTVQGHDSFVEDVKDKETLDLLPGTKSSSNESYEKIVEDADIAFENIRKMEILESKSDPSVDNLSSEVKKFMNVSNSGVVSITEMMNLLHQSRTSHVSLKVKRSSTIDHELLYARTQIENPPLIENDPLLHTPLYWNLSMFKRSYELMEKKLKVYVYREGKRPVLHKPVLKGIYASEGWFMKQLKSSRTFVTKDPRKAHLFYLPFSSKMLEETLYVPGSHSDKNLIQFLKNYLDMISSKYSFWNKTGGSDHFLVACHDWAPSETRQYMAKCIRALCNSDVSEGFVFGKDVALPETTILVPRRPLRALGGKPVSQRQILAFFAGGMHGYLRPLLLQNWGGNRDPDMKIFSEIPKSKGKKSYMEYMKSSKYCICPKGHEVNSPRVVEALFYECVPVIISDNFVPPFFEVLNWESFAVFVLEKDIPDLKNILVSITEERYREMQMRVKMVQKHFLWHSKPERFDIFHMILHSIWYNRVFQI

SEQ ID NO: 100407 - protein, 565 aa, Arabidopsis thaliana
  peptide (1)..(565): Ceres Seq. ID no. 13605053
  misc_feature (241)..(531): Pfam Name: Exostosin family Pfam Description: Exostosin family
  misc_feature (109)..(565): Homolog of NCBI NO: 15239502 NR Description: expressed protein [Arabidopsis thaliana]
  misc_feature (296)..(565): Homolog of NCBI NO: 26451681 NR Description: unknown protein [Arabidopsis thaliana]
  misc_feature (104)..(564): Homolog of NCBI NO: 15241150 NR Description: expressed protein [Arabidopsis thaliana]
  misc_feature (87)..(564): Homolog of NCBI NO: 26450497 NR Description: unknown protein [Arabidopsis thaliana]
  misc_feature (166)..(564): Homolog of NCBI NO: 15239118 NR Description: expressed protein [Arabidopsis thaliana]
  misc_feature (98)..(565): Homolog of NCBI NO: 9758523 NR Description: contains similarity to limonene
  misc_feature (198)..(564): Homolog of NCBI NO: 30683790 NR Description: expressed protein [Arabidopsis thaliana] unknown protein [Arabidopsis thaliana]
  misc_feature (195)..(565): Homolog of NCBI NO: 34911614 NR Description: limonene cyclase-like protein [Oryza sativa
  misc_feature (149)..(544): Homolog of NCBI NO: 15239475 NR Description: hypothetical protein [Arabidopsis thaliana]
  misc_feature (198)..(564): Homolog of NCBI NO: 7488129 NR Description: probable limonene cyclase - Arabidopsis thaliana limonene cyclase like protein [Arabidopsis thaliana]
MKLLRFAGLVFIFITTFQFVNIRYYGGDIFSLSSQDKFPVSIDVSTEPVSTLSGPERLNSSSSRSVEVDEEESTGLKEDHVIGFDKNDTVQGHDSFVEDVKDKETLDLLPGTKSSSNESYEKIVEDADIAFENIRKMEILESKSDPSVDNLSSEVKKFMNVSNSGVVSITEMMNLLHQSRTSHVSLKVKRSSTIDHELLYARTQIENPPLIENDPLLHTPLYWNLSMFKRSYELMEKKLKVYVYREGKRPVLHKPVLKGIYASEGWFMKQLKSSRTFVTKDPRKAHLFYLPFSSKMLEETLYVPGSHSDKNLIQFLKNYLDMISSKYSFWNKTGGSDHFLVACHDWAPSETRQYMAKCIRALCNSDVSEGFVFGKDVALPETTILVPRRPLRALGGKPVSQRQILAFFAGGMHGYLRPLLLQNWGGNRDPDMKIFSEIPKSKGKKSYMEYMKSSKYCICPKGHEVNSPRVVEALFYECVPVIISDNFVPPFFEVLNWESFAVFVLEKDIPDLKNILVSITEERYREMQMRVKMVQKHFLWHSKPERFDIFHMILHSIWYNRVFQI

SEQ ID NO: 100408 - protein, 429 aa, Arabidopsis thaliana
  peptide (1)..(429): Ceres Seq. ID no. 13605054
  misc_feature (105)..(395): Pfam Name: Exostosin family Pfam Description: Exostosin family
  misc_feature (1)..(429): Homolog of NCBI NO: 15239502 NR Description: expressed protein [Arabidopsis thaliana]
  misc_feature (160)..(429): Homolog of NCBI NO: 26451681 NR Description: unknown protein [Arabidopsis thaliana]
  misc_feature (1)..(428): Homolog of NCBI NO: 15241150 NR Description: expressed protein [Arabidopsis thaliana]
  misc_feature (1)..(428): Homolog of NCBI NO: 26450497 NR Description: unknown protein [Arabidopsis thaliana]
  misc_feature (30)..(428): Homolog of NCBI NO: 15239118 NR Description: expressed protein [Arabidopsis thaliana]
  misc_feature (1)..(429): Homolog of NCBI NO: 9758523 NR Description: contains similarity to limonene
  misc_feature (62)..(428): Homolog of NCBI NO: 30683790 NR Description: expressed protein [Arabidopsis thaliana] unknown protein [Arabidopsis thaliana]
  misc_feature (59)..(429): Homolog of NCBI NO: 34911614 NR Description: limonene cyclase-like protein [Oryza sativa
  misc_feature (13)..(408): Homolog of NCBI NO: 15239475 NR Description: hypothetical protein [Arabidopsis thaliana]
  misc_feature (62)..(428): Homolog of NCBI NO: 7488129 NR Description: probable limonene cyclase - Arabidopsis thaliana limonene cyclase like protein [Arabidopsis thaliana]
MEILESKSDPSVDNLSSEVKKFMNVSNSGVVSITEMMNLLHQSRTSHVSLKVKRSSTIDHELLYARTQIENPPLIENDPLLHTPLYWNLSMFKRSYELMEKKLKVYVYREGKRPVLHKPVLKGIYASEGWFMKQLKSSRTFVTKDPRKAHLFYLPFSSKMLEETLYVPGSHSDKNLIQFLKNYLDMISSKYSFWNKTGGSDHFLVACHDWAPSETRQYMAKCIRALCNSDVSEGFVFGKDVALPETTILVPRRPLRALGGKPVSQRQILAFFAGGMHGYLRPLLLQNWGGNRDPDMKIFSEIPKSKGKKSYMEYMKSSKYCICPKGHEVNSPRVVEALFYECVPVIISDNFVPPFFEVLNWESFAVFVLEKDIPDLKNILVSITEERYREMQMRVKMVQKHFLWHSKPERFDIFHMILHSIWYNRVFQI

SEQ ID NO: 100409 - DNA, 1324 bp, Arabidopsis thaliana
  misc_feature (1)..(1324): Ceres Seq. ID no. 13605059
  misc_feature: MA Experiment ID: 108461 Result: Up-regulated in Transcription
  misc_feature: MA Experiment 108461 PARAMETER Experiment Name: At_Germinating_Seeds_cDNA_P Parameter: Age (day) Value: 1 vs. 0
  misc_feature: MA Experiment 108461 PARAMETER Experiment Name: At_Germinating_Seeds_cDNA_P Parameter: Tissue Value: Germinating Seeds
  misc_feature: MA Experiment ID: 20000070 Result: Down-regulated in Transcription
  misc_feature: MA Experiment 20000070 PARAMETER Experiment Name: At_100uM_ABA_Mutants_cDNA_P Parameter: Plant Line Value: CS24
  misc_feature: MA Experiment 20000070 PARAMETER Experiment Name: At_100uM_ABA_Mutants_cDNA_P Parameter: Timepoint (hr) Value: 6
  misc_feature: MA Experiment 20000070 PARAMETER Experiment Name: At_100uM_ABA_Mutants_cDNA_P Parameter: Tissue Value: Aerial
  misc_feature: MA Experiment 20000070 PARAMETER Experiment Name: At_100uM_ABA_Mutants_cDNA_P Parameter: Treatment Value: 100uM ABA vs. No Treatment
  misc_feature: MA Experiment ID: 20000071 Result: Down-regulated in Transcription
  misc_feature: MA Experiment 20000071 PARAMETER Experiment Name: At_100uM_ABA_Mutants_cDNA_P Parameter: Plant Line Value: CS8104
  misc_feature: MA Experiment 20000071 PARAMETER Experiment Name: At_100uM_ABA_Mutants_cDNA_P Parameter: Timepoint (hr) Value: 6
  misc_feature: MA Experiment 20000071 PARAMETER Experiment Name: At_100uM_ABA_Mutants_cDNA_P Parameter: Tissue Value: Aerial
  misc_feature: MA Experiment 20000071 PARAMETER Experiment Name: At_100uM_ABA_Mutants_cDNA_P Parameter: Treatment Value: 100uM ABA vs. No Treatment
  misc_feature: MA Experiment ID: 20000086 Result: Down-regulated in Transcription
  misc_feature: MA Experiment 20000086 PARAMETER Experiment Name: At_100uM_ABA_Mutants_cDNA_P Parameter: Plant Line Value: CS22
  misc_feature: MA Experiment 20000086 PARAMETER Experiment Name: At_100uM_ABA_Mutants_cDNA_P Parameter: Timepoint (hr) Value: 6
  misc_feature: MA Experiment 20000086 PARAMETER Experiment Name: At_100uM_ABA_Mutants_cDNA_P Parameter: Tissue Value: Aerial
  misc_feature: MA Experiment 20000086 PARAMETER Experiment Name: At_100uM_ABA_Mutants_cDNA_P Parameter: Treatment Value: 100uM ABA vs. No Treatment
  misc_feature: MA Experiment ID: 20000087 Result: Down-regulated in Transcription
  misc_feature: MA Experiment 20000087 PARAMETER Experiment Name: At_100uM_ABA_Mutants_cDNA_P Parameter: Plant Line Value: WS
  misc_feature: MA Experiment 20000087 PARAMETER Experiment Name: At_100uM_ABA_Mutants_cDNA_P Parameter: Timepoint (hr) Value: 6
  misc_feature: MA Experiment 20000087 PARAMETER Experiment Name: At_100uM_ABA_Mutants_cDNA_P Parameter: Tissue Value: Aerial
  misc_feature: MA Experiment 20000087 PARAMETER Experiment Name: At_100uM_ABA_Mutants_cDNA_P Parameter: Treatment Value: 100uM ABA vs. No Treatment
  misc_feature: MA Experiment ID: 20000088 Result: Down-regulated in Transcription
  misc_feature: MA Experiment 20000088 PARAMETER Experiment Name: At_100uM_ABA_Mutants_cDNA_P Parameter: Plant Line Value: Landsberg
  misc_feature: MA Experiment 20000088 PARAMETER Experiment Name: At_100uM_ABA_Mutants_cDNA_P Parameter: Timepoint (hr) Value: 6
  misc_feature: MA Experiment 20000088 PARAMETER Experiment Name: At_100uM_ABA_Mutants_cDNA_P Parameter: Tissue Value: Aerial
  misc_feature: MA Experiment 20000088 PARAMETER Experiment Name: At_100uM_ABA_Mutants_cDNA_P Parameter: Treatment Value: 100uM ABA vs. No Treatment
  misc_feature: MA Experiment ID: 20000117 Result: Down-regulated in Transcription
  misc_feature: MA Experiment 20000117 PARAMETER Experiment Name: At_100uM_ABA_Mutants_cDNA_P Parameter: Plant Line Value: Columbia
  misc_feature: MA Experiment 20000117 PARAMETER Experiment Name: At_100uM_ABA_Mutants_cDNA_P Parameter: Timepoint (hr) Value: 6
  misc_feature: MA Experiment 20000117 PARAMETER Experiment Name: At_100uM_ABA_Mutants_cDNA_P Parameter: Tissue Value: Aerial
  misc_feature: MA Experiment 20000117 PARAMETER Experiment Name: At_100uM_ABA_Mutants_cDNA_P Parameter: Treatment Value: 100uM ABA vs. No Treatment
  misc_feature: MA Experiment ID: 20000179 Result: Up-regulated in Transcription
  misc_feature: MA Experiment 20000179 PARAMETER Experiment Name: At_Germinating_Seeds_P Parameter: Age (hr) Value: 6 vs. 0
  misc_feature: MA Experiment 20000179 PARAMETER Experiment Name: At_Germinating_Seeds_P Parameter: Tissue Value: Germinating Seeds
  misc_feature: MA Experiment ID: 20000180 Result: Up-regulated in Transcription
  misc_feature: MA Experiment 20000180 PARAMETER Experiment Name: At_Germinating_Seeds_P Parameter: Age (hr) Value: 24 vs. 0
  misc_feature: MA Experiment 20000180 PARAMETER Experiment Name: At_Germinating_Seeds_P Parameter: Tissue Value: Germinating Seeds
  misc_feature: MA Experiment ID: 20000185 Result: Up-regulated in Transcription
  misc_feature: MA Experiment 20000185 PARAMETER Experiment Name: At_Roots__P Parameter: Age (day) Value: 7 vs. 21
  misc_feature: MA Experiment 20000185 PARAMETER Experiment Name: At_Roots__P Parameter: Organism Value: A. thaliana
  misc_feature: MA Experiment 20000185 PARAMETER Experiment Name: At_Roots__P Parameter: Tissue Value: Roots vs. Whole Plant
  misc_feature: MA Experiment ID: 20000224 Result: Up-regulated in Transcription
  misc_feature: MA Experiment ID: 20000269 Result: Down-regulated in Transcription
  misc_feature: MA Experiment 20000269 PARAMETER Experiment Name: At_1mM_KNO3_L-vs-H_Roots_P Parameter: Age (day) Value: 7,10,12
  misc_feature: MA Experiment 20000269 PARAMETER Experiment Name: At_1mM_KNO3_L-vs-H_Roots_P Parameter: Organism Value: A. thaliana
  misc_feature: MA Experiment 20000269 PARAMETER Experiment Name: At_1mM_KNO3_L-vs-H_Roots_P Parameter: Plant Line Value: WS
  misc_feature: MA Experiment 20000269 PARAMETER Experiment Name: At_1mM_KNO3_L-vs-H_Roots_P Parameter: Timepoint (day) Value: 7,10,12
  misc_feature: MA Experiment 20000269 PARAMETER Experiment Name: At_1mM_KNO3_L-vs-H_Roots_P Parameter: Tissue Value: Roots
  misc_feature: MA Experiment 20000269 PARAMETER Experiment Name: At_1mM_KNO3_L-vs-H_Roots_P Parameter: Treatment Value: 1mM KNO3 vs. 50mM KNO3
  misc_feature: MA Experiment ID: 20000439 Result: Up-regulated in Transcription
  misc_feature: MA Experiment 20000439 PARAMETER Experiment Name: At_Roots__P Parameter: Age (day) Value: 14 vs. 21
  misc_feature: MA Experiment 20000439 PARAMETER Experiment Name: At_Roots__P Parameter: Organism Value: A. thaliana
  misc_feature: MA Experiment 20000439 PARAMETER Experiment Name: At_Roots__P Parameter: Tissue Value: Roots vs. Whole Plant
  misc_feature: MA Experiment ID: 20000573 Result: Down-regulated in Transcription
  misc_feature: MA Experiment 20000573 PARAMETER Experiment Name: At_100uM_ABA_Mutants__P Parameter: Organism Value: A. thaliana
  misc_feature: MA Experiment 20000573 PARAMETER Experiment Name: At_100uM_ABA_Mutants__P Parameter: Plant Line Value: CS22 vs. Ler wt
  misc_feature: MA Experiment 20000573 PARAMETER Experiment Name: At_100uM_ABA_Mutants__P Parameter: Timepoint (hr) Value: N/A
  misc_feature: MA Experiment 20000573 PARAMETER Experiment Name: At_100uM_ABA_Mutants__P Parameter: Tissue Value: Whole Plant
  misc_feature: MA Experiment 20000573 PARAMETER Experiment Name: At_100uM_ABA_Mutants__P Parameter: Treatment Value: None
  misc_feature: MA Experiment ID: 20000794 Result: Up-regulated in Transcription
  misc_feature: MA Experiment 20000794 PARAMETER Experiment Name: At_Petals_P Parameter: Age (day) Value: 23-25 days
  misc_feature: MA Experiment 20000794 PARAMETER Experiment Name: At_Petals_P Parameter: Plant Line Value: WS
  misc_feature: MA Experiment 20000794 PARAMETER Experiment Name: At_Petals_P Parameter: Tissue Value: Petals vs. Whole plant
  misc_feature: MA Experiment ID: 20001248 Result: Down-regulated in Transcription
  misc_feature: MA Experiment 20001248 PARAMETER Experiment Name: At_Far-red-induction_P Parameter: Age (day) Value: 7
  misc_feature: MA Experiment 20001248 PARAMETER Experiment Name: At_Far-red-induction_P Parameter: Light Value: Far-red vs. White
  misc_feature: MA Experiment 20001248 PARAMETER Experiment Name: At_Far-red-induction_P Parameter: Organism Value: A. thaliana
  misc_feature: MA Experiment 20001248 PARAMETER Experiment Name: At_Far-red-induction_P Parameter: Plant Line Value: Columbia
  misc_feature: MA Experiment 20001248 PARAMETER Experiment Name: At_Far-red-induction_P Parameter: Timepoint (hr) Value: 4
  misc_feature: MA Experiment 20001248 PARAMETER Experiment Name: At_Far-red-induction_P Parameter: Tissue Value: Whole Plant
  misc_feature: MA Experiment ID: 20001450 Result: Down-regulated in Transcription
  misc_feature: MA Experiment 20001450 PARAMETER Experiment Name: At_Far-red-induction_P Parameter: Age (day) Value: 7
  misc_feature: MA Experiment 20001450 PARAMETER Experiment Name: At_Far-red-induction_P Parameter: Light Value: Far-red vs. White
  misc_feature: MA Experiment 20001450 PARAMETER Experiment Name: At_Far-red-induction_P Parameter: Organism Value: A. thaliana
  misc_feature: MA Experiment 20001450 PARAMETER Experiment Name: At_Far-red-induction_P Parameter: Plant Line Value: Columbia
  misc_feature: MA Experiment 20001450 PARAMETER Experiment Name: At_Far-red-induction_P Parameter: Timepoint (hr) Value: 8
  misc_feature: MA Experiment 20001450 PARAMETER Experiment Name: At_Far-red-induction_P Parameter: Tissue Value: Whole Plant
  misc_feature: MA Experiment ID: 20001560 Result: Up-regulated in Transcription
  misc_feature: MA Experiment 20001560 PARAMETER Experiment Name: At_Drought_Soil_Dry_P Parameter: Age (day) Value: 28
  misc_feature: MA Experiment 20001560 PARAMETER Experiment Name: At_Drought_Soil_Dry_P Parameter: Organism Value: A. thaliana
  misc_feature: MA Experiment 20001560 PARAMETER Experiment Name: At_Drought_Soil_Dry_P Parameter: Plant Line Value: WS
  misc_feature: MA Experiment 20001560 PARAMETER Experiment Name: At_Drought_Soil_Dry_P Parameter: Post Timepoint (hr) Value: None
  misc_feature: MA Experiment 20001560 PARAMETER Experiment Name: At_Drought_Soil_Dry_P Parameter: Post-Treatment Value: None
  misc_feature: MA Experiment 20001560 PARAMETER Experiment Name: At_Drought_Soil_Dry_P Parameter: Timepoint (day) Value: 14
  misc_feature: MA Experiment 20001560 PARAMETER Experiment Name: At_Drought_Soil_Dry_P Parameter: Treatment Value: Drought vs. No Drought
atgtttaacgttacactcattaagatcgtaccttagggaaaaaaaactcaagagacaaaaaaaaaaggaaggcgcgtcagtgatggagaagattattgacgtagcttatggcgcatcagtgaaggtgggtttgacgttgttggagatgaatctgttgccggatattgtcattaggcggctcacacgtctgcttctggccggtcgtctccgttccggttacaaacccacggcggagatgcaactctccgatctcctccgttttgttgactctataaagaagatgcctatagctatccataccgagaagccaaagactcaacactatgaattaccgacagctttcttcgaacttgtccttggaagaaacatgaagtacagctcttgttacttctcaaacgattcaagtagcttagaagatgcagaggaagcaattttggctctttattgtgaaagagctaaagtggaagatggtcaaagtgttcttgatatcggatgtggctggggatccttgtctttgtacattgcacgcaagtacagcaaatgcaagttaaccggtatctgcaactccaaaacgcagaaagcatttatcgatgagaaatgccggaaactcgggcttcagaatatcgaaatcattgtcgcggatattagcacttttgagcatgaagggacatacgatcggatattctccatcgagatgtttgagcatatgaaaaactatggagagctactaaagaagataggaaagtggatgaaggaagatagtcttctgtttgttcactatttctgccataagacatttgcttaccactttgaggatgtgaatgacgatgactggatcacaagacacttcttcagcggaggaacaatgccatcagcagatcttctgctatattttcaagaaaatgtttcgattgtggatcattggctcgtaagcgggacgcattatgcaaaaacaagtgaagagtggctaaaaagaatggataaggagatagttgcagtaaaaaaaatcatggaagtgacttatgggaaagaagaagcagtgaagtggatggtttactggagaaccttcttcatcgcggttgctgagcttttcggatacaacaatggagaagagtggatggttgcacacttcctcttcaagaagaaatgatgatgatttctttatttttcttccaatttttcaataaagaatacaacaatcccattctactttgtattctatgatgttatggtttcataccaaaggagtttgttcaatctttttaaagtgacaatgttatctcgaaaaacatggggatcaagtatcatgaactggattcttttg

SEQ ID NO: 100410 - protein, 382 aa, Arabidopsis thaliana; identical to SEQ ID NO: 26916
  peptide (1)..(382): Ceres Seq. ID no. 13605060
  misc_feature (211)..(381): Pfam Name: Cyclopropane-fatty-acyl-phospholipid synthase Pfam Description: Cyclopropane-fatty-acyl-phospholipid synthase
  misc_feature (28)..(382): Homolog of NCBI NO: 18418151 NR Description: expressed protein [Arabidopsis thaliana]
  misc_feature (28)..(382): Homolog of NCBI NO: 26451688 NR Description: unknown protein [Arabidopsis thaliana]
  misc_feature (28)..(382): Homolog of NCBI NO: 21593795 NR Description: coclaurine N-methyltransferase [Arabidopsis
  misc_feature (28)..(382): Homolog of NCBI NO: 30689611 NR Description: expressed protein [Arabidopsis thaliana]
  misc_feature (94)..(382): Homolog of NCBI NO: 7486450 NR Description: hypothetical protein F4I10.50 - Arabidopsis >gi|4455326|emb|CAB36786.1| putative protein [Arabidopsis >gi|7270259|emb|CAB80029.1| putative protein [Arabidopsis
  misc_feature (44)..(382): Homolog of NCBI NO: 16754879 NR Description: coclaurine N-methyltransferase [Coptis japonica]
  misc_feature (47)..(382): Homolog of NCBI NO: 33413898 NR Description: S-adenosyl-L-methionine:coclaurine
  misc_feature (28)..(201): Homolog of NCBI NO: 7486449 NR Description: hypothetical protein F4I10.40 - Arabidopsis >gi|4455325|emb|CAB36785.1| putative protein [Arabidopsis >gi|7270258|emb|CAB80028.1| putative protein [Arabidopsis
  misc_feature (46)..(382): Homolog of NCBI NO: 21242125 NR Description: conserved hypothetical protein [Xanthomonas pv. citri str. 306] >gi|21107536|gb|AAM36243.1| conserved
  misc_feature (46)..(382): Homolog of NCBI NO: 21230783 NR Description: conserved hypothetical protein [Xanthomonas pv. campestris str. ATCC 33913] >gi|21112382|gb|AAM40624.1| hypothetical protein [Xanthomonas campestris pv. campestris str.

SEQ ID NO: 100411 - protein, 355 aa, Arabidopsis thaliana; identical to SEQ ID NO: 26917
  peptide (1)..(355): Ceres Seq. ID no. 13605061
  misc_feature (184)..(354): Pfam Name: Cyclopropane-fatty-acyl-phospholipid synthase Pfam Description: Cyclopropane-fatty-acyl-phospholipid synthase
  misc_feature (1)..(355): Homolog of NCBI NO: 18418151 NR Description: expressed protein [Arabidopsis thaliana]
  misc_feature (1)..(355): Homolog of NCBI NO: 26451688 NR Description: unknown protein [Arabidopsis thaliana]
  misc_feature (1)..(355): Homolog of NCBI NO: 21593795 NR Description: coclaurine N-methyltransferase [Arabidopsis
  misc_feature (1)..(355): Homolog of NCBI NO: 30689611 NR Description: expressed protein [Arabidopsis thaliana]
  misc_feature (67)..(355): Homolog of NCBI NO: 7486450 NR Description: hypothetical protein F4I10.50 - Arabidopsis >gi|4455326|emb|CAB36786.1| putative protein [Arabidopsis >gi|7270259|emb|CAB80029.1| putative protein [Arabidopsis
  misc_feature (17)..(355): Homolog of NCBI NO: 16754879 NR Description: coclaurine N-methyltransferase [Coptis japonica]
  misc_feature (20)..(355): Homolog of NCBI NO: 33413898 NR Description: S-adenosyl-L-methionine:coclaurine
  misc_feature (1)..(174): Homolog of NCBI NO: 7486449 NR Description: hypothetical protein F4I10.40 - Arabidopsis >gi|4455325|emb|CAB36785.1| putative protein [Arabidopsis >gi|7270258|emb|CAB80028.1| putative protein [Arabidopsis
  misc_feature (19)..(355): Homolog of NCBI NO: 21242125 NR Description: conserved hypothetical protein [Xanthomonas pv. citri str. 306] >gi|21107536|gb|AAM36243.1| conserved
  misc_feature (19)..(355): Homolog of NCBI NO: 21230783 NR Description: conserved hypothetical protein [Xanthomonas pv. campestris str. ATCC 33913] >gi|21112382|gb|AAM40624.1| hypothetical protein [Xanthomonas campestris pv. campestris str.

SEQ ID NO: 100412 - protein, 334 aa, Arabidopsis thaliana; identical to SEQ ID NO: 26918
  peptide (1)..(334): Ceres Seq. ID no. 13605062
  misc_feature (163)..(333): Pfam Name: Cyclopropane-fatty-acyl-phospholipid synthase Pfam Description: Cyclopropane-fatty-acyl-phospholipid synthase
  misc_feature (1)..(334): Homolog of NCBI NO: 18418151 NR Description: expressed protein [Arabidopsis thaliana]
  misc_feature (1)..(334): Homolog of NCBI NO: 26451688 NR Description: unknown protein [Arabidopsis thaliana]
  misc_feature (1)..(334): Homolog of NCBI NO: 21593795 NR Description: coclaurine N-methyltransferase [Arabidopsis
  misc_feature (1)..(334): Homolog of NCBI NO: 30689611 NR Description: expressed protein [Arabidopsis thaliana]
  misc_feature (46)..(334): Homolog of NCBI NO: 7486450 NR Description: hypothetical protein F4I10.50 - Arabidopsis >gi|4455326|emb|CAB36786.1| putative protein [Arabidopsis >gi|7270259|emb|CAB80029.1| putative protein [Arabidopsis
  misc_feature (1)..(334): Homolog of NCBI NO: 16754879 NR Description: coclaurine N-methyltransferase [Coptis japonica]
  misc_feature (1)..(334): Homolog of NCBI NO: 33413898 NR Description: S-adenosyl-L-methionine:coclaurine
  misc_feature (1)..(153): Homolog of NCBI NO: 7486449 NR Description: hypothetical protein F4I10.40 - Arabidopsis >gi|4455325|emb|CAB36785.1| putative protein [Arabidopsis >gi|7270258|emb|CAB80028.1| putative protein [Arabidopsis
  misc_feature (1)..(334): Homolog of NCBI NO: 21242125 NR Description: conserved hypothetical protein [Xanthomonas pv. citri str. 306] >gi|21107536|gb|AAM36243.1| conserved
  misc_feature (1)..(334): Homolog of NCBI NO: 21230783 NR Description: conserved hypothetical protein [Xanthomonas pv. campestris str. ATCC 33913] >gi|21112382|gb|AAM40624.1| hypothetical protein [Xanthomonas campestris pv. campestris str.

SEQ ID NO: 100413 - DNA, 914 bp, Arabidopsis thaliana
  misc_feature (1)..(914): Ceres Seq. ID no. 13605071
  misc_feature: MA Experiment ID: 20000234 Result: Up-regulated in Transcription
  misc_feature: MA Experiment 20000234 PARAMETER Experiment Name: At_Siliques_P Parameter: Age (day) Value: 21
  misc_feature: MA Experiment 20000234 PARAMETER Experiment Name: At_Siliques_P Parameter: Organism Value: A. thaliana
  misc_feature: MA Experiment 20000234 PARAMETER Experiment Name: At_Siliques_P Parameter: Plant Line Value: WS
  misc_feature: MA Experiment 20000234 PARAMETER Experiment Name: At_Siliques_P Parameter: Tissue Value: Less Than 5mm Siliques vs. Whole Plant
cgtctctctgcaaatccaaaaatggagtcatcagtgaaacccaatcctttcctctccttctcttctttcattcaccaccagtgtacccgcttcagctccgacctctccgcccgaatcgaagacacgaaacgattcgccgaaaccctagctactcgacgtttctctcttcctactccgccgcctttcgcctccgtctcacaatccaagtctggaaccccgacgacgacgttgagtccatctcttgtcgctaaagctctcgctgggacgtcggtgtttacagtcagtaacaccaataacgaattcgttcttatctcggatcctaccggaggcaagtctatcggtttgctctgttttcgacaagaggatgctgaagcttttcttgctcaggcgcgacttcggagaagagaattgaaaaccaatgcgaaggttgttcccattactctggaccaggtgtacttgctaaaagttgaagggatttcctttcgcttcttgccagatccaatccaaataaagaatgcgttagagctcaaatcctcaggaaataagaatgggtttgatggagttccggtttttcagtctgagcttcttgttgtgaggaaaaaaaatagacgttactgccctgtatatttcagtaaggaagatatagagagggaactttctaaatatacgagagcatcaagaggagatcaacaaattatggttgggagtctggaagatgtgttgaggaaaatggagatgagcgagaagaattcaggttgggaagatgtaatattcattccaccgggaagaagttatgcacaacacatgcaggatttgatcaaagagtaaaaccataatagacacaatgtgtgtatttttacttgataaaaaaaaaacagcctcttttgagattttgcaatattatcaattgcccg

SEQ ID NO: 100414 - protein, 275 aa, Arabidopsis thaliana
  peptide (1)..(275): Ceres Seq. ID no. 13605072
  misc_feature (8)..(274): Pfam Name: Tic22-like family Pfam Description: Tic22-like family
  misc_feature (8)..(275): Homolog of NCBI NO: 15234162 NR Description: Tic22 -related protein [Arabidopsis thaliana]
  misc_feature (32)..(273): Homolog of NCBI NO: 3769671 NR Description: Tic22 [Pisum sativum]
  misc_feature (45)..(262): Homolog of NCBI NO: 27817952 NR Description: putative Tic22 [Oryza sativa (japonica
  misc_feature (77)..(262): Homolog of NCBI NO: 15229502 NR Description: Tic22 -related [Arabidopsis thaliana]
  misc_feature (77)..(262): Homolog of NCBI NO: 9293945 NR Description: contains similarity to unknown
RLSANPKMESSVKPNPFLSFSSFIHHQCTRFSSDLSARIEDTKRFAETLATRRFSLPTPPPFASVSQSKSGTPTTTLSPSLVAKALAGTSVFTVSNTNNEFVLISDPTGGKSIGLLCFRQEDAEAFLAQARLRRRELKTNAKVVPITLDQVYLLKVEGISFRFLPDPIQIKNALELKSSGNKNGFDGVPVFQSELLVVRKKNRRYCPVYFSKEDIERELSKYTRASRGDQQIMVGSLEDVLRKMEMSEKNSGWEDVIFIPPGRSYAQHMQDLIKE

SEQ ID NO: 100415 - protein, 268 aa, Arabidopsis thaliana
  peptide (1)..(268): Ceres Seq. ID no. 13605073
  misc_feature (1)..(267): Pfam Name: Tic22-like family Pfam Description: Tic22-like family
  misc_feature (1)..(268): Homolog of NCBI NO: 15234162 NR Description: Tic22 -related protein [Arabidopsis thaliana]
  misc_feature (25)..(266): Homolog of NCBI NO: 3769671 NR Description: Tic22 [Pisum sativum]
  misc_feature (38)..(255): Homolog of NCBI NO: 27817952 NR Description: putative Tic22 [Oryza sativa (japonica
  misc_feature (70)..(255): Homolog of NCBI NO: 15229502 NR Description: Tic22 -related [Arabidopsis thaliana]
  misc_feature (70)..(255): Homolog of NCBI NO: 9293945 NR Description: contains similarity to unknown
MESSVKPNPFLSFSSFIHHQCTRFSSDLSARIEDTKRFAETLATRRFSLPTPPPFASVSQSKSGTPTTTLSPSLVAKALAGTSVFTVSNTNNEFVLISDPTGGKSIGLLCFRQEDAEAFLAQARLRRRELKTNAKVVPITLDQVYLLKVEGISFRFLPDPIQIKNALELKSSGNKNGFDGVPVFQSELLVVRKKNRRYCPVYFSKEDIERELSKYTRASRGDQQIMVGSLEDVLRKMEMSEKNSGWEDVIFIPPGRSYAQHMQDLIKE

SEQ ID NO: 100416 - DNA, 1734 bp, Arabidopsis thaliana
  misc_feature (1)..(1734): Ceres Seq. ID no. 13605074
  misc_feature: MA Experiment ID: 20000171 Result: Up-regulated in Transcription
  misc_feature: MA Experiment 20000171 PARAMETER Experiment Name: At_42deg_Heat_P Parameter: Age (day) Value: 14
  misc_feature: MA Experiment 20000171 PARAMETER Experiment Name: At_42deg_Heat_P Parameter: Organism Value: A. thaliana
  misc_feature: MA Experiment 20000171 PARAMETER Experiment Name: At_42deg_Heat_P Parameter: Plant Line Value: WS
  misc_feature: MA Experiment 20000171 PARAMETER Experiment Name: At_42deg_Heat_P Parameter: Temperature (deg C) Value: 42 vs. 22
  misc_feature: MA Experiment 20000171 PARAMETER Experiment Name: At_42deg_Heat_P Parameter: Timepoint (hr) Value: 1
  misc_feature: MA Experiment 20000171 PARAMETER Experiment Name: At_42deg_Heat_P Parameter: Tissue Value: Aerial
  misc_feature: MA Experiment ID: 20000173 Result: Up-regulated in Transcription
  misc_feature: MA Experiment 20000173 PARAMETER Experiment Name: At_42deg_Heat_P Parameter: Age (day) Value: 14
  misc_feature: MA Experiment 20000173 PARAMETER Experiment Name: At_42deg_Heat_P Parameter: Organism Value: A. thaliana
  misc_feature: MA Experiment 20000173 PARAMETER Experiment Name: At_42deg_Heat_P Parameter: Plant Line Value: WS
  misc_feature: MA Experiment 20000173 PARAMETER Experiment Name: At_42deg_Heat_P Parameter: Temperature (deg C) Value: 42 vs. 22
  misc_feature: MA Experiment 20000173 PARAMETER Experiment Name: At_42deg_Heat_P Parameter: Timepoint (hr) Value: 6
  misc_feature: MA Experiment 20000173 PARAMETER Experiment Name: At_42deg_Heat_P Parameter: Tissue Value: Aerial
  misc_feature: MA Experiment ID: 20000437 Result: Up-regulated in Transcription
  misc_feature: MA Experiment 20000437 PARAMETER Experiment Name: At_Drought_P Parameter: Age (day) Value: 8
  misc_feature: MA Experiment 20000437 PARAMETER Experiment Name: At_Drought_P Parameter: Organism Value: A. thaliana
  misc_feature: MA Experiment 20000437 PARAMETER Experiment Name: At_Drought_P Parameter: Plant Line Value: WS
  misc_feature: MA Experiment 20000437 PARAMETER Experiment Name: At_Drought_P Parameter: Timepoint (hr) Value: 24
  misc_feature: MA Experiment 20000437 PARAMETER Experiment Name: At_Drought_P Parameter: Tissue Value: Whole Plant
  misc_feature: MA Experiment 20000437 PARAMETER Experiment Name: At_Drought_P Parameter: Treatment Value: Drought vs. No Drought
  misc_feature: MA Experiment ID: 20001557 Result: Up-regulated in Transcription
  misc_feature: MA Experiment 20001557 PARAMETER Experiment Name: At_Drought_Soil_Dry_P Parameter: Age (day) Value: 27
  misc_feature: MA Experiment 20001557 PARAMETER Experiment Name: At_Drought_Soil_Dry_P Parameter: Organism Value: A. thaliana
  misc_feature: MA Experiment 20001557 PARAMETER Experiment Name: At_Drought_Soil_Dry_P Parameter: Plant Line Value: WS
  misc_feature: MA Experiment 20001557 PARAMETER Experiment Name: At_Drought_Soil_Dry_P Parameter: Post Timepoint (hr) Value: 3
  misc_feature: MA Experiment 20001557 PARAMETER Experiment Name: At_Drought_Soil_Dry_P Parameter: Post-Treatment Value: Re-Water vs. No Drought
  misc_feature: MA Experiment 20001557 PARAMETER Experiment Name: At_Drought_Soil_Dry_P Parameter: Timepoint (day) Value: 13
  misc_feature: MA Experiment 20001557 PARAMETER Experiment Name: At_Drought_Soil_Dry_P Parameter: Treatment Value: Drought vs. No Drought
  misc_feature: MA Experiment ID: 20001558 Result: Up-regulated in Transcription
  misc_feature: MA Experiment 20001558 PARAMETER Experiment Name: At_Drought_Soil_Dry_P Parameter: Age (day) Value: 27
  misc_feature: MA Experiment 20001558 PARAMETER Experiment Name: At_Drought_Soil_Dry_P Parameter: Organism Value: A. thaliana
  misc_feature: MA Experiment 20001558 PARAMETER Experiment Name: At_Drought_Soil_Dry_P Parameter: Plant Line Value: WS
  misc_feature: MA Experiment 20001558 PARAMETER Experiment Name: At_Drought_Soil_Dry_P Parameter: Post Timepoint (hr) Value: 6
  misc_feature: MA Experiment 20001558 PARAMETER Experiment Name: At_Drought_Soil_Dry_P Parameter: Post-Treatment Value: Re-Water vs. No Drought
  misc_feature: MA Experiment 20001558 PARAMETER Experiment Name: At_Drought_Soil_Dry_P Parameter: Timepoint (day) Value: 13
  misc_feature: MA Experiment 20001558 PARAMETER Experiment Name: At_Drought_Soil_Dry_P Parameter: Treatment Value: Drought vs. No Drought
  misc_feature: MA Experiment ID: 20001560 Result: Up-regulated in Transcription
  misc_feature: MA Experiment 20001560 PARAMETER Experiment Name: At_Drought_Soil_Dry_P Parameter: Age (day) Value: 28
  misc_feature: MA Experiment 20001560 PARAMETER Experiment Name: At_Drought_Soil_Dry_P Parameter: Organism Value: A. thaliana
  misc_feature: MA Experiment 20001560 PARAMETER Experiment Name: At_Drought_Soil_Dry_P Parameter: Plant Line Value: WS
  misc_feature: MA Experiment 20001560 PARAMETER Experiment Name: At_Drought_Soil_Dry_P Parameter: Post Timepoint (hr) Value: None
  misc_feature: MA Experiment 20001560 PARAMETER Experiment Name: At_Drought_Soil_Dry_P Parameter: Post-Treatment Value: None
  misc_feature: MA Experiment 20001560 PARAMETER Experiment Name: At_Drought_Soil_Dry_P Parameter: Timepoint (day) Value: 14
  misc_feature: MA Experiment 20001560 PARAMETER Experiment Name: At_Drought_Soil_Dry_P Parameter: Treatment Value: Drought vs. No Drought
actttttagcattcttctgtttgtaattttatctcagagcttgcttcatgggcttttgagttttctctctgtttccaaaaaacaatggaaccggagaagaatccgaccacagtattgagtgccattacaagaccttcgtgggcgtttcttctccttgttttcaccgtcttagcgattctctctctccaaatctcttccaattcttttctccctctctggatcccgacttctcaatatgacgaccctgttacctgctccgggtttttcaatcacgacccgttccctaaccggatcgttatgtcgattaccgatttcggcggtgttggagacggaaagacgtcgaacacggccgctttccgccgcgccgtaaggcaccttgaaggttttgcggcggagggtggggcccagctcaatgtcccggagggcacgtggctttctggaagcttcaacctcaccagcaatttcacgctctttctcgaacgcggcgctctcattttgggatccaaggacctagacgaatggccgataatagagccattgccttcttatggaagagggagagagagacctggtggtagacacatcagcctcattcatggagacaatctcactaatgttgtcattacaggagaaaatgggacaattgatggacaggggaaaatgtggtgggagttatggtggaacagaacattggtgcatacgagaggccatcttattgaactcaagaactctcataatatcctcatctctaacctcactttgctcaattctcctttctggacaatccatcctgtttattgcagtaatgttgttattagaaatatgaccatccttgctccgatgaatgctcctaacaccgacggtatagatccagactcaagcaccaatgtctgcattgaggattgttacatcgaaagtggtgatgatcttgtagctgtaaagagcgggtgggatcaatatggaatggctgtggcacgtccgagttcaaacatcgtaatccgaagaatctctggtactactcgcacttgttcaggagttgggataggcagtgagatgtctggtgggattttcaacataaccgttgaagatattcacgtctgggattctgcggctgggctccgcataaaaacagataaagggagaggtgggtacatttcgaatatcacctttaataatgtgttattggagaaagtgaaagttccgattagattcagcagtggctcaaatgatcactcagacgataaatgggatccgaaagctcttccgagagtaaaagggatttacattagcaatgttgtgagtctgaattcgagaaaggcccctatgttgctcggtgttgaaggcacatcgtttcaagacgtatgcttgaggaatgttacgcttcttgggttaccgaagaccgagaaatggaaatgcaaggatgtttctggttacgcgagtgacgtttttcctctgtcatgtccacagttgttgcagaagaaaggttcaatagctcagtgttcatatagatgaggtttgagaaagttttttttttgggtaaagatagagagaggagaccatgagttcgatcaagtttttttgagtgaagattcatggtcacttacgaaaaatgttaaatcttggatttcctttttcacatttttttgttcgtgttttgaatcttgattctttttatacatacattgtgtaacgaaatatactttgaattattccataaaagattttttcttattc

SEQ ID NO: 100417 - protein, 475 aa, Arabidopsis thaliana
  peptide (1)..(475): Ceres Seq. ID no. 13605075
  misc_feature (104)..(459): Pfam Name: Glycosyl hydrolases family 28 Pfam Description: Glycosyl hydrolases family 28
  misc_feature (1)..(475): Homolog of NCBI NO: 22329119 NR Description: polygalacturonase, putative [Arabidopsis >gi|27754320|gb|AAO22613.1| putative polygalacturonase thaliana] >gi|28393881|gb|AAO42348.1| putative polygalacturonase
  misc_feature (1)..(475): Homolog of NCBI NO: 7485656 NR Description: hypothetical protein F17M5.200 - Arabidopsis >gi|4490311|emb|CAB38802.1| putative protein [Arabidopsis >gi|7270292|emb|CAB80061.1| putative protein [Arabidopsis
  misc_feature (72)..(462): Homolog of NCBI NO: 18412253 NR Description: polygalacturonase, putative [Arabidopsis >gi|11762132|gb|AAG40344.1|AF324992_1 AT3g62110 [Arabidopsis >gi|23397166|gb|AAN31866.1| unknown protein [Arabidopsis
  misc_feature (72)..(462): Homolog of NCBI NO: 11263971 NR Description: hypothetical protein T17J13.70 - Arabidopsis >gi|6899921|emb|CAB71871.1| putative protein [Arabidopsis
  misc_feature (34)..(468): Homolog of NCBI NO: 15236625 NR Description: polygalacturonase, putative [Arabidopsis thaliana]
  misc_feature (72)..(472): Homolog of NCBI NO: 40714685 NR Description: putative polygalacturonase [Oryza sativa
  misc_feature (54)..(462): Homolog of NCBI NO: 15238207 NR Description: polygalacturonase, putative [Arabidopsis thaliana]
  misc_feature (72)..(467): Homolog of NCBI NO: 34912726 NR Description: putative polygalacturonase [Oryza sativa cultivar- group)] >gi|15623906|dbj|BAB67963.1| putative
  misc_feature (73)..(462): Homolog of NCBI NO: 34897760 NR Description: ESTs AU029388(E30287),D49277(S16474) correspond a region of the predicted gene.~Similar to Arabidopsis thaliana
  misc_feature (104)..(472): Homolog of NCBI NO: 34393209 NR Description: putative polygalacturonase [Oryza sativa
MEPEKNPTTVLSAITRPSWAFLLLVFTVLAILSLQISSNSFLPLWIPTSQYDDPVTCSGFFNHDPFPNRIVMSITDFGGVGDGKTSNTAAFRRAVRHLEGFAAEGGAQLNVPEGTWLSGSFNLTSNFTLFLERGALILGSKDLDEWPIIEPLPSYGRGRERPGGRHISLIHGDNLTNVVITGENGTIDGQGKMWWELWWNRTLVHTRGHLIELKNSHNILISNLTLLNSPFWTIHPVYCSNVVIRNMTILAPMNAPNTDGIDPDSSTNVCIEDCYIESGDDLVAVKSGWDQYGMAVARPSSNIVIRRISGTTRTCSGVGIGSEMSGGIFNITVEDIHVWDSAAGLRIKTDKGRGGYISNITFNNVLLEKVKVPIRFSSGSNDHSDDKWDPKALPRVKGIYISNVVSLNSRKAPMLLGVEGTSFQDVCLRNVTLLGLPKTEKWKCKDVSGYASDVFPLSCPQLLQKKGSIAQCSYR

SEQ ID NO: 100418 - protein, 404 aa, Arabidopsis thaliana; identical to SEQ ID NO: 48503
  peptide (1)..(404): Ceres Seq. ID no. 13605076
  misc_feature (33)..(388): Pfam Name: Glycosyl hydrolases family 28 Pfam Description: Glycosyl hydrolases family 28
  misc_feature (1)..(404): Homolog of NCBI NO: 22329119 NR Description: polygalacturonase, putative [Arabidopsis >gi|27754320|gb|AAO22613.1| putative polygalacturonase thaliana] >gi|28393881|gb|AAO42348.1| putative polygalacturonase
  misc_feature (1)..(404): Homolog of NCBI NO: 7485656 NR Description: hypothetical protein F17M5.200 - Arabidopsis >gi|4490311|emb|CAB38802.1| putative protein [Arabidopsis >gi|7270292|emb|CAB80061.1| putative protein [Arabidopsis
  misc_feature (1)..(391): Homolog of NCBI NO: 18412253 NR Description: polygalacturonase, putative [Arabidopsis >gi|11762132|gb|AAG40344.1|AF324992_1 AT3g62110 [Arabidopsis >gi|23397166|gb|AAN31866.1| unknown protein [Arabidopsis
  misc_feature (1)..(391): Homolog of NCBI NO: 11263971 NR Description: hypothetical protein T17J13.70 - Arabidopsis >gi|6899921|emb|CAB71871.1| putative protein [Arabidopsis
  misc_feature (1)..(397): Homolog of NCBI NO: 15236625 NR Description: polygalacturonase, putative [Arabidopsis thaliana]
  misc_feature (1)..(401): Homolog of NCBI NO: 40714685 NR Description: putative polygalacturonase [Oryza sativa
  misc_feature (1)..(391): Homolog of NCBI NO: 15238207 NR Description: polygalacturonase, putative [Arabidopsis thaliana]
  misc_feature (1)..(396): Homolog of NCBI NO: 34912726 NR Description: putative polygalacturonase [Oryza sativa cultivar- group)] >gi|15623906|dbj|BAB67963.1| putative
  misc_feature (2)..(391): Homolog of NCBI NO: 34897760 NR Description: ESTs AU029388(E30287),D49277(S16474) correspond a region of the predicted gene.~Similar to Arabidopsis thaliana
  misc_feature (33)..(401): Homolog of NCBI NO: 34393209 NR Description: putative polygalacturonase [Oryza sativa

SEQ ID NO: 100419 - protein, 283 aa, Arabidopsis thaliana; identical to SEQ ID NO: 48504
  peptide (1)..(283): Ceres Seq. ID no. 13605077
  misc_feature (1)..(267): Pfam Name: Glycosyl hydrolases family 28 Pfam Description: Glycosyl hydrolases family 28
  misc_feature (1)..(283): Homolog of NCBI NO: 22329119 NR Description: polygalacturonase, putative [Arabidopsis >gi|27754320|gb|AAO22613.1| putative polygalacturonase thaliana] >gi|28393881|gb|AAO42348.1| putative polygalacturonase
  misc_feature (1)..(283): Homolog of NCBI NO: 7485656 NR Description: hypothetical protein F17M5.200 - Arabidopsis >gi|4490311|emb|CAB38802.1| putative protein [Arabidopsis >gi|7270292|emb|CAB80061.1| putative protein [Arabidopsis
  misc_feature (1)..(270): Homolog of NCBI NO: 18412253 NR Description: polygalacturonase, putative [Arabidopsis >gi|11762132|gb|AAG40344.1|AF324992_1 AT3g62110 [Arabidopsis >gi|23397166|gb|AAN31866.1| unknown protein [Arabidopsis
  misc_feature (1)..(270): Homolog of NCBI NO: 11263971 NR Description: hypothetical protein T17J13.70 - Arabidopsis >gi|6899921|emb|CAB71871.1| putative protein [Arabidopsis
  misc_feature (1)..(276): Homolog of NCBI NO: 15236625 NR Description: polygalacturonase, putative [Arabidopsis thaliana]
  misc_feature (1)..(280): Homolog of NCBI NO: 40714685 NR Description: putative polygalacturonase [Oryza sativa
  misc_feature (1)..(270): Homolog of NCBI NO: 15238207 NR Description: polygalacturonase, putative [Arabidopsis thaliana]
  misc_feature (1)..(275): Homolog of NCBI NO: 34912726 NR Description: putative polygalacturonase [Oryza sativa cultivar- group)] >gi|15623906|dbj|BAB67963.1| putative
  misc_feature (1)..(270): Homolog of NCBI NO: 34897760 NR Description: ESTs AU029388(E30287),D49277(S16474) correspond a region of the predicted gene.~Similar to Arabidopsis thaliana
  misc_feature (1)..(280): Homolog of NCBI NO: 34393209 NR Description: putative polygalacturonase [Oryza sativa

SEQ ID NO: 100420 - DNA, 1729 bp, Arabidopsis thaliana
  misc_feature (1)..(1729): Ceres Seq. ID no. 13605084
tgaaaggaagatgaacagcatcaagaatggcttcttcctctgcatgatttttcttctctggtgccatgtggattcaggggtttccatcgatcctttctcccatagccactctctcaacacagagtgtgtgatgaagcctccacgaagcagtgaaacgaaaggattattacaatttagccgctctctcgaagatgactctgatgaagaatggaaaattgatggaaatggattcattagagaaatggcacagagaattcagcttcaccaaggaaatatttacagcttctctgcttgggtgaaattgagagaaggaaacgacaagaaagtaggagttgtgttcaggacagaaaatggaagacttgttcatggaggtgaagttagggcaaatcaagaatgttggactttgcttaaaggtggcattgtaccagatttttcaggccctgtagatatattcttcgagagtgaaaacagaggagcaaagatctctgcacacaatgtgttgctaaaacagtttagcaaagaagaatggaaactgaaacaggaccaacttattgaaaagataaggaagagcaaagtgagatttgaagtaacttatgagaacaaaaccgcagtaaaaggcgtagtgatatcactaaaacaaaccaaatcatcttttctcttaggctgtggaatgaatttccggatcctacaaagccaagggtacagaaaatggtttgcgtcgcggttcaaaatcacttcattcactaatgaaatgaaatggtatgcaacggagaaagcacgaggtcaagagaactacacggtagccgattcaatgctgaaatttgcggaagataatgggatattggttagaggtcatacagtgttatgggacaacccaaaaatgcagcctagttgggtgaaaaatataaaagatccgaacgatgtgatgaacgtgacattgaacaggatcaactcggttatgaagagatacaaagggaagttaaccgggtgggatgtggttaacgagaatctgcattgggattactttgagaaaatgcttggtgcaaacgcttcgacaagtttctacaatctggcttttaagattgatcctgatgtgagattgtttgttaacgagtacaatacgatagaaaacactaaagagtttactgcgacgccgataaaggtgaagaagatgatggaggaaattctcgcctatccaggaaacaagaacatgaaaggagcaattggagctcagggtcactttggtccaactcagcctaacttagcttacataagatctgcattggatactttaggctcactaggtttgcctatttggcttacagaggttgatatgcctaaatgccctaatcaggcgcaatacgtggaagacattctcagggaagcttactcgcatcctgcggtgaaaggtatcataatatttggtggacctgaggtgtctggttttgacaagctgacacttgcagacaaagacttcaacaacacacaaacgggagatgtaattgataagttgctcaaggagtggcaacaaaaatcttcagagattcaaacgaatttcacagcagattctgataatgaagaggaagaggtctcattgttgcatggacattataatgtgaatgtaagccatccatggatagcaaacctatccaccagtttcagcttggaggtaactaaggagatggatcaagaccaggtgattagagtcgtaattagtgcttgaaattgc

SEQ ID NO: 100421 - protein, 573 aa, Arabidopsis thaliana
  peptide (1)..(573): Ceres Seq. ID no. 13605085
  misc_feature (209)..(505): Pfam Name: Glycosyl hydrolase family 10 Pfam Description: Glycosyl hydrolase family 10
  misc_feature (4)..(573): Homolog of NCBI NO: 22329138 NR Description: glycosyl hydrolase family 10 [Arabidopsis >gi|27754330|gb|AAO22618.1| putative glycosyl hydrolase family 10
  misc_feature (44)..(573): Homolog of NCBI NO: 25407718 NR Description: hypothetical protein AT4g33820 [imported] - thaliana >gi|7270331|emb|CAB80099.1| putative protein
  misc_feature (44)..(540): Homolog of NCBI NO: 7485608 NR Description: hypothetical protein F17I5.10 - Arabidopsis (fragment) >gi|4455150|emb|CAA19864.1| putative protein
  misc_feature (44)..(573): Homolog of NCBI NO: 15235098 NR Description: glycosyl hydrolase family 10 [Arabidopsis
  misc_feature (68)..(573): Homolog of NCBI NO: 34365757 NR Description: At2g14690 [Arabidopsis thaliana]
  misc_feature (158)..(573): Homolog of NCBI NO: 15225988 NR Description: glycosyl hydrolase family 10 [Arabidopsis
  misc_feature (68)..(153): Homolog of NCBI NO: 15225988 NR Description: glycosyl hydrolase family 10 [Arabidopsis
  misc_feature (8)..(571): Homolog of NCBI NO: 23429644 NR Description: endoxylanase [Carica papaya]
  misc_feature (81)..(565): Homolog of NCBI NO: 7485619 NR Description: hypothetical protein F17I5.30 - Arabidopsis >gi|3297808|emb|CAA19866.1| putative protein [Arabidopsis >gi|7270333|emb|CAB80101.1| putative protein [Arabidopsis
  misc_feature (81)..(565): Homolog of NCBI NO: 30689830 NR Description: glycosyl hydrolase family 10 [Arabidopsis
ERKMNSIKNGFFLCMIFLLWCHVDSGVSIDPFSHSHSLNTECVMKPPRSSETKGLLQFSRSLEDDSDEEWKIDGNGFIREMAQRIQLHQGNIYSFSAWVKLREGNDKKVGVVFRTENGRLVHGGEVRANQECWTLLKGGIVPDFSGPVDIFFESENRGAKISAHNVLLKQFSKEEWKLKQDQLIEKIRKSKVRFEVTYENKTAVKGVVISLKQTKSSFLLGCGMNFRILQSQGYRKWFASRFKITSFTNEMKWYATEKARGQENYTVADSMLKFAEDNGILVRGHTVLWDNPKMQPSWVKNIKDPNDVMNVTLNRINSVMKRYKGKLTGWDVVNENLHWDYFEKMLGANASTSFYNLAFKIDPDVRLFVNEYNTIENTKEFTATPIKVKKMMEEILAYPGNKNMKGAIGAQGHFGPTQPNLAYIRSALDTLGSLGLPIWLTEVDMPKCPNQAQYVEDILREAYSHPAVKGIIIFGGPEVSGFDKLTLADKDFNNTQTGDVIDKLLKEWQQKSSEIQTNFTADSDNEEEEVSLLHGHYNVNVSHPWIANLSTSFSLEVTKEMDQDQVIRVVISA

SEQ ID NO: 100422 - protein, 570 aa, Arabidopsis thaliana
  peptide (1)..(570): Ceres Seq. ID no. 13605086
  misc_feature (206)..(502): Pfam Name: Glycosyl hydrolase family 10 Pfam Description: Glycosyl hydrolase family 10
  misc_feature (1)..(570): Homolog of NCBI NO: 22329138 NR Description: glycosyl hydrolase family 10 [Arabidopsis >gi|27754330|gb|AAO22618.1| putative glycosyl hydrolase family 10
  misc_feature (41)..(570): Homolog of NCBI NO: 25407718 NR Description: hypothetical protein AT4g33820 [imported] - thaliana >gi|7270331|emb|CAB80099.1| putative protein
  misc_feature (41)..(537): Homolog of NCBI NO: 7485608 NR Description: hypothetical protein F17I5.10 - Arabidopsis (fragment) >gi|4455150|emb|CAA19864.1| putative protein
  misc_feature (41)..(570): Homolog of NCBI NO: 15235098 NR Description: glycosyl hydrolase family 10 [Arabidopsis
  misc_feature (65)..(570): Homolog of NCBI NO: 34365757 NR Description: At2g14690 [Arabidopsis thaliana]
  misc_feature (155)..(570): Homolog of NCBI NO: 15225988 NR Description: glycosyl hydrolase family 10 [Arabidopsis
  misc_feature (65)..(150): Homolog of NCBI NO: 15225988 NR Description: glycosyl hydrolase family 10 [Arabidopsis
  misc_feature (5)..(568): Homolog of NCBI NO: 23429644 NR Description: endoxylanase [Carica papaya]
  misc_feature (78)..(562): Homolog of NCBI NO: 7485619 NR Description: hypothetical protein F17I5.30 - Arabidopsis >gi|3297808|emb|CAA19866.1| putative protein [Arabidopsis >gi|7270333|emb|CAB80101.1| putative protein [Arabidopsis
  misc_feature (78)..(562): Homolog of NCBI NO: 30689830 NR Description: glycosyl hydrolase family 10 [Arabidopsis
MNSIKNGFFLCMIFLLWCHVDSGVSIDPFSHSHSLNTECVMKPPRSSETKGLLQFSRSLEDDSDEEWKIDGNGFIREMAQRIQLHQGNIYSFSAWVKLREGNDKKVGVVFRTENGRLVHGGEVRANQECWTLLKGGIVPDFSGPVDIFFESENRGAKISAHNVLLKQFSKEEWKLKQDQLIEKIRKSKVRFEVTYENKTAVKGVVISLKQTKSSFLLGCGMNFRILQSQGYRKWFASRFKITSFTNEMKWYATEKARGQENYTVADSMLKFAEDNGILVRGHTVLWDNPKMQPSWVKNIKDPNDVMNVTLNRINSVMKRYKGKLTGWDVVNENLHWDYFEKMLGANASTSFYNLAFKIDPDVRLFVNEYNTIENTKEFTATPIKVKKMMEEILAYPGNKNMKGAIGAQGHFGPTQPNLAYIRSALDTLGSLGLPIWLTEVDMPKCPNQAQYVEDILREAYSHPAVKGIIIFGGPEVSGFDKLTLADKDFNNTQTGDVIDKLLKEWQQKSSEIQTNFTADSDNEEEEVSLLHGHYNVNVSHPWIANLSTSFSLEVTKEMDQDQVIRVVISA

SEQ ID NO: 100423 - protein, 559 aa, Arabidopsis thaliana
  peptide (1)..(559): Ceres Seq. ID no. 13605087
  misc_feature (195)..(491): Pfam Name: Glycosyl hydrolase family 10 Pfam Description: Glycosyl hydrolase family 10
  misc_feature (1)..(559): Homolog of NCBI NO: 22329138 NR Description: glycosyl hydrolase family 10 [Arabidopsis >gi|27754330|gb|AAO22618.1| putative glycosyl hydrolase family 10
  misc_feature (30)..(559): Homolog of NCBI NO: 25407718 NR Description: hypothetical protein AT4g33820 [imported] - thaliana >gi|7270331|emb|CAB80099.1| putative protein
  misc_feature (30)..(526): Homolog of NCBI NO: 7485608 NR Description: hypothetical protein F17I5.10 - Arabidopsis (fragment) >gi|4455150|emb|CAA19864.1| putative protein
  misc_feature (30)..(559): Homolog of NCBI NO: 15235098 NR Description: glycosyl hydrolase family 10 [Arabidopsis
  misc_feature (54)..(559): Homolog of NCBI NO: 34365757 NR Description: At2g14690 [Arabidopsis thaliana]
  misc_feature (144)..(559): Homolog of NCBI NO: 15225988 NR Description: glycosyl hydrolase family 10 [Arabidopsis
  misc_feature (54)..(139): Homolog of NCBI NO: 15225988 NR Description: glycosyl hydrolase family 10 [Arabidopsis
  misc_feature (1)..(557): Homolog of NCBI NO: 23429644 NR Description: endoxylanase [Carica papaya]
  misc_feature (67)..(551): Homolog of NCBI NO: 7485619 NR Description: hypothetical protein F17I5.30 - Arabidopsis >gi|3297808|emb|CAA19866.1| putative protein [Arabidopsis >gi|7270333|emb|CAB80101.1| putative protein [Arabidopsis
  misc_feature (67)..(551): Homolog of NCBI NO: 30689830 NR Description: glycosyl hydrolase family 10 [Arabidopsis
MIFLLWCHVDSGVSIDPFSHSHSLNTECVMKPPRSSETKGLLQFSRSLEDDSDEEWKIDGNGFIREMAQRIQLHQGNIYSFSAWVKLREGNDKKVGVVFRTENGRLVHGGEVRANQECWTLLKGGIVPDFSGPVDIFFESENRGAKISAHNVLLKQFSKEEWKLKQDQLIEKIRKSKVRFEVTYENKTAVKGVVISLKQTKSSFLLGCGMNFRILQSQGYRKWFASRFKITSFTNEMKWYATEKARGQENYTVADSMLKFAEDNGILVRGHTVLWDNPKMQPSWVKNIKDPNDVMNVTLNRINSVMKRYKGKLTGWDVVNENLHWDYFEKMLGANASTSFYNLAFKIDPDVRLFVNEYNTIENTKEFTATPIKVKKMMEEILAYPGNKNMKGAIGAQGHFGPTQPNLAYIRSALDTLGSLGLPIWLTEVDMPKCPNQAQYVEDILREAYSHPAVKGIIIFGGPEVSGFDKLTLADKDFNNTQTGDVIDKLLKEWQQKSSEIQTNFTADSDNEEEEVSLLHGHYNVNVSHPWIANLSTSFSLEVTKEMDQDQVIRVVISA

SEQ ID NO: 100424 - DNA, 1405 bp, Arabidopsis thaliana
  misc_feature (1)..(1405): Ceres Seq. ID no. 13605096
  misc_feature: MA Experiment ID: 20000440 Result: Up-regulated in Transcription
  misc_feature: MA Experiment 20000440 PARAMETER Experiment Name: At_Closed-Flower__Sub_P Parameter: Tissue Value: Closed Flower vs. Whole Plant
atgggttcatattttggaatttctacaattttcgtgatatgtttgctgggattttcagccaatgctcatgaggtgcttagacttacgtcttctccaggttctgatattacgcaggcgcttctgagagcattcacaacggcatgccaatctccgacaccgaggaaggtggtgatcccaaaaggacagttcaagcttggtgagatcatgatgtcgggtccatgcaaatctccagtcgagatcaccttgctaggcactgtcctcgctgacggaaactcgatccatggaaaagaaaaatgggtcgtgttccaaagaatggatgggttcaggttgaacggaggtggaactttcgacggtgaaggtaacgcagcttggagggtcaataactgtcacaagactttcgagtgcaagaaacttcccatcagtataaggtttgatttcgtgacgaacgctgagatcagagacatatcctcaatcgatgccaagaactttcacatcaacgtgattggcgccaagaacatgacctttgacaacgtcaagatcatggctccagcagagagccccaacactgacgggatccacttgggaagaagtgtcggggtctccattatcaactctaggatctccaccggagatgactgtgtctctgtcggggacgggatggtgaatcttctagttaagaacgtcgtgtgtggtcctggacacgggatcagtgttggaagccttggaaggtacggacatgaacaggacgtcagcggcattagggtcatcaattgcaccctccaggagactgacaatggcctcaggatcaagacttggccctctgcagcttgctccaccactgcctccaatattcattttgagaatatcatccttagaaacgttagtaacccaatcctcatcgaccaagagtactgtccttggaaccagtgcaacaagcagaaatcatcatccattaagctggcaaacataagcttcaggaggattagagggacatcagggaacaaagacgcagtgaagctattgtgcagcaagggatatccgtgtgagaacgttcaggttggagacattaatattcagtacactggagccgatggtccagccaccttcatgtgctcaaacgtaaggcctaagctagttggaactcagttcccaaaggcttgtaacacaccacccgtgctgacccaacctaagtaaaatgtagaaagttctcataacatttaggaatttctcatccattttttcttcaatcttagtttttcccaatgtcacacaagggagatttcttttatttaaaaactgtaaaagaattttgtttcactttttatttgtttgatgccaacacaaatacatagatgtgtgtgcgcatatatgaatgcaataaaactaaaaagatgcaggttatttt

SEQ ID NO: 100425 - protein, 397 aa, Arabidopsis thaliana
  peptide (1)..(397): Ceres Seq. ID no. 13605097
  misc_feature (48)..(387): Pfam Name: Glycosyl hydrolases family 28 Pfam Description: Glycosyl hydrolases family 28
  misc_feature (1)..(397): Homolog of NCBI NO: 15231876 NR Description: polygalacturonase, putative [Arabidopsis >gi|6648195|gb|AAF21193.1|AC013483_17 putative polygalacturonase
  misc_feature (1)..(390): Homolog of NCBI NO: 15231874 NR Description: polygalacturonase, putative [Arabidopsis >gi|6648194|gb|AAF21192.1|AC013483_16 polygalacturonase (PGA3) thaliana] >gi|17529010|gb|AAL38715.1| putative
  misc_feature (1)..(390): Homolog of NCBI NO: 11263969 NR Description: polygalacturonase (EC 3.2.1.15) [imported] - thaliana >gi|2982583|emb|CAA05892.1| polygalacturonase thaliana] >gi|3152948|emb|CAA06610.1| polygalacturonase
  misc_feature (1)..(391): Homolog of NCBI NO: 15231878 NR Description: exopolygalacturonase [Arabidopsis thaliana]
  misc_feature (1)..(397): Homolog of NCBI NO: 15238902 NR Description: polygalacturonase, putative [Arabidopsis >gi|8777404|dbj|BAA96994.1| polygalacturonase [Arabidopsis >gi|26452386|dbj|BAC43278.1| putative polygalacturonase
  misc_feature (1)..(396): Homolog of NCBI NO: 21668071 NR Description: putative pollen polygalacturonase [Brassica
  misc_feature (1)..(396): Homolog of NCBI NO: 30984029 NR Description: polygalacturonase [Brassica napus]
  misc_feature (1)..(396): Homolog of NCBI NO: 548490 NR Description: Polygalacturonase precursor (PG) (Pectinase)
  misc_feature (173)..(397): Homolog of NCBI NO: 26450968 NR Description: putative polygalacturonase [Arabidopsis thaliana]
  misc_feature (7)..(387): Homolog of NCBI NO: 6714526 NR Description: polygalacturonase [Salix gilgiana]
MGSYFGISTIFVICLLGFSANAHEVLRLTSSPGSDITQALLRAFTTACQSPTPRKVVIPKGQFKLGEIMMSGPCKSPVEITLLGTVLADGNSIHGKEKWVVFQRMDGFRLNGGGTFDGEGNAAWRVNNCHKTFECKKLPISIRFDFVTNAEIRDISSIDAKNFHINVIGAKNMTFDNVKIMAPAESPNTDGIHLGRSVGVSIINSRISTGDDCVSVGDGMVNLLVKNVVCGPGHGISVGSLGRYGHEQDVSGIRVINCTLQETDNGLRIKTWPSAACSTTASNIHFENIILRNVSNPILIDQEYCPWNQCNKQKSSSIKLANISFRRIRGTSGNKDAVKLLCSKGYPCENVQVGDINIQYTGADGPATFMCSNVRPKLVGTQFPKACNTPPVLTQPK

SEQ ID NO: 100426 - protein, 329 aa, Arabidopsis thaliana
  peptide (1)..(329): Ceres Seq. ID no. 13605098
  misc_feature (1)..(319): Pfam Name: Glycosyl hydrolases family 28 Pfam Description: Glycosyl hydrolases family 28
  misc_feature (1)..(329): Homolog of NCBI NO: 15231876 NR Description: polygalacturonase, putative [Arabidopsis >gi|6648195|gb|AAF21193.1|AC013483_17 putative polygalacturonase
  misc_feature (1)..(322): Homolog of NCBI NO: 15231874 NR Description: polygalacturonase, putative [Arabidopsis >gi|6648194|gb|AAF21192.1|AC013483_16 polygalacturonase (PGA3) thaliana] >gi|17529010|gb|AAL38715.1| putative
  misc_feature (1)..(322): Homolog of NCBI NO: 11263969 NR Description: polygalacturonase (EC 3.2.1.15) [imported] - thaliana >gi|2982583|emb|CAA05892.1| polygalacturonase thaliana] >gi|3152948|emb|CAA06610.1| polygalacturonase
  misc_feature (1)..(323): Homolog of NCBI NO: 15231878 NR Description: exopolygalacturonase [Arabidopsis thaliana]
  misc_feature (1)..(329): Homolog of NCBI NO: 15238902 NR Description: polygalacturonase, putative [Arabidopsis >gi|8777404|dbj|BAA96994.1| polygalacturonase [Arabidopsis >gi|26452386|dbj|BAC43278.1| putative polygalacturonase
  misc_feature (1)..(328): Homolog of NCBI NO: 21668071 NR Description: putative pollen polygalacturonase [Brassica
  misc_feature (1)..(328): Homolog of NCBI NO: 30984029 NR Description: polygalacturonase [Brassica napus]
  misc_feature (1)..(328): Homolog of NCBI NO: 548490 NR Description: Polygalacturonase precursor (PG) (Pectinase)
  misc_feature (105)..(329): Homolog of NCBI NO: 26450968 NR Description: putative polygalacturonase [Arabidopsis thaliana]
  misc_feature (1)..(319): Homolog of NCBI NO: 6714526 NR Description: polygalacturonase [Salix gilgiana]
MMSGPCKSPVEITLLGTVLADGNSIHGKEKWVVFQRMDGFRLNGGGTFDGEGNAAWRVNNCHKTFECKKLPISIRFDFVTNAEIRDISSIDAKNFHINVIGAKNMTFDNVKIMAPAESPNTDGIHLGRSVGVSIINSRISTGDDCVSVGDGMVNLLVKNVVCGPGHGISVGSLGRYGHEQDVSGIRVINCTLQETDNGLRIKTWPSAACSTTASNIHFENIILRNVSNPILIDQEYCPWNQCNKQKSSSIKLANISFRRIRGTSGNKDAVKLLCSKGYPCENVQVGDINIQYTGADGPATFMCSNVRPKLVGTQFPKACNTPPVLTQPK

SEQ ID NO: 100427 - protein, 328 aa, Arabidopsis thaliana
  peptide (1)..(328): Ceres Seq. ID no. 13605099
  misc_feature (1)..(318): Pfam Name: Glycosyl hydrolases family 28 Pfam Description: Glycosyl hydrolases family 28
  misc_feature (1)..(328): Homolog of NCBI NO: 15231876 NR Description: polygalacturonase, putative [Arabidopsis >gi|6648195|gb|AAF21193.1|AC013483_17 putative polygalacturonase
  misc_feature (1)..(321): Homolog of NCBI NO: 15231874 NR Description: polygalacturonase, putative [Arabidopsis >gi|6648194|gb|AAF21192.1|AC013483_16 polygalacturonase (PGA3) thaliana] >gi|17529010|gb|AAL38715.1| putative
  misc_feature (1)..(321): Homolog of NCBI NO: 11263969 NR Description: polygalacturonase (EC 3.2.1.15) [imported] - thaliana >gi|2982583|emb|CAA05892.1| polygalacturonase thaliana] >gi|3152948|emb|CAA06610.1| polygalacturonase
  misc_feature (1)..(322): Homolog of NCBI NO: 15231878 NR Description: exopolygalacturonase [Arabidopsis thaliana]
  misc_feature (1)..(328): Homolog of NCBI NO: 15238902 NR Description: polygalacturonase, putative [Arabidopsis >gi|8777404|dbj|BAA96994.1| polygalacturonase [Arabidopsis >gi|26452386|dbj|BAC43278.1| putative polygalacturonase
  misc_feature (1)..(327): Homolog of NCBI NO: 21668071 NR Description: putative pollen polygalacturonase [Brassica
  misc_feature (1)..(327): Homolog of NCBI NO: 30984029 NR Description: polygalacturonase [Brassica napus]
  misc_feature (1)..(327): Homolog of NCBI NO: 548490 NR Description: Polygalacturonase precursor (PG) (Pectinase)
  misc_feature (104)..(328): Homolog of NCBI NO: 26450968 NR Description: putative polygalacturonase [Arabidopsis thaliana]
  misc_feature (1)..(318): Homolog of NCBI NO: 6714526 NR Description: polygalacturonase [Salix gilgiana]
MSGPCKSPVEITLLGTVLADGNSIHGKEKWVVFQRMDGFRLNGGGTFDGEGNAAWRVNNCHKTFECKKLPISIRFDFVTNAEIRDISSIDAKNFHINVIGAKNMTFDNVKIMAPAESPNTDGIHLGRSVGVSIINSRISTGDDCVSVGDGMVNLLVKNVVCGPGHGISVGSLGRYGHEQDVSGIRVINCTLQETDNGLRIKTWPSAACSTTASNIHFENIILRNVSNPILIDQEYCPWNQCNKQKSSSIKLANISFRRIRGTSGNKDAVKLLCSKGYPCENVQVGDINIQYTGADGPATFMCSNVRPKLVGTQFPKACNTPPVLTQPK

SEQ ID NO: 100428 - DNA, 1353 bp, Arabidopsis thaliana
  misc_feature (1)..(1353): Ceres Seq. ID no. 13605104
  misc_feature: MA Experiment ID: 108461 Result: Down-regulated in Transcription
  misc_feature: MA Experiment 108461 PARAMETER Experiment Name: At_Germinating_Seeds_cDNA_P Parameter: Age (day) Value: 1 vs. 0
  misc_feature: MA Experiment 108461 PARAMETER Experiment Name: At_Germinating_Seeds_cDNA_P Parameter: Tissue Value: Germinating Seeds
  misc_feature: MA Experiment ID: 108462 Result: Down-regulated in Transcription
  misc_feature: MA Experiment 108462 PARAMETER Experiment Name: At_Germinating_Seeds_cDNA_P Parameter: Age (day) Value: 2 vs. 0
  misc_feature: MA Experiment 108462 PARAMETER Experiment Name: At_Germinating_Seeds_cDNA_P Parameter: Tissue Value: Germinating Seeds
  misc_feature: MA Experiment ID: 108463 Result: Down-regulated in Transcription
  misc_feature: MA Experiment 108463 PARAMETER Experiment Name: At_Germinating_Seeds_cDNA_P Parameter: Age (day) Value: 3 vs. 0
  misc_feature: MA Experiment 108463 PARAMETER Experiment Name: At_Germinating_Seeds_cDNA_P Parameter: Tissue Value: Germinating Seeds
  misc_feature: MA Experiment ID: 108464 Result: Down-regulated in Transcription
  misc_feature: MA Experiment 108464 PARAMETER Experiment Name: At_Germinating_Seeds_cDNA_P Parameter: Age (day) Value: 4 vs. 0
  misc_feature: MA Experiment 108464 PARAMETER Experiment Name: At_Germinating_Seeds_cDNA_P Parameter: Tissue Value: Germinating Seeds
  misc_feature: MA Experiment ID: 108569 Result: Up-regulated in Transcription
  misc_feature: MA Experiment 108569 PARAMETER Experiment Name: At_0.001%_MeJA__cDNA_P Parameter: Timepoint (hr) Value: 6
  misc_feature: MA Experiment 108569 PARAMETER Experiment Name: At_0.001%_MeJA__cDNA_P Parameter: Tissue Value: Aerial
  misc_feature: MA Experiment 108569 PARAMETER Experiment Name: At_0.001%_MeJA__cDNA_P Parameter: Treatment Value: 0.001% MeJA vs. No Treatment
  misc_feature: MA Experiment ID: 20000112 Result: Down-regulated in Transcription
  misc_feature: MA Experiment 20000112 PARAMETER Experiment Name: At_42deg_Heat_cDNA_P Parameter: Temperature (deg C) Value: 42 vs. 22
  misc_feature: MA Experiment 20000112 PARAMETER Experiment Name: At_42deg_Heat_cDNA_P Parameter: Timepoint (hr) Value: 2
  misc_feature: MA Experiment 20000112 PARAMETER Experiment Name: At_42deg_Heat_cDNA_P Parameter: Tissue Value: Aerial
  misc_feature: MA Experiment ID: 20000113 Result: Down-regulated in Transcription
  misc_feature: MA Experiment 20000113 PARAMETER Experiment Name: At_42deg_Heat_cDNA_P Parameter: Temperature (deg C) Value: 42 vs. 22
  misc_feature: MA Experiment 20000113 PARAMETER Experiment Name: At_42deg_Heat_cDNA_P Parameter: Timepoint (hr) Value: 8
  misc_feature: MA Experiment 20000113 PARAMETER Experiment Name: At_42deg_Heat_cDNA_P Parameter: Tissue Value: Aerial
aaagatcaggtttcgatttcaccaaaaaccaaacactgtgtcttccatcctaaagattgtaaagggaaaccgttttcgattttcagagaagatcacacatctttcgtcccttcactgccatacgtgtcgataaagatggcggctatggcggcgaagcttcagttatcggcgaaatctgatcaaagcagtgtgcgattaccgagagtgatcaacctctcccgcgatccaacgactagagtctcgtttccgcgaaatggatcagtttgttccctccacaccaatttctcttctccacatctcgcgaaaccttgcgccggaggtggtggtggtggaagcaccggtaataacggcggcggaagcggaagcggaggaggaggtggtggttttggaggttcagggggtgaagcaagtgaagaatcatctccatggggaccaatagggttattcatccaaggatggagatcaagagttgcagctgatcctcagttcccttttaaggtactaatggaagagatcgtaggacttagcgcttgtgttctcggtgacatggcttcacgacctaatttcggattaaacgagctagatttcgtcttctccacgctcgttgtaggttcgattctcaatttcgtactcatgtacatgttagctcctactgcagcaactcttggctcctctcagactttgcctggaatctttagaaactgtccatcaagccatatgtttgaacagggtagcttcaccgttatgaaccgtttcgggactcttgtgtacaaaggaatggtttttgctagtgtaggattagctgcaggtcttgtaggtactgccatttctaatgggttgattatgctgaggaagaagatggacccgagcttcgaaacgccaaacaaaccgccaccgactgtgcttaattctttaacttgggcaactcatatgggagtgagtgcgaatgcaaggtaccaaacgttgaatgggattgagttcttgctggcaaaggtgttgcccccattggtgtttaagacaagtgtgatagttttgaggtgtgcaaacaatgttgctggaggaatgtcgtttgttttgttggcaaggatgacgggatcacagtcggtggaggagaagacagagatttcagagaaagagaaggatgattgaatctcatcctagtctttcaaggtttttgttcctgtgtgtttttcgccagttcataggcttcttgagttgaaaccatttgtgttggaataaataagatgaatcccttcttaggtccatcctattggatgtcattgttaggccaagtttgttgttttctttttcagttaccatgaatataataactcaataaaaaggttataaatt

SEQ ID NO: 100429 - protein, 382 aa, Arabidopsis thaliana
  peptide (1)..(382): Ceres Seq. ID no. 13605105
  misc_feature (47)..(155): Pfam Name: Keratin Pfam Description: Keratin
  misc_feature (46)..(382): Homolog of NCBI NO: 15231951 NR Description: glycine-rich protein [Arabidopsis thaliana]
  misc_feature (46)..(382): Homolog of NCBI NO: 15231950 NR Description: expressed protein [Arabidopsis thaliana]
  misc_feature (37)..(381): Homolog of NCBI NO: 34909204 NR Description: P0425G02.25 [Oryza sativa (japonica
  misc_feature (144)..(367): Homolog of NCBI NO: 30687286 NR Description: expressed protein [Arabidopsis thaliana]
  misc_feature (106)..(168): Homolog of NCBI NO: 30687286 NR Description: expressed protein [Arabidopsis thaliana]
  misc_feature (139)..(367): Homolog of NCBI NO: 15242979 NR Description: expressed protein [Arabidopsis thaliana] gb|AAF31706.1~gene_id:K8E10.2~similar to unknown protein
  misc_feature (107)..(141): Homolog of NCBI NO: 15242979 NR Description: expressed protein [Arabidopsis thaliana] gb|AAF31706.1~gene_id:K8E10.2~similar to unknown protein
  misc_feature (139)..(367): Homolog of NCBI NO: 6934300 NR Description: unknown [Euphorbia esula]
  misc_feature (139)..(367): Homolog of NCBI NO: 32489853 NR Description: OSJNBb0065J09.13 [Oryza sativa (japonica
  misc_feature (152)..(367): Homolog of NCBI NO: 18416870 NR Description: expressed protein [Arabidopsis thaliana] putative protein [Arabidopsis thaliana] unknown protein [Arabidopsis thaliana]
KDQVSISPKTKHCVFHPKDCKGKPFSIFREDHTSFVPSLPYVSIKMAAMAAKLQLSAKSDQSSVRLPRVINLSRDPTTRVSFPRNGSVCSLHTNFSSPHLAKPCAGGGGGGSTGNNGGGSGSGGGGGGFGGSGGEASEESSPWGPIGLFIQGWRSRVAADPQFPFKVLMEEIVGLSACVLGDMASRPNFGLNELDFVFSTLVVGSILNFVLMYMLAPTAATLGSSQTLPGIFRNCPSSHMFEQGSFTVMNRFGTLVYKGMVFASVGLAAGLVGTAISNGLIMLRKKMDPSFETPNKPPPTVLNSLTWATHMGVSANARYQTLNGIEFLLAKVLPPLVFKTSVIVLRCANNVAGGMSFVLLARMTGSQSVEEKTEISEKEKDD

SEQ ID NO: 100430 - protein, 337 aa, Arabidopsis thaliana
  peptide (1)..(337): Ceres Seq. ID no. 13605106
  misc_feature (2)..(110): Pfam Name: Keratin Pfam Description: Keratin
  misc_feature (1)..(337): Homolog of NCBI NO: 15231951 NR Description: glycine-rich protein [Arabidopsis thaliana]
  misc_feature (1)..(337): Homolog of NCBI NO: 15231950 NR Description: expressed protein [Arabidopsis thaliana]
  misc_feature (1)..(336): Homolog of NCBI NO: 34909204 NR Description: P0425G02.25 [Oryza sativa (japonica
  misc_feature (99)..(322): Homolog of NCBI NO: 30687286 NR Description: expressed protein [Arabidopsis thaliana]
  misc_feature (61)..(123): Homolog of NCBI NO: 30687286 NR Description: expressed protein [Arabidopsis thaliana]
  misc_feature (94)..(322): Homolog of NCBI NO: 15242979 NR Description: expressed protein [Arabidopsis thaliana] gb|AAF31706.1~gene_id:K8E10.2~similar to unknown protein
  misc_feature (62)..(96): Homolog of NCBI NO: 15242979 NR Description: expressed protein [Arabidopsis thaliana] gb|AAF31706.1~gene_id:K8E10.2~similar to unknown protein
  misc_feature (94)..(322): Homolog of NCBI NO: 6934300 NR Description: unknown [Euphorbia esula]
  misc_feature (94)..(322): Homolog of NCBI NO: 32489853 NR Description: OSJNBb0065J09.13 [Oryza sativa (japonica
  misc_feature (107)..(322): Homolog of NCBI NO: 18416870 NR Description: expressed protein [Arabidopsis thaliana] putative protein [Arabidopsis thaliana] unknown protein [Arabidopsis thaliana]
MAAMAAKLQLSAKSDQSSVRLPRVINLSRDPTTRVSFPRNGSVCSLHTNFSSPHLAKPCAGGGGGGSTGNNGGGSGSGGGGGGFGGSGGEASEESSPWGPIGLFIQGWRSRVAADPQFPFKVLMEEIVGLSACVLGDMASRPNFGLNELDFVFSTLVVGSILNFVLMYMLAPTAATLGSSQTLPGIFRNCPSSHMFEQGSFTVMNRFGTLVYKGMVFASVGLAAGLVGTAISNGLIMLRKKMDPSFETPNKPPPTVLNSLTWATHMGVSANARYQTLNGIEFLLAKVLPPLVFKTSVIVLRCANNVAGGMSFVLLARMTGSQSVEEKTEISEKEKDD

SEQ ID NO: 100431 - protein, 334 aa, Arabidopsis thaliana
  peptide (1)..(334): Ceres Seq. ID no. 13605107
  misc_feature (1)..(107): Pfam Name: Keratin Pfam Description: Keratin
  misc_feature (1)..(334): Homolog of NCBI NO: 15231951 NR Description: glycine-rich protein [Arabidopsis thaliana]
  misc_feature (1)..(334): Homolog of NCBI NO: 15231950 NR Description: expressed protein [Arabidopsis thaliana]
  misc_feature (1)..(333): Homolog of NCBI NO: 34909204 NR Description: P0425G02.25 [Oryza sativa (japonica
  misc_feature (96)..(319): Homolog of NCBI NO: 30687286 NR Description: expressed protein [Arabidopsis thaliana]
  misc_feature (58)..(120): Homolog of NCBI NO: 30687286 NR Description: expressed protein [Arabidopsis thaliana]
  misc_feature (91)..(319): Homolog of NCBI NO: 15242979 NR Description: expressed protein [Arabidopsis thaliana] gb|AAF31706.1~gene_id:K8E10.2~similar to unknown protein
  misc_feature (59)..(93): Homolog of NCBI NO: 15242979 NR Description: expressed protein [Arabidopsis thaliana] gb|AAF31706.1~gene_id:K8E10.2~similar to unknown protein
  misc_feature (91)..(319): Homolog of NCBI NO: 6934300 NR Description: unknown [Euphorbia esula]
  misc_feature (91)..(319): Homolog of NCBI NO: 32489853 NR Description: OSJNBb0065J09.13 [Oryza sativa (japonica
  misc_feature (104)..(319): Homolog of NCBI NO: 18416870 NR Description: expressed protein [Arabidopsis thaliana] putative protein [Arabidopsis thaliana] unknown protein [Arabidopsis thaliana]
MAAKLQLSAKSDQSSVRLPRVINLSRDPTTRVSFPRNGSVCSLHTNFSSPHLAKPCAGGGGGGSTGNNGGGSGSGGGGGGFGGSGGEASEESSPWGPIGLFIQGWRSRVAADPQFPFKVLMEEIVGLSACVLGDMASRPNFGLNELDFVFSTLVVGSILNFVLMYMLAPTAATLGSSQTLPGIFRNCPSSHMFEQGSFTVMNRFGTLVYKGMVFASVGLAAGLVGTAISNGLIMLRKKMDPSFETPNKPPPTVLNSLTWATHMGVSANARYQTLNGIEFLLAKVLPPLVFKTSVIVLRCANNVAGGMSFVLLARMTGSQSVEEKTEISEKEKDD

SEQ ID NO: 100432 - DNA, 1682 bp, Arabidopsis thaliana
  misc_feature (1)..(1682): Ceres Seq. ID no. 13605108
  misc_feature: MA Experiment ID: 20000436 Result: Up-regulated in Transcription
  misc_feature: MA Experiment 20000436 PARAMETER Experiment Name: At_Drought_P Parameter: Age (day) Value: 7
  misc_feature: MA Experiment 20000436 PARAMETER Experiment Name: At_Drought_P Parameter: Organism Value: A. thaliana
  misc_feature: MA Experiment 20000436 PARAMETER Experiment Name: At_Drought_P Parameter: Plant Line Value: WS
  misc_feature: MA Experiment 20000436 PARAMETER Experiment Name: At_Drought_P Parameter: Timepoint (hr) Value: 12
  misc_feature: MA Experiment 20000436 PARAMETER Experiment Name: At_Drought_P Parameter: Tissue Value: Whole Plant
  misc_feature: MA Experiment 20000436 PARAMETER Experiment Name: At_Drought_P Parameter: Treatment Value: Drought vs. No Drought
  misc_feature: MA Experiment ID: 20000437 Result: Up-regulated in Transcription
  misc_feature: MA Experiment 20000437 PARAMETER Experiment Name: At_Drought_P Parameter: Age (day) Value: 8
  misc_feature: MA Experiment 20000437 PARAMETER Experiment Name: At_Drought_P Parameter: Organism Value: A. thaliana
  misc_feature: MA Experiment 20000437 PARAMETER Experiment Name: At_Drought_P Parameter: Plant Line Value: WS
  misc_feature: MA Experiment 20000437 PARAMETER Experiment Name: At_Drought_P Parameter: Timepoint (hr) Value: 24
  misc_feature: MA Experiment 20000437 PARAMETER Experiment Name: At_Drought_P Parameter: Tissue Value: Whole Plant
  misc_feature: MA Experiment 20000437 PARAMETER Experiment Name: At_Drought_P Parameter: Treatment Value: Drought vs. No Drought
  misc_feature: MA Experiment ID: 20000453 Result: Up-regulated in Transcription
  misc_feature: MA Experiment 20000453 PARAMETER Experiment Name: At_100uM_ABA_P Parameter: Age (day) Value: 15
  misc_feature: MA Experiment 20000453 PARAMETER Experiment Name: At_100uM_ABA_P Parameter: Organism Value: A. thaliana
  misc_feature: MA Experiment 20000453 PARAMETER Experiment Name: At_100uM_ABA_P Parameter: Plant Line Value: WS
  misc_feature: MA Experiment 20000453 PARAMETER Experiment Name: At_100uM_ABA_P Parameter: Timepoint (hr) Value: 24
  misc_feature: MA Experiment 20000453 PARAMETER Experiment Name: At_100uM_ABA_P Parameter: Tissue Value: Aerial
  misc_feature: MA Experiment 20000453 PARAMETER Experiment Name: At_100uM_ABA_P Parameter: Treatment Value: 100uM ABA vs. No Treatment
  misc_feature: MA Experiment ID: 20000455 Result: Up-regulated in Transcription
  misc_feature: MA Experiment 20000455 PARAMETER Experiment Name: At_100uM_ABA_P Parameter: Age (day) Value: 16
  misc_feature: MA Experiment 20000455 PARAMETER Experiment Name: At_100uM_ABA_P Parameter: Organism Value: A. thaliana
  misc_feature: MA Experiment 20000455 PARAMETER Experiment Name: At_100uM_ABA_P Parameter: Plant Line Value: WS
  misc_feature: MA Experiment 20000455 PARAMETER Experiment Name: At_100uM_ABA_P Parameter: Timepoint (hr) Value: 48
  misc_feature: MA Experiment 20000455 PARAMETER Experiment Name: At_100uM_ABA_P Parameter: Tissue Value: Aerial
  misc_feature: MA Experiment 20000455 PARAMETER Experiment Name: At_100uM_ABA_P Parameter: Treatment Value: 100uM ABA vs. No Treatment
  misc_feature: MA Experiment ID: 20000527 Result: Down-regulated in Transcription
  misc_feature: MA Experiment 20000527 PARAMETER Experiment Name: At_10percent_PEG_P Parameter: Age (day) Value: 20
  misc_feature: MA Experiment 20000527 PARAMETER Experiment Name: At_10percent_PEG_P Parameter: Organism Value: A. thaliana
  misc_feature: MA Experiment 20000527 PARAMETER Experiment Name: At_10percent_PEG_P Parameter: Plant Line Value: WS
  misc_feature: MA Experiment 20000527 PARAMETER Experiment Name: At_10percent_PEG_P Parameter: Timepoint (day) Value: 20
  misc_feature: MA Experiment 20000527 PARAMETER Experiment Name: At_10percent_PEG_P Parameter: Tissue Value: Whole Plant
  misc_feature: MA Experiment 20000527 PARAMETER Experiment Name: At_10percent_PEG_P Parameter: Treatment Value: 10percent PEG vs. No Treatment
  misc_feature: MA Experiment ID: 20001554 Result: Up-regulated in Transcription
  misc_feature: MA Experiment 20001554 PARAMETER Experiment Name: At_Drought_Soil_Dry_P Parameter: Age (day) Value: 21
  misc_feature: MA Experiment 20001554 PARAMETER Experiment Name: At_Drought_Soil_Dry_P Parameter: Organism Value: A. thaliana
  misc_feature: MA Experiment 20001554 PARAMETER Experiment Name: At_Drought_Soil_Dry_P Parameter: Plant Line Value: WS
  misc_feature: MA Experiment 20001554 PARAMETER Experiment Name: At_Drought_Soil_Dry_P Parameter: Post Timepoint (hr) Value: None
  misc_feature: MA Experiment 20001554 PARAMETER Experiment Name: At_Drought_Soil_Dry_P Parameter: Post-Treatment Value: None
  misc_feature: MA Experiment 20001554 PARAMETER Experiment Name: At_Drought_Soil_Dry_P Parameter: Timepoint (day) Value: 7
  misc_feature: MA Experiment 20001554 PARAMETER Experiment Name: At_Drought_Soil_Dry_P Parameter: Treatment Value: Drought vs. No Drought
  misc_feature: MA Experiment ID: 20001555 Result: Up-regulated in Transcription
  misc_feature: MA Experiment 20001555 PARAMETER Experiment Name: At_Drought_Soil_Dry_P Parameter: Age (day) Value: 24
  misc_feature: MA Experiment 20001555 PARAMETER Experiment Name: At_Drought_Soil_Dry_P Parameter: Organism Value: A. thaliana
  misc_feature: MA Experiment 20001555 PARAMETER Experiment Name: At_Drought_Soil_Dry_P Parameter: Plant Line Value: WS
  misc_feature: MA Experiment 20001555 PARAMETER Experiment Name: At_Drought_Soil_Dry_P Parameter: Post Timepoint (hr) Value: None
  misc_feature: MA Experiment 20001555 PARAMETER Experiment Name: At_Drought_Soil_Dry_P Parameter: Post-Treatment Value: None
  misc_feature: MA Experiment 20001555 PARAMETER Experiment Name: At_Drought_Soil_Dry_P Parameter: Timepoint (day) Value: 10
  misc_feature: MA Experiment 20001555 PARAMETER Experiment Name: At_Drought_Soil_Dry_P Parameter: Treatment Value: Drought vs. No Drought
  misc_feature: MA Experiment ID: 20001774 Result: Up-regulated in Transcription
  misc_feature: MA Experiment 20001774 PARAMETER Experiment Name: At_Far-red-enriched-adult_P Parameter: Age (day) Value: 31
  misc_feature: MA Experiment 20001774 PARAMETER Experiment Name: At_Far-red-enriched-adult_P Parameter: Light Value: Far-red enriched vs. White
  misc_feature: MA Experiment 20001774 PARAMETER Experiment Name: At_Far-red-enriched-adult_P Parameter: Organism Value: A. thaliana
  misc_feature: MA Experiment 20001774 PARAMETER Experiment Name: At_Far-red-enriched-adult_P Parameter: Plant Line Value: Columbia
  misc_feature: MA Experiment 20001774 PARAMETER Experiment Name: At_Far-red-enriched-adult_P Parameter: Timepoint (hr) Value: 72
  misc_feature: MA Experiment 20001774 PARAMETER Experiment Name: At_Far-red-enriched-adult_P Parameter: Tissue Value: Aerial
  misc_feature: MA Experiment ID: 20001906 Result: Up-regulated in Transcription
  misc_feature: MA Experiment 20001906 PARAMETER Experiment Name: At_Drought_Reproduction_P Parameter: Age (day) Value: 35
  misc_feature: MA Experiment 20001906 PARAMETER Experiment Name: At_Drought_Reproduction_P Parameter: Organism Value: A. thaliana
  misc_feature: MA Experiment 20001906 PARAMETER Experiment Name: At_Drought_Reproduction_P Parameter: Plant Line Value: WS
  misc_feature: MA Experiment 20001906 PARAMETER Experiment Name: At_Drought_Reproduction_P Parameter: Timepoint (day) Value: 5
  misc_feature: MA Experiment 20001906 PARAMETER Experiment Name: At_Drought_Reproduction_P Parameter: Tissue Value: Siliques
  misc_feature: MA Experiment 20001906 PARAMETER Experiment Name: At_Drought_Reproduction_P Parameter: Treatment Value: Drought vs. No Drought
  misc_feature: MA Experiment ID: 20001908 Result: Up-regulated in Transcription
  misc_feature: MA Experiment 20001908 PARAMETER Experiment Name: At_Drought_Reproduction_P Parameter: Age (day) Value: 40
  misc_feature: MA Experiment 20001908 PARAMETER Experiment Name: At_Drought_Reproduction_P Parameter: Organism Value: A. thaliana
  misc_feature: MA Experiment 20001908 PARAMETER Experiment Name: At_Drought_Reproduction_P Parameter: Plant Line Value: WS
  misc_feature: MA Experiment 20001908 PARAMETER Experiment Name: At_Drought_Reproduction_P Parameter: Timepoint (day) Value: 10
  misc_feature: MA Experiment 20001908 PARAMETER Experiment Name: At_Drought_Reproduction_P Parameter: Tissue Value: Siliques
  misc_feature: MA Experiment 20001908 PARAMETER Experiment Name: At_Drought_Reproduction_P Parameter: Treatment Value: Drought vs. No Drought
aataccactatctcttctctctctcaatctctcaaaagatctccggtaacgttttaacgtcggtgaaaaaatgcggaagttaacggcggttaattcactactgaaacggaacaattatcttcttccgcgccatggctcctcacaaacagcagctcagagaacatcctccgtccgcgagaccgagaccgaaacaaaacttccgaaaatgcccccgttcaattattctccgccgccttacgacggtccatctacggcagagatcatcgcaaagcggcgagagttcctcagccccgctctttttcacttctacaacacacccttaaacattgtggaggcaaagatgcagtatgtgttcgacgagaatggacgtcgatatttagatgcctttggaggaatagcgacggtttcgtgcggccattgccacccggaagtagttaactccgtcgtcaaacagttgaaacttattaaccactccaccatcctttaccttaaccacaccatctccgatttcgctgaagcccttgtctccactcttccgggagatctcaaggtggtgtttttcacgaattcgggtacggaggcgaatgaacttgcgatgatgatggctagactgtatacaggatgtaacgacatcgtttcgcttaggaactcttatcatggaaacgcagctgctactatgggtgccactgctcagtccaactggaaattcaacgtcgttcagagtggagttcatcacgccataaatccagatccttacagaggaatatttggatccgacggtgaaaagtacgcgagtgatgtacacgatcttatccaattcggaacgtccggtcaagtcgccggtttcattggcgaatcaatccagggtgttggaggaatcgtagagcttgctcccggatacttaccggcggcttacgacatcgtgaggaaagccggaggagtttgcatcgccgatgaagtccaatccggttttgctcgtaccggaacccatttctgggggtttcaatcccatggtgttatccctgacatcgtcaccatggccaaggggatcggtaacggtataccacttggagcggttgtgacgacaccggagattgccggcgttttaagccgtcggagttactttaatactttcggcggaaatccaatgtgcacggccgcaggacacgcagtacttagagtccttcacgaagagaagctccaagagaatgctaacctcgttggctcacatcttaaacgtagacttacgctactcaaaaacaaatacgaactcattggagacgtgagagggagaggattgatgctaggagttgagtttgtcaaagaccgcgacttaaaaactcctgcaaaagcagagacccttcatttaatggatcaaatgaaagaaatgggagtgttggtggggaaaggtggattctatgggaatgtcttcagaatcactcctcctctctgcttcaccctctccgacgctgatttcctcgtggatgtgatggatcacgccatgtccaagatgtgatttactatctttatccgttctctaatgatcactcacccttgtatgtgtatataaataacacaatacatcataaagtagaattacaattggtgtttaccgaaatatatcacagatgcaagtatatgtaactaaatgtacagtactgtatacacttgatagaatctac

SEQ ID NO: 100433 - protein, 481 aa, Arabidopsis thaliana
  peptide (1)..(481): Ceres Seq. ID no. 13605109
  misc_feature (74)..(481): Pfam Name: Aminotransferase class-III Pfam Description: Aminotransferase class-III
  misc_feature (1)..(481): Homolog of NCBI NO: 15231974 NR Description: alanine--glyoxylate aminotransferase aminotransferase/AGT), putative [Arabidopsis thaliana] putative aminotransferase [Arabidopsis thaliana]
  misc_feature (1)..(481): Homolog of NCBI NO: 15028237 NR Description: putative beta-alanine-pyruvate aminotransferase
  misc_feature (1)..(481): Homolog of NCBI NO: 15224499 NR Description: alanine--glyoxylate aminotransferase aminotransferase/AGT), putative [Arabidopsis thaliana]
  misc_feature (44)..(481): Homolog of NCBI NO: 18420498 NR Description: alanine--glyoxylate aminotransferase aminotransferase/AGT), putative [Arabidopsis thaliana] AT4g39660/T19P19_50 [Arabidopsis thaliana]
  misc_feature (44)..(481): Homolog of NCBI NO: 5731259 NR Description: alanine:glyoxylate aminotransferase 2 homolog
  misc_feature (237)..(480): Homolog of NCBI NO: 16198011 NR Description: LD24726p [Drosophila melanogaster]
  misc_feature (237)..(480): Homolog of NCBI NO: 28574759 NR Description: CG11241-PA [Drosophila melanogaster]
  misc_feature (10)..(234): Homolog of NCBI NO: 16198011 NR Description: LD24726p [Drosophila melanogaster]
  misc_feature (10)..(234): Homolog of NCBI NO: 28574759 NR Description: CG11241-PA [Drosophila melanogaster]
  misc_feature (238)..(480): Homolog of NCBI NO: 13994255 NR Description: alanine-glyoxylate aminotransferase 2 precursor;
MRKLTAVNSLLKRNNYLLPRHGSSQTAAQRTSSVRETETETKLPKMPPFNYSPPPYDGPSTAEIIAKRREFLSPALFHFYNTPLNIVEAKMQYVFDENGRRYLDAFGGIATVSCGHCHPEVVNSVVKQLKLINHSTILYLNHTISDFAEALVSTLPGDLKVVFFTNSGTEANELAMMMARLYTGCNDIVSLRNSYHGNAAATMGATAQSNWKFNVVQSGVHHAINPDPYRGIFGSDGEKYASDVHDLIQFGTSGQVAGFIGESIQGVGGIVELAPGYLPAAYDIVRKAGGVCIADEVQSGFARTGTHFWGFQSHGVIPDIVTMAKGIGNGIPLGAVVTTPEIAGVLSRRSYFNTFGGNPMCTAAGHAVLRVLHEEKLQENANLVGSHLKRRLTLLKNKYELIGDVRGRGLMLGVEFVKDRDLKTPAKAETLHLMDQMKEMGVLVGKGGFYGNVFRITPPLCFTLSDADFLVDVMDHAMSKM

SEQ ID NO: 100434 - protein, 436 aa, Arabidopsis thaliana
  peptide (1)..(436): Ceres Seq. ID no. 13605110
  misc_feature (29)..(436): Pfam Name: Aminotransferase class-III Pfam Description: Aminotransferase class-III
  misc_feature (1)..(436): Homolog of NCBI NO: 15231974 NR Description: alanine--glyoxylate aminotransferase aminotransferase/AGT), putative [Arabidopsis thaliana] putative aminotransferase [Arabidopsis thaliana]
  misc_feature (1)..(436): Homolog of NCBI NO: 15028237 NR Description: putative beta-alanine-pyruvate aminotransferase
  misc_feature (1)..(436): Homolog of NCBI NO: 15224499 NR Description: alanine--glyoxylate aminotransferase aminotransferase/AGT), putative [Arabidopsis thaliana]
  misc_feature (1)..(436): Homolog of NCBI NO: 18420498 NR Description: alanine--glyoxylate aminotransferase aminotransferase/AGT), putative [Arabidopsis thaliana] AT4g39660/T19P19_50 [Arabidopsis thaliana]
  misc_feature (1)..(436): Homolog of NCBI NO: 5731259 NR Description: alanine:glyoxylate aminotransferase 2 homolog
  misc_feature (192)..(435): Homolog of NCBI NO: 16198011 NR Description: LD24726p [Drosophila melanogaster]
  misc_feature (192)..(435): Homolog of NCBI NO: 28574759 NR Description: CG11241-PA [Drosophila melanogaster]
  misc_feature (1)..(189): Homolog of NCBI NO: 16198011 NR Description: LD24726p [Drosophila melanogaster]
  misc_feature (1)..(189): Homolog of NCBI NO: 28574759 NR Description: CG11241-PA [Drosophila melanogaster]
  misc_feature (193)..(435): Homolog of NCBI NO: 13994255 NR Description: alanine-glyoxylate aminotransferase 2 precursor;
MPPFNYSPPPYDGPSTAEIIAKRREFLSPALFHFYNTPLNIVEAKMQYVFDENGRRYLDAFGGIATVSCGHCHPEVVNSVVKQLKLINHSTILYLNHTISDFAEALVSTLPGDLKVVFFTNSGTEANELAMMMARLYTGCNDIVSLRNSYHGNAAATMGATAQSNWKFNVVQSGVHHAINPDPYRGIFGSDGEKYASDVHDLIQFGTSGQVAGFIGESIQGVGGIVELAPGYLPAAYDIVRKAGGVCIADEVQSGFARTGTHFWGFQSHGVIPDIVTMAKGIGNGIPLGAVVTTPEIAGVLSRRSYFNTFGGNPMCTAAGHAVLRVLHEEKLQENANLVGSHLKRRLTLLKNKYELIGDVRGRGLMLGVEFVKDRDLKTPAKAETLHLMDQMKEMGVLVGKGGFYGNVFRITPPLCFTLSDADFLVDVMDHAMSKM

SEQ ID NO: 100435 - protein, 391 aa, Arabidopsis thaliana
  peptide (1)..(391): Ceres Seq. ID no. 13605111
  misc_feature (1)..(391): Pfam Name: Aminotransferase class-III Pfam Description: Aminotransferase class-III
  misc_feature (1)..(391): Homolog of NCBI NO: 15231974 NR Description: alanine--glyoxylate aminotransferase aminotransferase/AGT), putative [Arabidopsis thaliana] putative aminotransferase [Arabidopsis thaliana]
  misc_feature (1)..(391): Homolog of NCBI NO: 15028237 NR Description: putative beta-alanine-pyruvate aminotransferase
  misc_feature (1)..(391): Homolog of NCBI NO: 15224499 NR Description: alanine--glyoxylate aminotransferase aminotransferase/AGT), putative [Arabidopsis thaliana]
  misc_feature (1)..(391): Homolog of NCBI NO: 18420498 NR Description: alanine--glyoxylate aminotransferase aminotransferase/AGT), putative [Arabidopsis thaliana] AT4g39660/T19P19_50 [Arabidopsis thaliana]
  misc_feature (1)..(391): Homolog of NCBI NO: 5731259 NR Description: alanine:glyoxylate aminotransferase 2 homolog
  misc_feature (147)..(390): Homolog of NCBI NO: 16198011 NR Description: LD24726p [Drosophila melanogaster]
  misc_feature (147)..(390): Homolog of NCBI NO: 28574759 NR Description: CG11241-PA [Drosophila melanogaster]
  misc_feature (1)..(144): Homolog of NCBI NO: 16198011 NR Description: LD24726p [Drosophila melanogaster]
  misc_feature (1)..(144): Homolog of NCBI NO: 28574759 NR Description: CG11241-PA [Drosophila melanogaster]
  misc_feature (148)..(390): Homolog of NCBI NO: 13994255 NR Description: alanine-glyoxylate aminotransferase 2 precursor;
MQYVFDENGRRYLDAFGGIATVSCGHCHPEVVNSVVKQLKLINHSTILYLNHTISDFAEALVSTLPGDLKVVFFTNSGTEANELAMMMARLYTGCNDIVSLRNSYHGNAAATMGATAQSNWKFNVVQSGVHHAINPDPYRGIFGSDGEKYASDVHDLIQFGTSGQVAGFIGESIQGVGGIVELAPGYLPAAYDIVRKAGGVCIADEVQSGFARTGTHFWGFQSHGVIPDIVTMAKGIGNGIPLGAVVTTPEIAGVLSRRSYFNTFGGNPMCTAAGHAVLRVLHEEKLQENANLVGSHLKRRLTLLKNKYELIGDVRGRGLMLGVEFVKDRDLKTPAKAETLHLMDQMKEMGVLVGKGGFYGNVFRITPPLCFTLSDADFLVDVMDHAMSKM

SEQ ID NO: 100436 - DNA, 741 bp, Arabidopsis thaliana
  misc_feature (1)..(741): Ceres Seq. ID no. 13605128
  misc_feature: MA Experiment ID: 20000171 Result: Up-regulated in Transcription
  misc_feature: MA Experiment 20000171 PARAMETER Experiment Name: At_42deg_Heat_P Parameter: Age (day) Value: 14
  misc_feature: MA Experiment 20000171 PARAMETER Experiment Name: At_42deg_Heat_P Parameter: Organism Value: A. thaliana
  misc_feature: MA Experiment 20000171 PARAMETER Experiment Name: At_42deg_Heat_P Parameter: Plant Line Value: WS
  misc_feature: MA Experiment 20000171 PARAMETER Experiment Name: At_42deg_Heat_P Parameter: Temperature (deg C) Value: 42 vs. 22
  misc_feature: MA Experiment 20000171 PARAMETER Experiment Name: At_42deg_Heat_P Parameter: Timepoint (hr) Value: 1
  misc_feature: MA Experiment 20000171 PARAMETER Experiment Name: At_42deg_Heat_P Parameter: Tissue Value: Aerial
  misc_feature: MA Experiment ID: 20000173 Result: Up-regulated in Transcription
  misc_feature: MA Experiment 20000173 PARAMETER Experiment Name: At_42deg_Heat_P Parameter: Age (day) Value: 14
  misc_feature: MA Experiment 20000173 PARAMETER Experiment Name: At_42deg_Heat_P Parameter: Organism Value: A. thaliana
  misc_feature: MA Experiment 20000173 PARAMETER Experiment Name: At_42deg_Heat_P Parameter: Plant Line Value: WS
  misc_feature: MA Experiment 20000173 PARAMETER Experiment Name: At_42deg_Heat_P Parameter: Temperature (deg C) Value: 42 vs. 22
  misc_feature: MA Experiment 20000173 PARAMETER Experiment Name: At_42deg_Heat_P Parameter: Timepoint (hr) Value: 6
  misc_feature: MA Experiment 20000173 PARAMETER Experiment Name: At_42deg_Heat_P Parameter: Tissue Value: Aerial
  misc_feature: MA Experiment ID: 20000436 Result: Up-regulated in Transcription
  misc_feature: MA Experiment 20000436 PARAMETER Experiment Name: At_Drought_P Parameter: Age (day) Value: 7
  misc_feature: MA Experiment 20000436 PARAMETER Experiment Name: At_Drought_P Parameter: Organism Value: A. thaliana
  misc_feature: MA Experiment 20000436 PARAMETER Experiment Name: At_Drought_P Parameter: Plant Line Value: WS
  misc_feature: MA Experiment 20000436 PARAMETER Experiment Name: At_Drought_P Parameter: Timepoint (hr) Value: 12
  misc_feature: MA Experiment 20000436 PARAMETER Experiment Name: At_Drought_P Parameter: Tissue Value: Whole Plant
  misc_feature: MA Experiment 20000436 PARAMETER Experiment Name: At_Drought_P Parameter: Treatment Value: Drought vs. No Drought
  misc_feature: MA Experiment ID: 20000437 Result: Up-regulated in Transcription
  misc_feature: MA Experiment 20000437 PARAMETER Experiment Name: At_Drought_P Parameter: Age (day) Value: 8
  misc_feature: MA Experiment 20000437 PARAMETER Experiment Name: At_Drought_P Parameter: Organism Value: A. thaliana
  misc_feature: MA Experiment 20000437 PARAMETER Experiment Name: At_Drought_P Parameter: Plant Line Value: WS
  misc_feature: MA Experiment 20000437 PARAMETER Experiment Name: At_Drought_P Parameter: Timepoint (hr) Value: 24
  misc_feature: MA Experiment 20000437 PARAMETER Experiment Name: At_Drought_P Parameter: Tissue Value: Whole Plant
  misc_feature: MA Experiment 20000437 PARAMETER Experiment Name: At_Drought_P Parameter: Treatment Value: Drought vs. No Drought
  misc_feature: MA Experiment ID: 20000453 Result: Up-regulated in Transcription
  misc_feature: MA Experiment 20000453 PARAMETER Experiment Name: At_100uM_ABA_P Parameter: Age (day) Value: 15
  misc_feature: MA Experiment 20000453 PARAMETER Experiment Name: At_100uM_ABA_P Parameter: Organism Value: A. thaliana
  misc_feature: MA Experiment 20000453 PARAMETER Experiment Name: At_100uM_ABA_P Parameter: Plant Line Value: WS
  misc_feature: MA Experiment 20000453 PARAMETER Experiment Name: At_100uM_ABA_P Parameter: Timepoint (hr) Value: 24
  misc_feature: MA Experiment 20000453 PARAMETER Experiment Name: At_100uM_ABA_P Parameter: Tissue Value: Aerial
  misc_feature: MA Experiment 20000453 PARAMETER Experiment Name: At_100uM_ABA_P Parameter: Treatment Value: 100uM ABA vs. No Treatment
  misc_feature: MA Experiment ID: 20001554 Result: Up-regulated in Transcription
  misc_feature: MA Experiment 20001554 PARAMETER Experiment Name: At_Drought_Soil_Dry_P Parameter: Age (day) Value: 21
  misc_feature: MA Experiment 20001554 PARAMETER Experiment Name: At_Drought_Soil_Dry_P Parameter: Organism Value: A. thaliana
  misc_feature: MA Experiment 20001554 PARAMETER Experiment Name: At_Drought_Soil_Dry_P Parameter: Plant Line Value: WS
  misc_feature: MA Experiment 20001554 PARAMETER Experiment Name: At_Drought_Soil_Dry_P Parameter: Post Timepoint (hr) Value: None
  misc_feature: MA Experiment 20001554 PARAMETER Experiment Name: At_Drought_Soil_Dry_P Parameter: Post-Treatment Value: None
  misc_feature: MA Experiment 20001554 PARAMETER Experiment Name: At_Drought_Soil_Dry_P Parameter: Timepoint (day) Value: 7
  misc_feature: MA Experiment 20001554 PARAMETER Experiment Name: At_Drought_Soil_Dry_P Parameter: Treatment Value: Drought vs. No Drought
  misc_feature: MA Experiment ID: 20001555 Result: Up-regulated in Transcription
  misc_feature: MA Experiment 20001555 PARAMETER Experiment Name: At_Drought_Soil_Dry_P Parameter: Age (day) Value: 24
  misc_feature: MA Experiment 20001555 PARAMETER Experiment Name: At_Drought_Soil_Dry_P Parameter: Organism Value: A. thaliana
  misc_feature: MA Experiment 20001555 PARAMETER Experiment Name: At_Drought_Soil_Dry_P Parameter: Plant Line Value: WS
  misc_feature: MA Experiment 20001555 PARAMETER Experiment Name: At_Drought_Soil_Dry_P Parameter: Post Timepoint (hr) Value: None
  misc_feature: MA Experiment 20001555 PARAMETER Experiment Name: At_Drought_Soil_Dry_P Parameter: Post-Treatment Value: None
  misc_feature: MA Experiment 20001555 PARAMETER Experiment Name: At_Drought_Soil_Dry_P Parameter: Timepoint (day) Value: 10
  misc_feature: MA Experiment 20001555 PARAMETER Experiment Name: At_Drought_Soil_Dry_P Parameter: Treatment Value: Drought vs. No Drought
  misc_feature: MA Experiment ID: 20001556 Result: Up-regulated in Transcription
  misc_feature: MA Experiment 20001556 PARAMETER Experiment Name: At_Drought_Soil_Dry_P Parameter: Age (day) Value: 26
  misc_feature: MA Experiment 20001556 PARAMETER Experiment Name: At_Drought_Soil_Dry_P Parameter: Organism Value: A. thaliana
  misc_feature: MA Experiment 20001556 PARAMETER Experiment Name: At_Drought_Soil_Dry_P Parameter: Plant Line Value: WS
  misc_feature: MA Experiment 20001556 PARAMETER Experiment Name: At_Drought_Soil_Dry_P Parameter: Post Timepoint (hr) Value: None
  misc_feature: MA Experiment 20001556 PARAMETER Experiment Name: At_Drought_Soil_Dry_P Parameter: Post-Treatment Value: None
  misc_feature: MA Experiment 20001556 PARAMETER Experiment Name: At_Drought_Soil_Dry_P Parameter: Timepoint (day) Value: 12
  misc_feature: MA Experiment 20001556 PARAMETER Experiment Name: At_Drought_Soil_Dry_P Parameter: Treatment Value: Drought vs. No Drought
atggtgaagaagagttacccggaagtgaaagaagagtacaagaaagctgttcagagatgcaagaggaagctccgtggtcttattgccgagaagcactgtgctcccatcgtcctccgtcttgcatggcactcggctgggacatttgatgtgaagacgaagacaggaggaccgtttgggacgataaggcatccccaagagctagcccatgatgccaacaatggtcttgatattgccgttaggcttcttgaccctatcaaggagctgttccctattctgtcatatgctgacttctaccagctagctggagtagttgctgttgagatcactggaggaccagagattccatttcatcctggtagactggacaaagttgagccacctcctgaaggtcgtctgcctcaggccaccaaaggtgtggatcatctaagagatgtgtttggtcggatgggactcaatgacaaagatatcgttgcattgtctggtggacacaccttgggtcggtgccacaaggagcgttcaggattcgagggtgcatggacaccaaacccgctcatttttgacaactcctatttcaaagagatactaagcggagagaaagaaggacttcttcaactaccaaccgacaaggctcttcttgatgatcctctctttctcccatttgttgaaaaatatgctgcagatgaggatgccttcttcgaagactatacggaagctcatctaaagttgtcagaactcgggtaa

SEQ ID NO: 100437 - protein, 246 aa, Arabidopsis thaliana
  peptide (1)..(246): Ceres Seq. ID no. 13605129
  misc_feature (20)..(227): Pfam Name: Peroxidase Pfam Description: Peroxidase
  misc_feature (1)..(246): Homolog of NCBI NO: 6682242 NR Description: putative ascorbate peroxidase [Arabidopsis
  misc_feature (1)..(246): Homolog of NCBI NO: 30680940 NR Description: ascorbate peroxidase (APX) [Arabidopsis thaliana]
  misc_feature (1)..(246): Homolog of NCBI NO: 555576 NR Description: ascorbate peroxidase [Arabidopsis thaliana]
  misc_feature (4)..(246): Homolog of NCBI NO: 2738949 NR Description: cytosolic ascorbate peroxidase [Fragaria x >gi|5257552|gb|AAD41405.1|AF159630_1 cytosolic ascorbate
  misc_feature (4)..(246): Homolog of NCBI NO: 39939493 NR Description: ascorbate peroxidase [Pinus pinaster]
  misc_feature (4)..(246): Homolog of NCBI NO: 1420938 NR Description: ascorbate peroxidase [Vigna unguiculata]
MVKKSYPEVKEEYKKAVQRCKRKLRGLIAEKHCAPIVLRLAWHSAGTFDVKTKTGGPFGTIRHPQELAHDANNGLDIAVRLLDPIKELFPILSYADFYQLAGVVAVEITGGPEIPFHPGRLDKVEPPPEGRLPQATKGVDHLRDVFGRMGLNDKDIVALSGGHTLGRCHKERSGFEGAWTPNPLIFDNSYFKEILSGEKEGLLQLPTDKALLDDPLFLPFVEKYAADEDAFFEDYTEAHLKLSELG

SEQ ID NO: 100438 - DNA, 1162 bp, Arabidopsis thaliana
  misc_feature (1)..(1162): Ceres Seq. ID no. 13605137
  misc_feature: MA Experiment ID: 20000184 Result: Down-regulated in Transcription
  misc_feature: MA Experiment 20000184 PARAMETER Experiment Name: At_Shoots__P Parameter: Age (day) Value: 7
  misc_feature: MA Experiment 20000184 PARAMETER Experiment Name: At_Shoots__P Parameter: Tissue Value: Shoots vs. Whole Plant
gtttaacttgttgactttttttttaatccacaagtttttttttttttgttgcgtcagattttttgtttgttttccagtgacgtctttgatctccctcccgccgacgacacaagcacgccgtctggtttacctataagtgtttttgtgtggtgtctgtgtctcactgtgtcgatagattaaaataatttctcttcggccatgtcgtggtcgaaagcttgtagaggaactcgaatttcttcatatttagagaaccttcatcgaacatctcagtatccaaggactattttatgctctcgttattacactcatggagcttgtaaaagcaatgagcattatctccgaagcaagagagtattttggggaagctcttcttcatggagcttgaattctcactctgctactgctaaatcgatgttagatagtgcccatcgccagtattctactcactctccatcggaaaccaaatcacagaaaatgctctattacctcaccgctgttgtctttggtatggtggggttaacttacgctgctgtgccattgtatagaacattctgccaagctactggatatggaggtactgttcaacgcaaagagactgttgaggagaagattgctaggcattcagaatctggtaccgtcactgaaagggagattgtggtgcagttcaatgctgatgttgcagatgggatgcagtggaagttcactccaacacaaagagaggttagagtaaagccaggagaaagtgcactcgcattttacactgctgaaaacaaaagttcagctccaataaccggagtctcgacatacaatgtcactcccatgaaggcaggagtttatttcaacaagatacaatgtttttgctttgaggagcagcgactccttcctggagagcagattgacatgccggtcttcttctacattgatcctgagtttgagactgatccaagaatggacggaatcaacaacttgatattgtcttacactttcttcaaagtgtcagaggaaaatactacagagacggtcaacaataacaactctgttccagttcaagaaaccaattaaaaaaagtgtccatgttttttaagagctacaaaatatcttgtgacacaaccttatgcaagaacagtctctcttagatttaataaccaatttccaaattcgg

SEQ ID NO: 100439 - protein, 287 aa, Arabidopsis thaliana
  peptide (1)..(287): Ceres Seq. ID no. 13605138
  misc_feature (111)..(266): Pfam Name: Cytochrome c oxidase assembly protein  CtaG / Cox11 Pfam Description: Cytochrome c oxidase assembly protein CtaG /
  misc_feature (1)..(287): Homolog of NCBI NO: 15217755 NR Description: expressed protein [Arabidopsis thaliana] unknown protein [Arabidopsis thaliana]
  misc_feature (72)..(287): Homolog of NCBI NO: 25310029 NR Description: hypothetical protein T6A9.10 - Arabidopsis
  misc_feature (66)..(268): Homolog of NCBI NO: 28301938 NR Description: putative cytochrome c oxidase assembly protein
  misc_feature (78)..(268): Homolog of NCBI NO: 24581944 NR Description: CG31648-PA [Drosophila melanogaster]
  misc_feature (89)..(265): Homolog of NCBI NO: 31205111 NR Description: ENSANGP00000022656 [Anopheles gambiae]
  misc_feature (54)..(268): Homolog of NCBI NO: 4758034 NR Description: COX11 homolog; cytochrome c oxidase subunit 11; c oxidase assembly protein COX11 [Homo sapiens]
  misc_feature (89)..(268): Homolog of NCBI NO: 11466506 NR Description: component involved in Haem biosynthesis americana] >gi|8134373|sp|O21243|COXZ_RECAM CYTOCHROME C OXIDASE
  misc_feature (89)..(268): Homolog of NCBI NO: 39841021 NR Description: RIKEN cDNA 2010004I09 [Mus musculus]
  misc_feature (54)..(268): Homolog of NCBI NO: 21264410 NR Description: Cytochrome c oxidase assembly protein COX11, precursor >gi|13543475|gb|AAH05895.1|AAH05895 COX11 (yeast)
  misc_feature (89)..(268): Homolog of NCBI NO: 34873027 NR Description: similar to COX11 homolog; cytochrome c oxidase
MSWSKACRGTRISSYLENLHRTSQYPRTILCSRYYTHGACKSNEHYLRSKRVFWGSSSSWSLNSHSATAKSMLDSAHRQYSTHSPSETKSQKMLYYLTAVVFGMVGLTYAAVPLYRTFCQATGYGGTVQRKETVEEKIARHSESGTVTEREIVVQFNADVADGMQWKFTPTQREVRVKPGESALAFYTAENKSSAPITGVSTYNVTPMKAGVYFNKIQCFCFEEQRLLPGEQIDMPVFFYIDPEFETDPRMDGINNLILSYTFFKVSEENTTETVNNNNSVPVQETN

SEQ ID NO: 100440 - protein, 216 aa, Arabidopsis thaliana
  peptide (1)..(216): Ceres Seq. ID no. 13605139
  misc_feature (40)..(195): Pfam Name: Cytochrome c oxidase assembly protein  CtaG / Cox11 Pfam Description: Cytochrome c oxidase assembly protein CtaG /
  misc_feature (1)..(216): Homolog of NCBI NO: 15217755 NR Description: expressed protein [Arabidopsis thaliana] unknown protein [Arabidopsis thaliana]
  misc_feature (1)..(216): Homolog of NCBI NO: 25310029 NR Description: hypothetical protein T6A9.10 - Arabidopsis
  misc_feature (1)..(197): Homolog of NCBI NO: 28301938 NR Description: putative cytochrome c oxidase assembly protein
  misc_feature (7)..(197): Homolog of NCBI NO: 24581944 NR Description: CG31648-PA [Drosophila melanogaster]
  misc_feature (18)..(194): Homolog of NCBI NO: 31205111 NR Description: ENSANGP00000022656 [Anopheles gambiae]
  misc_feature (1)..(197): Homolog of NCBI NO: 4758034 NR Description: COX11 homolog; cytochrome c oxidase subunit 11; c oxidase assembly protein COX11 [Homo sapiens]
  misc_feature (18)..(197): Homolog of NCBI NO: 11466506 NR Description: component involved in Haem biosynthesis americana] >gi|8134373|sp|O21243|COXZ_RECAM CYTOCHROME C OXIDASE
  misc_feature (18)..(197): Homolog of NCBI NO: 39841021 NR Description: RIKEN cDNA 2010004I09 [Mus musculus]
  misc_feature (1)..(197): Homolog of NCBI NO: 21264410 NR Description: Cytochrome c oxidase assembly protein COX11, precursor >gi|13543475|gb|AAH05895.1|AAH05895 COX11 (yeast)
  misc_feature (18)..(197): Homolog of NCBI NO: 34873027 NR Description: similar to COX11 homolog; cytochrome c oxidase
MLDSAHRQYSTHSPSETKSQKMLYYLTAVVFGMVGLTYAAVPLYRTFCQATGYGGTVQRKETVEEKIARHSESGTVTEREIVVQFNADVADGMQWKFTPTQREVRVKPGESALAFYTAENKSSAPITGVSTYNVTPMKAGVYFNKIQCFCFEEQRLLPGEQIDMPVFFYIDPEFETDPRMDGINNLILSYTFFKVSEENTTETVNNNNSVPVQETN

SEQ ID NO: 100441 - protein, 195 aa, Arabidopsis thaliana
  peptide (1)..(195): Ceres Seq. ID no. 13605140
  misc_feature (19)..(174): Pfam Name: Cytochrome c oxidase assembly protein  CtaG / Cox11 Pfam Description: Cytochrome c oxidase assembly protein CtaG /
  misc_feature (1)..(195): Homolog of NCBI NO: 15217755 NR Description: expressed protein [Arabidopsis thaliana] unknown protein [Arabidopsis thaliana]
  misc_feature (1)..(195): Homolog of NCBI NO: 25310029 NR Description: hypothetical protein T6A9.10 - Arabidopsis
  misc_feature (1)..(176): Homolog of NCBI NO: 28301938 NR Description: putative cytochrome c oxidase assembly protein
  misc_feature (1)..(176): Homolog of NCBI NO: 24581944 NR Description: CG31648-PA [Drosophila melanogaster]
  misc_feature (1)..(173): Homolog of NCBI NO: 31205111 NR Description: ENSANGP00000022656 [Anopheles gambiae]
  misc_feature (1)..(176): Homolog of NCBI NO: 4758034 NR Description: COX11 homolog; cytochrome c oxidase subunit 11; c oxidase assembly protein COX11 [Homo sapiens]
  misc_feature (1)..(176): Homolog of NCBI NO: 11466506 NR Description: component involved in Haem biosynthesis americana] >gi|8134373|sp|O21243|COXZ_RECAM CYTOCHROME C OXIDASE
  misc_feature (1)..(176): Homolog of NCBI NO: 39841021 NR Description: RIKEN cDNA 2010004I09 [Mus musculus]
  misc_feature (1)..(176): Homolog of NCBI NO: 21264410 NR Description: Cytochrome c oxidase assembly protein COX11, precursor >gi|13543475|gb|AAH05895.1|AAH05895 COX11 (yeast)
  misc_feature (1)..(176): Homolog of NCBI NO: 34873027 NR Description: similar to COX11 homolog; cytochrome c oxidase
MLYYLTAVVFGMVGLTYAAVPLYRTFCQATGYGGTVQRKETVEEKIARHSESGTVTEREIVVQFNADVADGMQWKFTPTQREVRVKPGESALAFYTAENKSSAPITGVSTYNVTPMKAGVYFNKIQCFCFEEQRLLPGEQIDMPVFFYIDPEFETDPRMDGINNLILSYTFFKVSEENTTETVNNNNSVPVQETN

SEQ ID NO: 100442 - DNA, 929 bp, Arabidopsis thaliana
  misc_feature (1)..(929): Ceres Seq. ID no. 13605144
  misc_feature: MA Experiment ID: 108595 Result: Up-regulated in Transcription
  misc_feature: MA Experiment 108595 PARAMETER Experiment Name: At_Ler-pi_Ovule_cDNA_P Parameter: Plant Line Value: null
  misc_feature: MA Experiment ID: 108668 Result: Down-regulated in Transcription
  misc_feature: MA Experiment 108668 PARAMETER Experiment Name: At_2mM_SA_cDNA_P Parameter: Plant Line Value: WS
  misc_feature: MA Experiment 108668 PARAMETER Experiment Name: At_2mM_SA_cDNA_P Parameter: Timepoint (hr) Value: 6
  misc_feature: MA Experiment 108668 PARAMETER Experiment Name: At_2mM_SA_cDNA_P Parameter: Treatment Value: 2mM SA vs. No Treatment
atcttttgggagaggagaaagaaaaagaaaatgggaagagggagagtagaattgaagaggatagagaacaagatcaataggcaagtgacgtttgcaaagagaaggaatggtcttttgaagaaagcatacgagctttcagttctatgtgatgcagaagttgctctcatcatcttctcaaatagaggaaagctgtacgagttttgcagtagttcgagcatgcttcggacactggagaggtaccaaaagtgtaactatggagcaccagaacccaatgtgccttcaagagaggccttagcagaacttagtagccagcaggagtatctcaagcttaaggagcgttatgacgccttacagagaacccaaaggaatctgttgggagaagatcttggacctctaagtacaaaggagcttgagtcacttgagagacagcttgattcttccttgaagcagatcagagctctcaggacacagtttatgcttgaccagctcaacgatcttcagagtaaggaacgcatgctgactgagacaaataaaactctaagactaaggttagctgatgggtatcagatgccactccagctgaaccctaaccaagaagaggttgatcactacggtcgtcatcatcatcaacaacaacaacactcccaagctttcttccagcctttggaatgtgaacccattcttcagatcgggtatcaggggcaacaagatggaatgggagcaggaccaagtgtgaataattacatgttgggttggttaccttatgacaccaactctatttgaatctttctcacttaatcaatccctctcttttttttttgacatttttaagatgatgtttctattttattacctctctcatgttttctgtcttgtgtgcatgtgtgtgtgtaatgtttatgcccttctattattcaataattttttcg

SEQ ID NO: 100443 - protein, 260 aa, Arabidopsis thaliana
  peptide (1)..(260): Ceres Seq. ID no. 13605145
  misc_feature (85)..(186): Pfam Name: K-box region Pfam Description: K-box region
  misc_feature (11)..(260): Homolog of NCBI NO: 30688808 NR Description: MADS-box protein [Arabidopsis thaliana]
  misc_feature (11)..(260): Homolog of NCBI NO: 22329771 NR Description: MADS-box protein [Arabidopsis thaliana]
  misc_feature (11)..(260): Homolog of NCBI NO: 3912986 NR Description: Agamous-like MADS box protein AGL9 homolog (MADS
  misc_feature (11)..(254): Homolog of NCBI NO: 20385588 NR Description: MADS-box protein 4 [Vitis vinifera]
  misc_feature (11)..(254): Homolog of NCBI NO: 31747210 NR Description: MADS-box protein 5 [Lycopersicon esculentum]
  misc_feature (11)..(254): Homolog of NCBI NO: 5070138 NR Description: MADS-box protein MADS3 [Nicotiana sylvestris]
  misc_feature (11)..(254): Homolog of NCBI NO: 1345965 NR Description: Agamous-like MADS box protein AGL9 homolog homeotic protein FBP2) (Floral binding protein 2)
  misc_feature (11)..(253): Homolog of NCBI NO: 30314024 NR Description: SEP3-related MADS-box protein; PTM6 [Populus
  misc_feature (11)..(254): Homolog of NCBI NO: 7446516 NR Description: MADS box protein - garden pea
  misc_feature (11)..(254): Homolog of NCBI NO: 7446511 NR Description: MADS box protein DEFH200 - garden snapdragon
IFWERRKKKKMGRGRVELKRIENKINRQVTFAKRRNGLLKKAYELSVLCDAEVALIIFSNRGKLYEFCSSSSMLRTLERYQKCNYGAPEPNVPSREALAELSSQQEYLKLKERYDALQRTQRNLLGEDLGPLSTKELESLERQLDSSLKQIRALRTQFMLDQLNDLQSKERMLTETNKTLRLRLADGYQMPLQLNPNQEEVDHYGRHHHQQQQHSQAFFQPLECEPILQIGYQGQQDGMGAGPSVNNYMLGWLPYDTNSI

SEQ ID NO: 100444 - protein, 250 aa, Arabidopsis thaliana
  peptide (1)..(250): Ceres Seq. ID no. 13605146
  misc_feature (75)..(176): Pfam Name: K-box region Pfam Description: K-box region
  misc_feature (1)..(250): Homolog of NCBI NO: 30688808 NR Description: MADS-box protein [Arabidopsis thaliana]
  misc_feature (1)..(250): Homolog of NCBI NO: 22329771 NR Description: MADS-box protein [Arabidopsis thaliana]
  misc_feature (1)..(250): Homolog of NCBI NO: 3912986 NR Description: Agamous-like MADS box protein AGL9 homolog (MADS
  misc_feature (1)..(244): Homolog of NCBI NO: 20385588 NR Description: MADS-box protein 4 [Vitis vinifera]
  misc_feature (1)..(244): Homolog of NCBI NO: 31747210 NR Description: MADS-box protein 5 [Lycopersicon esculentum]
  misc_feature (1)..(244): Homolog of NCBI NO: 5070138 NR Description: MADS-box protein MADS3 [Nicotiana sylvestris]
  misc_feature (1)..(244): Homolog of NCBI NO: 1345965 NR Description: Agamous-like MADS box protein AGL9 homolog homeotic protein FBP2) (Floral binding protein 2)
  misc_feature (1)..(243): Homolog of NCBI NO: 30314024 NR Description: SEP3-related MADS-box protein; PTM6 [Populus
  misc_feature (1)..(244): Homolog of NCBI NO: 7446516 NR Description: MADS box protein - garden pea
  misc_feature (1)..(244): Homolog of NCBI NO: 7446511 NR Description: MADS box protein DEFH200 - garden snapdragon
MGRGRVELKRIENKINRQVTFAKRRNGLLKKAYELSVLCDAEVALIIFSNRGKLYEFCSSSSMLRTLERYQKCNYGAPEPNVPSREALAELSSQQEYLKLKERYDALQRTQRNLLGEDLGPLSTKELESLERQLDSSLKQIRALRTQFMLDQLNDLQSKERMLTETNKTLRLRLADGYQMPLQLNPNQEEVDHYGRHHHQQQQHSQAFFQPLECEPILQIGYQGQQDGMGAGPSVNNYMLGWLPYDTNSI

SEQ ID NO: 100445 - protein, 188 aa, Arabidopsis thaliana
  peptide (1)..(188): Ceres Seq. ID no. 13605147
  misc_feature (13)..(114): Pfam Name: K-box region Pfam Description: K-box region
  misc_feature (1)..(188): Homolog of NCBI NO: 30688808 NR Description: MADS-box protein [Arabidopsis thaliana]
  misc_feature (1)..(188): Homolog of NCBI NO: 22329771 NR Description: MADS-box protein [Arabidopsis thaliana]
  misc_feature (1)..(188): Homolog of NCBI NO: 3912986 NR Description: Agamous-like MADS box protein AGL9 homolog (MADS
  misc_feature (1)..(182): Homolog of NCBI NO: 20385588 NR Description: MADS-box protein 4 [Vitis vinifera]
  misc_feature (1)..(182): Homolog of NCBI NO: 31747210 NR Description: MADS-box protein 5 [Lycopersicon esculentum]
  misc_feature (1)..(182): Homolog of NCBI NO: 5070138 NR Description: MADS-box protein MADS3 [Nicotiana sylvestris]
  misc_feature (1)..(182): Homolog of NCBI NO: 1345965 NR Description: Agamous-like MADS box protein AGL9 homolog homeotic protein FBP2) (Floral binding protein 2)
  misc_feature (1)..(181): Homolog of NCBI NO: 30314024 NR Description: SEP3-related MADS-box protein; PTM6 [Populus
  misc_feature (1)..(182): Homolog of NCBI NO: 7446516 NR Description: MADS box protein - garden pea
  misc_feature (1)..(182): Homolog of NCBI NO: 7446511 NR Description: MADS box protein DEFH200 - garden snapdragon
MLRTLERYQKCNYGAPEPNVPSREALAELSSQQEYLKLKERYDALQRTQRNLLGEDLGPLSTKELESLERQLDSSLKQIRALRTQFMLDQLNDLQSKERMLTETNKTLRLRLADGYQMPLQLNPNQEEVDHYGRHHHQQQQHSQAFFQPLECEPILQIGYQGQQDGMGAGPSVNNYMLGWLPYDTNSI

SEQ ID NO: 100446 - DNA, 1605 bp, Arabidopsis thaliana
  misc_feature (1)..(1605): Ceres Seq. ID no. 13605148
  misc_feature: MA Experiment ID: 20000180 Result: Down-regulated in Transcription
  misc_feature: MA Experiment 20000180 PARAMETER Experiment Name: At_Germinating_Seeds_P Parameter: Age (hr) Value: 24 vs. 0
  misc_feature: MA Experiment 20000180 PARAMETER Experiment Name: At_Germinating_Seeds_P Parameter: Tissue Value: Germinating Seeds
  misc_feature: MA Experiment ID: 20001451 Result: Down-regulated in Transcription
  misc_feature: MA Experiment 20001451 PARAMETER Experiment Name: At_Far-red-induction_P Parameter: Age (day) Value: 7
  misc_feature: MA Experiment 20001451 PARAMETER Experiment Name: At_Far-red-induction_P Parameter: Light Value: Far-red vs. White
  misc_feature: MA Experiment 20001451 PARAMETER Experiment Name: At_Far-red-induction_P Parameter: Organism Value: A. thaliana
  misc_feature: MA Experiment 20001451 PARAMETER Experiment Name: At_Far-red-induction_P Parameter: Plant Line Value: Columbia
  misc_feature: MA Experiment 20001451 PARAMETER Experiment Name: At_Far-red-induction_P Parameter: Timepoint (hr) Value: 24
  misc_feature: MA Experiment 20001451 PARAMETER Experiment Name: At_Far-red-induction_P Parameter: Tissue Value: Whole Plant
gagtaacacaacactgtcccttcgacaaaacaattttgagtctctctattctctattctctctcctctccgcctctctttctctctctctctatctccgtcgtcgcaagagtgcatcatctttaacgccggcaccttcccgctgctctcttctaccaattctctcttagatcttctcatgcgtcttcttcttatatcttaatccttcgtcgtacaagctcgccggattgagttttcgtcttccatggctattcctctcgggaagctcaccatcctcatcggtgcaggtcttgttgggtcagtacttgctaaagaagggagtttaccagatgtctcgagttttgtctccggtgctcttaagatggtatttaggcagctgaagcaagaagaacctgccaaatcagccagcaagccccgcaatgatacactaatggcccaggttaacagtcttaggcatgaattgagcttgctttcttcaaacagacctatcactattgttaccacagcaggatcaggtggtaaaaagtatggttacatcattataattggggtgataggctacggatatgtatggtggaagggctggaaacttccggatcttatgtttgcaacaaggcgcagcttatcagatgcatgtaatagtgttggcagccagatcgatggtttttacacatcactctcgggtaccaaaaaagagttaagttcaaaaattgacgggatgggtcgtagtttggatgctaatacagaaattattcaagatacaggacgagaggtgatggaactacaaagaggtacggaaaatattaaggatgacgttaagtttgttttcgatgctgttgaaaatctggcaagcaaagtctatcgtattgagggaaatcaggatattacacttaaaggagtcggggcgctgcatgctcaggttcgggagaacaaaagaattcaagagtccaataaggctttaccatcaacttcagcagtgccagcccttgaggcagctcctatgacaccatcgtcaaggactttgtctttgcctcctgcttctccccgtgaatctcagtcgccttcaacttctaatggagctcaacagtcacgtggtccacttcagcacactcaatctatgtctggtttgaaggagataagcgaaaatggaacacattctggagaaactacgggaaacacgagttctggcctgtttagtattttctcaataccaagaatagggaggactcgaagtgtggtcaacacagtgcctactaactccattggaccccaatagtcgtctgtcaatactgaagagagagtttgatcattcaaatgatcagcaagccagagatggttaagtgctagtagaggatttgaatagatcatgctgcgtctatgcttgatcccttgcttagtgtagacaatgtgataaatggtgcataatttttgtagggatgcagcttatatttaattggattatatgtcacaattaatcagtatgttgctctgccctttcgtaattcagtttatacagagaggtcgacgatggttttgtatggccgtctctacttttccttcttttttttgtattgaataaaaggctggtccatttggctatgacatt

SEQ ID NO: 100447 - protein, 343 aa, Arabidopsis thaliana
  peptide (1)..(343): Ceres Seq. ID no. 13605149
  misc_feature (1)..(343): Homolog of NCBI NO: 30688826 NR Description: expressed protein [Arabidopsis thaliana] unknown protein [Arabidopsis thaliana]
  misc_feature (1)..(338): Homolog of NCBI NO: 22329773 NR Description: expressed protein [Arabidopsis thaliana] unknown protein [Arabidopsis thaliana]
  misc_feature (1)..(158): Homolog of NCBI NO: 7486368 NR Description: hypothetical protein F3I6.20 - Arabidopsis >gi|2829879|gb|AAC00587.1| Hypothetical protein [Arabidopsis
  misc_feature (234)..(310): Homolog of NCBI NO: 7486368 NR Description: hypothetical protein F3I6.20 - Arabidopsis >gi|2829879|gb|AAC00587.1| Hypothetical protein [Arabidopsis
  misc_feature (1)..(335): Homolog of NCBI NO: 7208775 NR Description: hypothetical protein [Cicer arietinum]
  misc_feature (142)..(238): Homolog of NCBI NO: 7486369 NR Description: hypothetical protein F3I6.21 - Arabidopsis >gi|2829881|gb|AAC00589.1| Hypothetical protein [Arabidopsis
  misc_feature (35)..(152): Homolog of NCBI NO: 7486369 NR Description: hypothetical protein F3I6.21 - Arabidopsis >gi|2829881|gb|AAC00589.1| Hypothetical protein [Arabidopsis
  misc_feature (5)..(319): Homolog of NCBI NO: 34894218 NR Description: P0439B06.30 [Oryza sativa (japonica
  misc_feature (51)..(300): Homolog of NCBI NO: 15128438 NR Description: contains EST D16001(C2001)~similar to Oryza sativa
  misc_feature (3)..(257): Homolog of NCBI NO: 18390460 NR Description: expressed protein [Arabidopsis thaliana]
MAIPLGKLTILIGAGLVGSVLAKEGSLPDVSSFVSGALKMVFRQLKQEEPAKSASKPRNDTLMAQVNSLRHELSLLSSNRPITIVTTAGSGGKKYGYIIIIGVIGYGYVWWKGWKLPDLMFATRRSLSDACNSVGSQIDGFYTSLSGTKKELSSKIDGMGRSLDANTEIIQDTGREVMELQRGTENIKDDVKFVFDAVENLASKVYRIEGNQDITLKGVGALHAQVRENKRIQESNKALPSTSAVPALEAAPMTPSSRTLSLPPASPRESQSPSTSNGAQQSRGPLQHTQSMSGLKEISENGTHSGETTGNTSSGLFSIFSIPRIGRTRSVVNTVPTNSIGPQ

SEQ ID NO: 100448 - protein, 304 aa, Arabidopsis thaliana
  peptide (1)..(304): Ceres Seq. ID no. 13605150
  misc_feature (1)..(304): Homolog of NCBI NO: 30688826 NR Description: expressed protein [Arabidopsis thaliana] unknown protein [Arabidopsis thaliana]
  misc_feature (1)..(299): Homolog of NCBI NO: 22329773 NR Description: expressed protein [Arabidopsis thaliana] unknown protein [Arabidopsis thaliana]
  misc_feature (1)..(119): Homolog of NCBI NO: 7486368 NR Description: hypothetical protein F3I6.20 - Arabidopsis >gi|2829879|gb|AAC00587.1| Hypothetical protein [Arabidopsis
  misc_feature (195)..(271): Homolog of NCBI NO: 7486368 NR Description: hypothetical protein F3I6.20 - Arabidopsis >gi|2829879|gb|AAC00587.1| Hypothetical protein [Arabidopsis
  misc_feature (1)..(296): Homolog of NCBI NO: 7208775 NR Description: hypothetical protein [Cicer arietinum]
  misc_feature (103)..(199): Homolog of NCBI NO: 7486369 NR Description: hypothetical protein F3I6.21 - Arabidopsis >gi|2829881|gb|AAC00589.1| Hypothetical protein [Arabidopsis
  misc_feature (1)..(113): Homolog of NCBI NO: 7486369 NR Description: hypothetical protein F3I6.21 - Arabidopsis >gi|2829881|gb|AAC00589.1| Hypothetical protein [Arabidopsis
  misc_feature (1)..(280): Homolog of NCBI NO: 34894218 NR Description: P0439B06.30 [Oryza sativa (japonica
  misc_feature (12)..(261): Homolog of NCBI NO: 15128438 NR Description: contains EST D16001(C2001)~similar to Oryza sativa
  misc_feature (1)..(218): Homolog of NCBI NO: 18390460 NR Description: expressed protein [Arabidopsis thaliana]
MVFRQLKQEEPAKSASKPRNDTLMAQVNSLRHELSLLSSNRPITIVTTAGSGGKKYGYIIIIGVIGYGYVWWKGWKLPDLMFATRRSLSDACNSVGSQIDGFYTSLSGTKKELSSKIDGMGRSLDANTEIIQDTGREVMELQRGTENIKDDVKFVFDAVENLASKVYRIEGNQDITLKGVGALHAQVRENKRIQESNKALPSTSAVPALEAAPMTPSSRTLSLPPASPRESQSPSTSNGAQQSRGPLQHTQSMSGLKEISENGTHSGETTGNTSSGLFSIFSIPRIGRTRSVVNTVPTNSIGPQ

SEQ ID NO: 100449 - protein, 281 aa, Arabidopsis thaliana
  peptide (1)..(281): Ceres Seq. ID no. 13605151
  misc_feature (1)..(281): Homolog of NCBI NO: 30688826 NR Description: expressed protein [Arabidopsis thaliana] unknown protein [Arabidopsis thaliana]
  misc_feature (1)..(276): Homolog of NCBI NO: 22329773 NR Description: expressed protein [Arabidopsis thaliana] unknown protein [Arabidopsis thaliana]
  misc_feature (1)..(96): Homolog of NCBI NO: 7486368 NR Description: hypothetical protein F3I6.20 - Arabidopsis >gi|2829879|gb|AAC00587.1| Hypothetical protein [Arabidopsis
  misc_feature (172)..(248): Homolog of NCBI NO: 7486368 NR Description: hypothetical protein F3I6.20 - Arabidopsis >gi|2829879|gb|AAC00587.1| Hypothetical protein [Arabidopsis
  misc_feature (1)..(273): Homolog of NCBI NO: 7208775 NR Description: hypothetical protein [Cicer arietinum]
  misc_feature (80)..(176): Homolog of NCBI NO: 7486369 NR Description: hypothetical protein F3I6.21 - Arabidopsis >gi|2829881|gb|AAC00589.1| Hypothetical protein [Arabidopsis
  misc_feature (1)..(90): Homolog of NCBI NO: 7486369 NR Description: hypothetical protein F3I6.21 - Arabidopsis >gi|2829881|gb|AAC00589.1| Hypothetical protein [Arabidopsis
  misc_feature (1)..(257): Homolog of NCBI NO: 34894218 NR Description: P0439B06.30 [Oryza sativa (japonica
  misc_feature (1)..(238): Homolog of NCBI NO: 15128438 NR Description: contains EST D16001(C2001)~similar to Oryza sativa
  misc_feature (1)..(195): Homolog of NCBI NO: 18390460 NR Description: expressed protein [Arabidopsis thaliana]
MAQVNSLRHELSLLSSNRPITIVTTAGSGGKKYGYIIIIGVIGYGYVWWKGWKLPDLMFATRRSLSDACNSVGSQIDGFYTSLSGTKKELSSKIDGMGRSLDANTEIIQDTGREVMELQRGTENIKDDVKFVFDAVENLASKVYRIEGNQDITLKGVGALHAQVRENKRIQESNKALPSTSAVPALEAAPMTPSSRTLSLPPASPRESQSPSTSNGAQQSRGPLQHTQSMSGLKEISENGTHSGETTGNTSSGLFSIFSIPRIGRTRSVVNTVPTNSIGPQ

SEQ ID NO: 100450 - DNA, 863 bp, Arabidopsis thaliana
  misc_feature (1)..(863): Ceres Seq. ID no. 13605152
  misc_feature: MA Experiment ID: 108434 Result: Down-regulated in Transcription
  misc_feature: MA Experiment 108434 PARAMETER Experiment Name: At_Root_Tips_cDNA_P Parameter: Tissue Value: Root Tips
  misc_feature: MA Experiment ID: 108573 Result: Up-regulated in Transcription
  misc_feature: MA Experiment 108573 PARAMETER Experiment Name: At_Drought_cDNA_P Parameter: Timepoint (hr) Value: 6
  misc_feature: MA Experiment 108573 PARAMETER Experiment Name: At_Drought_cDNA_P Parameter: Tissue Value: Aerial
  misc_feature: MA Experiment 108573 PARAMETER Experiment Name: At_Drought_cDNA_P Parameter: Treatment Value: Drought vs. No Drought
  misc_feature: MA Experiment ID: 108595 Result: Down-regulated in Transcription
  misc_feature: MA Experiment 108595 PARAMETER Experiment Name: At_Ler-pi_Ovule_cDNA_P Parameter: Plant Line Value: null
aattggtcaaagaaaaaaaaagaaagacaaagaggattgaacggtagacgtagacgccattggagtttgaaagggaattagtcgacgttttatggatcattgtcgtttcggtgtcattttcttcttcttctttcgctagcacgatttaaagcctgactagatccatcatcggccatggaggattctacagccacggctacgtcttcgtcttccactcattatttctccattttcacgaattatcctctcatttccgccgtcacctctttcactatcgctcaattcatcaaactcttcacctcctggtatagggaacggagatgggatctcaaacagcttattgggtctggaggaatgccttcttcgcattcagcgaccgttacagctctcgctgtagctattggtttacaagaaggctttggtggatcacattttgccattgctttgattttggcatctgttgtgatgtatgatgctaccggtgttagattacatgctggtcgtcaagctgaggttctcaatcagattgtatatgaacttcctgcagaacatccgctggctgaaagcagacctttgcgggaacttcttggtcatacccctccccaggtcgttgctggtggaatgcttggaagtgctacagcagtcaccggatacttatttttcaggatagctacaagctaacgtcaagaacatgcatagacacaactcttctgcttcattgcctattgaagccactggagagtaccaaaacagatttacaaccgaatccgagttaaaaatatatttattcttgtttaacattaccattaccatatgtaaagaaatcgtgaaacaccattacaaaaataacgtgattttatttg

SEQ ID NO: 100451 - protein, 168 aa, Arabidopsis thaliana
  peptide (1)..(168): Ceres Seq. ID no. 13605153
  misc_feature (18)..(161): Pfam Name: Divergent PAP2 family Pfam Description: Divergent PAP2 family
  misc_feature (1)..(168): Homolog of NCBI NO: 18395459 NR Description: expressed protein [Arabidopsis thaliana]
  misc_feature (1)..(168): Homolog of NCBI NO: 21555270 NR Description: unknown [Arabidopsis thaliana]
  misc_feature (1)..(168): Homolog of NCBI NO: 7486375 NR Description: hypothetical protein F3I6.29 - Arabidopsis >gi|2829889|gb|AAC00597.1| Hypothetical protein [Arabidopsis
  misc_feature (1)..(145): Homolog of NCBI NO: 9743358 NR Description: F21J9.1 [Arabidopsis thaliana]
  misc_feature (1)..(145): Homolog of NCBI NO: 26449729 NR Description: unknown protein [Arabidopsis thaliana]
  misc_feature (1)..(166): Homolog of NCBI NO: 15220480 NR Description: F12A21.27 [Arabidopsis thaliana]
  misc_feature (1)..(145): Homolog of NCBI NO: 12324675 NR Description: unknown protein [Arabidopsis thaliana]
  misc_feature (22)..(156): Homolog of NCBI NO: 30686309 NR Description: expressed protein [Arabidopsis thaliana] unknown protein [Arabidopsis thaliana]
  misc_feature (22)..(157): Homolog of NCBI NO: 38344227 NR Description: OJ991113_30.3 [Oryza sativa (japonica
  misc_feature (22)..(145): Homolog of NCBI NO: 29150195 NR Description: putative protein [Oryza sativa (indica
MEDSTATATSSSSTHYFSIFTNYPLISAVTSFTIAQFIKLFTSWYRERRWDLKQLIGSGGMPSSHSATVTALAVAIGLQEGFGGSHFAIALILASVVMYDATGVRLHAGRQAEVLNQIVYELPAEHPLAESRPLRELLGHTPPQVVAGGMLGSATAVTGYLFFRIATS

SEQ ID NO: 100452 - protein, 108 aa, Arabidopsis thaliana; identical to SEQ ID NO: 20850
  peptide (1)..(108): Ceres Seq. ID no. 13605154
  misc_feature (1)..(101): Pfam Name: Divergent PAP2 family Pfam Description: Divergent PAP2 family
  misc_feature (1)..(108): Homolog of NCBI NO: 18395459 NR Description: expressed protein [Arabidopsis thaliana]
  misc_feature (1)..(108): Homolog of NCBI NO: 21555270 NR Description: unknown [Arabidopsis thaliana]
  misc_feature (1)..(108): Homolog of NCBI NO: 7486375 NR Description: hypothetical protein F3I6.29 - Arabidopsis >gi|2829889|gb|AAC00597.1| Hypothetical protein [Arabidopsis
  misc_feature (1)..(85): Homolog of NCBI NO: 9743358 NR Description: F21J9.1 [Arabidopsis thaliana]
  misc_feature (1)..(85): Homolog of NCBI NO: 26449729 NR Description: unknown protein [Arabidopsis thaliana]
  misc_feature (1)..(106): Homolog of NCBI NO: 15220480 NR Description: F12A21.27 [Arabidopsis thaliana]
  misc_feature (1)..(85): Homolog of NCBI NO: 12324675 NR Description: unknown protein [Arabidopsis thaliana]
  misc_feature (1)..(96): Homolog of NCBI NO: 30686309 NR Description: expressed protein [Arabidopsis thaliana] unknown protein [Arabidopsis thaliana]
  misc_feature (1)..(97): Homolog of NCBI NO: 38344227 NR Description: OJ991113_30.3 [Oryza sativa (japonica
  misc_feature (1)..(85): Homolog of NCBI NO: 29150195 NR Description: putative protein [Oryza sativa (indica

SEQ ID NO: 100453 - DNA, 1103 bp, Arabidopsis thaliana
  misc_feature (1)..(1103): Ceres Seq. ID no. 13605159
  misc_feature: MA Experiment ID: 108434 Result: Down-regulated in Transcription
  misc_feature: MA Experiment 108434 PARAMETER Experiment Name: At_Root_Tips_cDNA_P Parameter: Tissue Value: Root Tips
  misc_feature: MA Experiment ID: 108461 Result: Up-regulated in Transcription
  misc_feature: MA Experiment 108461 PARAMETER Experiment Name: At_Germinating_Seeds_cDNA_P Parameter: Age (day) Value: 1 vs. 0
  misc_feature: MA Experiment 108461 PARAMETER Experiment Name: At_Germinating_Seeds_cDNA_P Parameter: Tissue Value: Germinating Seeds
  misc_feature: MA Experiment ID: 108462 Result: Up-regulated in Transcription
  misc_feature: MA Experiment 108462 PARAMETER Experiment Name: At_Germinating_Seeds_cDNA_P Parameter: Age (day) Value: 2 vs. 0
  misc_feature: MA Experiment 108462 PARAMETER Experiment Name: At_Germinating_Seeds_cDNA_P Parameter: Tissue Value: Germinating Seeds
  misc_feature: MA Experiment ID: 108463 Result: Up-regulated in Transcription
  misc_feature: MA Experiment 108463 PARAMETER Experiment Name: At_Germinating_Seeds_cDNA_P Parameter: Age (day) Value: 3 vs. 0
  misc_feature: MA Experiment 108463 PARAMETER Experiment Name: At_Germinating_Seeds_cDNA_P Parameter: Tissue Value: Germinating Seeds
  misc_feature: MA Experiment ID: 108464 Result: Up-regulated in Transcription
  misc_feature: MA Experiment 108464 PARAMETER Experiment Name: At_Germinating_Seeds_cDNA_P Parameter: Age (day) Value: 4 vs. 0
  misc_feature: MA Experiment 108464 PARAMETER Experiment Name: At_Germinating_Seeds_cDNA_P Parameter: Tissue Value: Germinating Seeds
  misc_feature: MA Experiment ID: 108574 Result: Down-regulated in Transcription
  misc_feature: MA Experiment 108574 PARAMETER Experiment Name: At_Wounding__cDNA_P Parameter: Timepoint (hr) Value: 1
  misc_feature: MA Experiment 108574 PARAMETER Experiment Name: At_Wounding__cDNA_P Parameter: Tissue Value: Aerial
  misc_feature: MA Experiment 108574 PARAMETER Experiment Name: At_Wounding__cDNA_P Parameter: Treatment Value: Wounding vs. No Wounding
  misc_feature: MA Experiment ID: 108579 Result: Down-regulated in Transcription
  misc_feature: MA Experiment 108579 PARAMETER Experiment Name: At_4deg_Cold_cDNA_P Parameter: Temperature (deg C) Value: 4 vs. 22
  misc_feature: MA Experiment 108579 PARAMETER Experiment Name: At_4deg_Cold_cDNA_P Parameter: Timepoint (hr) Value: 6
  misc_feature: MA Experiment 108579 PARAMETER Experiment Name: At_4deg_Cold_cDNA_P Parameter: Tissue Value: Aerial
  misc_feature: MA Experiment ID: 108595 Result: Down-regulated in Transcription
  misc_feature: MA Experiment 108595 PARAMETER Experiment Name: At_Ler-pi_Ovule_cDNA_P Parameter: Plant Line Value: null
  misc_feature: MA Experiment ID: 20000069 Result: Up-regulated in Transcription
  misc_feature: MA Experiment 20000069 PARAMETER Experiment Name: At_100uM_ABA_Mutants_cDNA_P Parameter: Plant Line Value: CS23
  misc_feature: MA Experiment 20000069 PARAMETER Experiment Name: At_100uM_ABA_Mutants_cDNA_P Parameter: Timepoint (hr) Value: 6
  misc_feature: MA Experiment 20000069 PARAMETER Experiment Name: At_100uM_ABA_Mutants_cDNA_P Parameter: Tissue Value: Aerial
  misc_feature: MA Experiment 20000069 PARAMETER Experiment Name: At_100uM_ABA_Mutants_cDNA_P Parameter: Treatment Value: 100uM ABA vs. No Treatment
  misc_feature: MA Experiment ID: 20000087 Result: Up-regulated in Transcription
  misc_feature: MA Experiment 20000087 PARAMETER Experiment Name: At_100uM_ABA_Mutants_cDNA_P Parameter: Plant Line Value: WS
  misc_feature: MA Experiment 20000087 PARAMETER Experiment Name: At_100uM_ABA_Mutants_cDNA_P Parameter: Timepoint (hr) Value: 6
  misc_feature: MA Experiment 20000087 PARAMETER Experiment Name: At_100uM_ABA_Mutants_cDNA_P Parameter: Tissue Value: Aerial
  misc_feature: MA Experiment 20000087 PARAMETER Experiment Name: At_100uM_ABA_Mutants_cDNA_P Parameter: Treatment Value: 100uM ABA vs. No Treatment
  misc_feature: MA Experiment ID: 20000112 Result: Down-regulated in Transcription
  misc_feature: MA Experiment 20000112 PARAMETER Experiment Name: At_42deg_Heat_cDNA_P Parameter: Temperature (deg C) Value: 42 vs. 22
  misc_feature: MA Experiment 20000112 PARAMETER Experiment Name: At_42deg_Heat_cDNA_P Parameter: Timepoint (hr) Value: 2
  misc_feature: MA Experiment 20000112 PARAMETER Experiment Name: At_42deg_Heat_cDNA_P Parameter: Tissue Value: Aerial
  misc_feature: MA Experiment ID: 20000113 Result: Down-regulated in Transcription
  misc_feature: MA Experiment 20000113 PARAMETER Experiment Name: At_42deg_Heat_cDNA_P Parameter: Temperature (deg C) Value: 42 vs. 22
  misc_feature: MA Experiment 20000113 PARAMETER Experiment Name: At_42deg_Heat_cDNA_P Parameter: Timepoint (hr) Value: 8
  misc_feature: MA Experiment 20000113 PARAMETER Experiment Name: At_42deg_Heat_cDNA_P Parameter: Tissue Value: Aerial
  misc_feature: MA Experiment ID: 20000171 Result: Down-regulated in Transcription
  misc_feature: MA Experiment 20000171 PARAMETER Experiment Name: At_42deg_Heat_P Parameter: Age (day) Value: 14
  misc_feature: MA Experiment 20000171 PARAMETER Experiment Name: At_42deg_Heat_P Parameter: Organism Value: A. thaliana
  misc_feature: MA Experiment 20000171 PARAMETER Experiment Name: At_42deg_Heat_P Parameter: Plant Line Value: WS
  misc_feature: MA Experiment 20000171 PARAMETER Experiment Name: At_42deg_Heat_P Parameter: Temperature (deg C) Value: 42 vs. 22
  misc_feature: MA Experiment 20000171 PARAMETER Experiment Name: At_42deg_Heat_P Parameter: Timepoint (hr) Value: 1
  misc_feature: MA Experiment 20000171 PARAMETER Experiment Name: At_42deg_Heat_P Parameter: Tissue Value: Aerial
  misc_feature: MA Experiment ID: 20000173 Result: Down-regulated in Transcription
  misc_feature: MA Experiment 20000173 PARAMETER Experiment Name: At_42deg_Heat_P Parameter: Age (day) Value: 14
  misc_feature: MA Experiment 20000173 PARAMETER Experiment Name: At_42deg_Heat_P Parameter: Organism Value: A. thaliana
  misc_feature: MA Experiment 20000173 PARAMETER Experiment Name: At_42deg_Heat_P Parameter: Plant Line Value: WS
  misc_feature: MA Experiment 20000173 PARAMETER Experiment Name: At_42deg_Heat_P Parameter: Temperature (deg C) Value: 42 vs. 22
  misc_feature: MA Experiment 20000173 PARAMETER Experiment Name: At_42deg_Heat_P Parameter: Timepoint (hr) Value: 6
  misc_feature: MA Experiment 20000173 PARAMETER Experiment Name: At_42deg_Heat_P Parameter: Tissue Value: Aerial
  misc_feature: MA Experiment ID: 20000180 Result: Up-regulated in Transcription
  misc_feature: MA Experiment 20000180 PARAMETER Experiment Name: At_Germinating_Seeds_P Parameter: Age (hr) Value: 24 vs. 0
  misc_feature: MA Experiment 20000180 PARAMETER Experiment Name: At_Germinating_Seeds_P Parameter: Tissue Value: Germinating Seeds
  misc_feature: MA Experiment ID: 20000213 Result: Down-regulated in Transcription
  misc_feature: MA Experiment 20000213 PARAMETER Experiment Name: At_4deg_Cold_P Parameter: Timepoint (hr) Value: 2
  misc_feature: MA Experiment ID: 20000224 Result: Down-regulated in Transcription
  misc_feature: MA Experiment ID: 20000234 Result: Down-regulated in Transcription
  misc_feature: MA Experiment 20000234 PARAMETER Experiment Name: At_Siliques_P Parameter: Age (day) Value: 21
  misc_feature: MA Experiment 20000234 PARAMETER Experiment Name: At_Siliques_P Parameter: Organism Value: A. thaliana
  misc_feature: MA Experiment 20000234 PARAMETER Experiment Name: At_Siliques_P Parameter: Plant Line Value: WS
  misc_feature: MA Experiment 20000234 PARAMETER Experiment Name: At_Siliques_P Parameter: Tissue Value: Less Than 5mm Siliques vs. Whole Plant
  misc_feature: MA Experiment ID: 20000235 Result: Down-regulated in Transcription
  misc_feature: MA Experiment 20000235 PARAMETER Experiment Name: At_Siliques_P Parameter: Age (day) Value: 21
  misc_feature: MA Experiment 20000235 PARAMETER Experiment Name: At_Siliques_P Parameter: Organism Value: A. thaliana
  misc_feature: MA Experiment 20000235 PARAMETER Experiment Name: At_Siliques_P Parameter: Plant Line Value: WS
  misc_feature: MA Experiment 20000235 PARAMETER Experiment Name: At_Siliques_P Parameter: Tissue Value: 5-10mm Siliques vs. Whole Plant
  misc_feature: MA Experiment ID: 20000268 Result: Down-regulated in Transcription
  misc_feature: MA Experiment 20000268 PARAMETER Experiment Name: At_100mM_NaCl__P Parameter: Age (day) Value: 14
  misc_feature: MA Experiment 20000268 PARAMETER Experiment Name: At_100mM_NaCl__P Parameter: Organism Value: A. thaliana
  misc_feature: MA Experiment 20000268 PARAMETER Experiment Name: At_100mM_NaCl__P Parameter: Plant Line Value: WS
  misc_feature: MA Experiment 20000268 PARAMETER Experiment Name: At_100mM_NaCl__P Parameter: Timepoint (hr) Value: 6
  misc_feature: MA Experiment 20000268 PARAMETER Experiment Name: At_100mM_NaCl__P Parameter: Tissue Value: Whole Plant
  misc_feature: MA Experiment 20000268 PARAMETER Experiment Name: At_100mM_NaCl__P Parameter: Treatment Value: 100mM NaCl vs. No Treatment
  misc_feature: MA Experiment ID: 20000794 Result: Up-regulated in Transcription
  misc_feature: MA Experiment 20000794 PARAMETER Experiment Name: At_Petals_P Parameter: Age (day) Value: 23-25 days
  misc_feature: MA Experiment 20000794 PARAMETER Experiment Name: At_Petals_P Parameter: Plant Line Value: WS
  misc_feature: MA Experiment 20000794 PARAMETER Experiment Name: At_Petals_P Parameter: Tissue Value: Petals vs. Whole plant
  misc_feature: MA Experiment ID: 20001248 Result: Up-regulated in Transcription
  misc_feature: MA Experiment 20001248 PARAMETER Experiment Name: At_Far-red-induction_P Parameter: Age (day) Value: 7
  misc_feature: MA Experiment 20001248 PARAMETER Experiment Name: At_Far-red-induction_P Parameter: Light Value: Far-red vs. White
  misc_feature: MA Experiment 20001248 PARAMETER Experiment Name: At_Far-red-induction_P Parameter: Organism Value: A. thaliana
  misc_feature: MA Experiment 20001248 PARAMETER Experiment Name: At_Far-red-induction_P Parameter: Plant Line Value: Columbia
  misc_feature: MA Experiment 20001248 PARAMETER Experiment Name: At_Far-red-induction_P Parameter: Timepoint (hr) Value: 4
  misc_feature: MA Experiment 20001248 PARAMETER Experiment Name: At_Far-red-induction_P Parameter: Tissue Value: Whole Plant
  misc_feature: MA Experiment ID: 20001450 Result: Up-regulated in Transcription
  misc_feature: MA Experiment 20001450 PARAMETER Experiment Name: At_Far-red-induction_P Parameter: Age (day) Value: 7
  misc_feature: MA Experiment 20001450 PARAMETER Experiment Name: At_Far-red-induction_P Parameter: Light Value: Far-red vs. White
  misc_feature: MA Experiment 20001450 PARAMETER Experiment Name: At_Far-red-induction_P Parameter: Organism Value: A. thaliana
  misc_feature: MA Experiment 20001450 PARAMETER Experiment Name: At_Far-red-induction_P Parameter: Plant Line Value: Columbia
  misc_feature: MA Experiment 20001450 PARAMETER Experiment Name: At_Far-red-induction_P Parameter: Timepoint (hr) Value: 8
  misc_feature: MA Experiment 20001450 PARAMETER Experiment Name: At_Far-red-induction_P Parameter: Tissue Value: Whole Plant
  misc_feature: MA Experiment ID: 20001451 Result: Up-regulated in Transcription
  misc_feature: MA Experiment 20001451 PARAMETER Experiment Name: At_Far-red-induction_P Parameter: Age (day) Value: 7
  misc_feature: MA Experiment 20001451 PARAMETER Experiment Name: At_Far-red-induction_P Parameter: Light Value: Far-red vs. White
  misc_feature: MA Experiment 20001451 PARAMETER Experiment Name: At_Far-red-induction_P Parameter: Organism Value: A. thaliana
  misc_feature: MA Experiment 20001451 PARAMETER Experiment Name: At_Far-red-induction_P Parameter: Plant Line Value: Columbia
  misc_feature: MA Experiment 20001451 PARAMETER Experiment Name: At_Far-red-induction_P Parameter: Timepoint (hr) Value: 24
  misc_feature: MA Experiment 20001451 PARAMETER Experiment Name: At_Far-red-induction_P Parameter: Tissue Value: Whole Plant
  misc_feature: MA Experiment ID: 20001555 Result: Down-regulated in Transcription
  misc_feature: MA Experiment 20001555 PARAMETER Experiment Name: At_Drought_Soil_Dry_P Parameter: Age (day) Value: 24
  misc_feature: MA Experiment 20001555 PARAMETER Experiment Name: At_Drought_Soil_Dry_P Parameter: Organism Value: A. thaliana
  misc_feature: MA Experiment 20001555 PARAMETER Experiment Name: At_Drought_Soil_Dry_P Parameter: Plant Line Value: WS
  misc_feature: MA Experiment 20001555 PARAMETER Experiment Name: At_Drought_Soil_Dry_P Parameter: Post Timepoint (hr) Value: None
  misc_feature: MA Experiment 20001555 PARAMETER Experiment Name: At_Drought_Soil_Dry_P Parameter: Post-Treatment Value: None
  misc_feature: MA Experiment 20001555 PARAMETER Experiment Name: At_Drought_Soil_Dry_P Parameter: Timepoint (day) Value: 10
  misc_feature: MA Experiment 20001555 PARAMETER Experiment Name: At_Drought_Soil_Dry_P Parameter: Treatment Value: Drought vs. No Drought
  misc_feature: MA Experiment ID: 20001556 Result: Down-regulated in Transcription
  misc_feature: MA Experiment 20001556 PARAMETER Experiment Name: At_Drought_Soil_Dry_P Parameter: Age (day) Value: 26
  misc_feature: MA Experiment 20001556 PARAMETER Experiment Name: At_Drought_Soil_Dry_P Parameter: Organism Value: A. thaliana
  misc_feature: MA Experiment 20001556 PARAMETER Experiment Name: At_Drought_Soil_Dry_P Parameter: Plant Line Value: WS
  misc_feature: MA Experiment 20001556 PARAMETER Experiment Name: At_Drought_Soil_Dry_P Parameter: Post Timepoint (hr) Value: None
  misc_feature: MA Experiment 20001556 PARAMETER Experiment Name: At_Drought_Soil_Dry_P Parameter: Post-Treatment Value: None
  misc_feature: MA Experiment 20001556 PARAMETER Experiment Name: At_Drought_Soil_Dry_P Parameter: Timepoint (day) Value: 12
  misc_feature: MA Experiment 20001556 PARAMETER Experiment Name: At_Drought_Soil_Dry_P Parameter: Treatment Value: Drought vs. No Drought
  misc_feature: MA Experiment ID: 20001559 Result: Down-regulated in Transcription
  misc_feature: MA Experiment 20001559 PARAMETER Experiment Name: At_Drought_Soil_Dry_P Parameter: Age (day) Value: 28
  misc_feature: MA Experiment 20001559 PARAMETER Experiment Name: At_Drought_Soil_Dry_P Parameter: Organism Value: A. thaliana
  misc_feature: MA Experiment 20001559 PARAMETER Experiment Name: At_Drought_Soil_Dry_P Parameter: Plant Line Value: WS
  misc_feature: MA Experiment 20001559 PARAMETER Experiment Name: At_Drought_Soil_Dry_P Parameter: Post Timepoint (hr) Value: 29
  misc_feature: MA Experiment 20001559 PARAMETER Experiment Name: At_Drought_Soil_Dry_P Parameter: Post-Treatment Value: Re-Water vs. No Drought
  misc_feature: MA Experiment 20001559 PARAMETER Experiment Name: At_Drought_Soil_Dry_P Parameter: Timepoint (day) Value: 14
  misc_feature: MA Experiment 20001559 PARAMETER Experiment Name: At_Drought_Soil_Dry_P Parameter: Treatment Value: Drought vs. No Drought
  misc_feature: MA Experiment ID: 20001761 Result: Up-regulated in Transcription
  misc_feature: MA Experiment 20001761 PARAMETER Experiment Name: At_50mM_NH4NO3_L-to-H_P Parameter: Timepoint (hr) Value: 4
  misc_feature: MA Experiment 20001761 PARAMETER Experiment Name: At_50mM_NH4NO3_L-to-H_P Parameter: Tissue Value: Siliques
  misc_feature: MA Experiment 20001761 PARAMETER Experiment Name: At_50mM_NH4NO3_L-to-H_P Parameter: Treatment Value: 50mM NH4NO3 vs 100mM Mannitol
  misc_feature: MA Experiment ID: 20001905 Result: Down-regulated in Transcription
  misc_feature: MA Experiment 20001905 PARAMETER Experiment Name: At_Drought_Reproduction_P Parameter: Age (day) Value: 40
  misc_feature: MA Experiment 20001905 PARAMETER Experiment Name: At_Drought_Reproduction_P Parameter: Organism Value: A. thaliana
  misc_feature: MA Experiment 20001905 PARAMETER Experiment Name: At_Drought_Reproduction_P Parameter: Plant Line Value: WS
  misc_feature: MA Experiment 20001905 PARAMETER Experiment Name: At_Drought_Reproduction_P Parameter: Timepoint (day) Value: 10
  misc_feature: MA Experiment 20001905 PARAMETER Experiment Name: At_Drought_Reproduction_P Parameter: Tissue Value: Rosettes
  misc_feature: MA Experiment 20001905 PARAMETER Experiment Name: At_Drought_Reproduction_P Parameter: Treatment Value: Drought vs. No Drought
  misc_feature: MA Experiment ID: 20001906 Result: Down-regulated in Transcription
  misc_feature: MA Experiment 20001906 PARAMETER Experiment Name: At_Drought_Reproduction_P Parameter: Age (day) Value: 35
  misc_feature: MA Experiment 20001906 PARAMETER Experiment Name: At_Drought_Reproduction_P Parameter: Organism Value: A. thaliana
  misc_feature: MA Experiment 20001906 PARAMETER Experiment Name: At_Drought_Reproduction_P Parameter: Plant Line Value: WS
  misc_feature: MA Experiment 20001906 PARAMETER Experiment Name: At_Drought_Reproduction_P Parameter: Timepoint (day) Value: 5
  misc_feature: MA Experiment 20001906 PARAMETER Experiment Name: At_Drought_Reproduction_P Parameter: Tissue Value: Siliques
  misc_feature: MA Experiment 20001906 PARAMETER Experiment Name: At_Drought_Reproduction_P Parameter: Treatment Value: Drought vs. No Drought
  misc_feature: MA Experiment ID: 20001911 Result: Down-regulated in Transcription
  misc_feature: MA Experiment 20001911 PARAMETER Experiment Name: At_Drought_Reproduction_P Parameter: Age (day) Value: 40
  misc_feature: MA Experiment 20001911 PARAMETER Experiment Name: At_Drought_Reproduction_P Parameter: Organism Value: A. thaliana
  misc_feature: MA Experiment 20001911 PARAMETER Experiment Name: At_Drought_Reproduction_P Parameter: Plant Line Value: WS
  misc_feature: MA Experiment 20001911 PARAMETER Experiment Name: At_Drought_Reproduction_P Parameter: Timepoint (day) Value: 10
  misc_feature: MA Experiment 20001911 PARAMETER Experiment Name: At_Drought_Reproduction_P Parameter: Tissue Value: Flowers
  misc_feature: MA Experiment 20001911 PARAMETER Experiment Name: At_Drought_Reproduction_P Parameter: Treatment Value: Drought vs. No Drought
gttgtgcaaaagaacagaatgagttctaagtttgatatcggctccttaagcatagtaatgactctgcttatttgcttcttattattatctttggctccaaaacttgaggctgagctcgcaacggtccaacatgctccaaaccccgatggctctatcagttttctggtgattggagattggggtaggcatggactctacaaccaatcccaagttgccctccagatggggagaatcggggaggagatggatatcaattttgtggtatcgacgggtgataacatctacgataacgggatgaaaagtatcgatgatcccgcctttcaactctcctttagtaatatctacacttctcctagcctgcaaaagccttggtaccttgtattggggaatcacgactatagaggagatgttgaggcacaattgagtcctatcctcagatctatggatagccgttggatttgcatgagatccttcatcgttgacgctgagatcgcagagctcttctttgtcgacacaactccttttgtagatgcttatttcctcagtccacaagaccaaacttacgactggagcggcgtatcaccgcgaaaatcctaccttcagaccatcttaacggagttggagatgggtctaagagaatcaagtgcaaaatggaaaattgtggtgggtcaccatgctataaagagtgcttccattcatgggaataccaaagagcttgaatctctcctcttacccatccttgaggcgaataaagttgatctctatatgaacggtcatgatcattgcttgcaacatataagcacatcacaaagcccaattcagtttctaacgagtggtggtgggtcaaaggcatggagaggctattacaattggacaacaccagaggatatgaaatttttctacgatggacaaggtttcatgtcagttaagatcactagatcagaattgagtgtcgttttttatgatgtctccggcaatagtttgcataagtgggacacatcgaaaatgttagactcggatttttatttcccattgtaattcacatgaaaatcagttaaagcacataaattctacatataaataaatatgattactatgagtgg

SEQ ID NO: 100454 - protein, 345 aa, Arabidopsis thaliana; identical to SEQ ID NO: 21345
  peptide (1)..(345): Ceres Seq. ID no. 13605160
  misc_feature (52)..(263): Pfam Name: Calcineurin-like phosphoesterase Pfam Description: Calcineurin-like phosphoesterase
  misc_feature (7)..(345): Homolog of NCBI NO: 22329781 NR Description: calcineurin-like phosphoesterase family thaliana] >gi|17978997|gb|AAL47459.1| At1g25230/F4F7_8 thaliana] >gi|22655338|gb|AAM98261.1| At1g25230/F4F7_8
  misc_feature (7)..(345): Homolog of NCBI NO: 25752248 NR Description: probable acid phosphatase (EC 3.1.3.2) F4F7.38
  misc_feature (37)..(343): Homolog of NCBI NO: 30683951 NR Description: calcineurin-like phosphoesterase family thaliana] >gi|24030193|gb|AAN41277.1| putative purple acid
  misc_feature (37)..(343): Homolog of NCBI NO: 30911094 NR Description: putative purple acid phosphatase [Arabidopsis
  misc_feature (37)..(343): Homolog of NCBI NO: 25752249 NR Description: probable acid phosphatase (EC 3.1.3.2) F10B6.10
  misc_feature (7)..(335): Homolog of NCBI NO: 22325419 NR Description: calcineurin-like phosphoesterase family thaliana] >gi|17529296|gb|AAL38875.1| putative purple acid [Arabidopsis thaliana] >gi|20257479|gb|AAM15909.1|AF492660_1
  misc_feature (2)..(337): Homolog of NCBI NO: 18401643 NR Description: calcineurin-like phosphoesterase family thaliana] >gi|6624897|emb|CAB63938.1| acid phosphatase type 5
  misc_feature (15)..(337): Homolog of NCBI NO: 21536860 NR Description: acid phosphatase type 5 [Arabidopsis thaliana]
  misc_feature (37)..(339): Homolog of NCBI NO: 39918795 NR Description: putative acid phosphatase [Lupinus luteus]

SEQ ID NO: 100455 - protein, 339 aa, Arabidopsis thaliana; identical to SEQ ID NO: 21346
  peptide (1)..(339): Ceres Seq. ID no. 13605161
  misc_feature (46)..(257): Pfam Name: Calcineurin-like phosphoesterase Pfam Description: Calcineurin-like phosphoesterase
  misc_feature (1)..(339): Homolog of NCBI NO: 22329781 NR Description: calcineurin-like phosphoesterase family thaliana] >gi|17978997|gb|AAL47459.1| At1g25230/F4F7_8 thaliana] >gi|22655338|gb|AAM98261.1| At1g25230/F4F7_8
  misc_feature (1)..(339): Homolog of NCBI NO: 25752248 NR Description: probable acid phosphatase (EC 3.1.3.2) F4F7.38
  misc_feature (31)..(337): Homolog of NCBI NO: 30683951 NR Description: calcineurin-like phosphoesterase family thaliana] >gi|24030193|gb|AAN41277.1| putative purple acid
  misc_feature (31)..(337): Homolog of NCBI NO: 30911094 NR Description: putative purple acid phosphatase [Arabidopsis
  misc_feature (31)..(337): Homolog of NCBI NO: 25752249 NR Description: probable acid phosphatase (EC 3.1.3.2) F10B6.10
  misc_feature (1)..(329): Homolog of NCBI NO: 22325419 NR Description: calcineurin-like phosphoesterase family thaliana] >gi|17529296|gb|AAL38875.1| putative purple acid [Arabidopsis thaliana] >gi|20257479|gb|AAM15909.1|AF492660_1
  misc_feature (1)..(331): Homolog of NCBI NO: 18401643 NR Description: calcineurin-like phosphoesterase family thaliana] >gi|6624897|emb|CAB63938.1| acid phosphatase type 5
  misc_feature (9)..(331): Homolog of NCBI NO: 21536860 NR Description: acid phosphatase type 5 [Arabidopsis thaliana]
  misc_feature (31)..(333): Homolog of NCBI NO: 39918795 NR Description: putative acid phosphatase [Lupinus luteus]

SEQ ID NO: 100456 - protein, 326 aa, Arabidopsis thaliana; identical to SEQ ID NO: 21347
  peptide (1)..(326): Ceres Seq. ID no. 13605162
  misc_feature (33)..(244): Pfam Name: Calcineurin-like phosphoesterase Pfam Description: Calcineurin-like phosphoesterase
  misc_feature (1)..(326): Homolog of NCBI NO: 22329781 NR Description: calcineurin-like phosphoesterase family thaliana] >gi|17978997|gb|AAL47459.1| At1g25230/F4F7_8 thaliana] >gi|22655338|gb|AAM98261.1| At1g25230/F4F7_8
  misc_feature (1)..(326): Homolog of NCBI NO: 25752248 NR Description: probable acid phosphatase (EC 3.1.3.2) F4F7.38
  misc_feature (18)..(324): Homolog of NCBI NO: 30683951 NR Description: calcineurin-like phosphoesterase family thaliana] >gi|24030193|gb|AAN41277.1| putative purple acid
  misc_feature (18)..(324): Homolog of NCBI NO: 30911094 NR Description: putative purple acid phosphatase [Arabidopsis
  misc_feature (18)..(324): Homolog of NCBI NO: 25752249 NR Description: probable acid phosphatase (EC 3.1.3.2) F10B6.10
  misc_feature (1)..(316): Homolog of NCBI NO: 22325419 NR Description: calcineurin-like phosphoesterase family thaliana] >gi|17529296|gb|AAL38875.1| putative purple acid [Arabidopsis thaliana] >gi|20257479|gb|AAM15909.1|AF492660_1
  misc_feature (1)..(318): Homolog of NCBI NO: 18401643 NR Description: calcineurin-like phosphoesterase family thaliana] >gi|6624897|emb|CAB63938.1| acid phosphatase type 5
  misc_feature (1)..(318): Homolog of NCBI NO: 21536860 NR Description: acid phosphatase type 5 [Arabidopsis thaliana]
  misc_feature (18)..(320): Homolog of NCBI NO: 39918795 NR Description: putative acid phosphatase [Lupinus luteus]

SEQ ID NO: 100457 - DNA, 1467 bp, Arabidopsis thaliana
  misc_feature (1)..(1467): Ceres Seq. ID no. 13605167
  misc_feature: MA Experiment ID: 108462 Result: Down-regulated in Transcription
  misc_feature: MA Experiment 108462 PARAMETER Experiment Name: At_Germinating_Seeds_cDNA_P Parameter: Age (day) Value: 2 vs. 0
  misc_feature: MA Experiment 108462 PARAMETER Experiment Name: At_Germinating_Seeds_cDNA_P Parameter: Tissue Value: Germinating Seeds
  misc_feature: MA Experiment ID: 108464 Result: Down-regulated in Transcription
  misc_feature: MA Experiment 108464 PARAMETER Experiment Name: At_Germinating_Seeds_cDNA_P Parameter: Age (day) Value: 4 vs. 0
  misc_feature: MA Experiment 108464 PARAMETER Experiment Name: At_Germinating_Seeds_cDNA_P Parameter: Tissue Value: Germinating Seeds
atacgcaaacaaagtctcttcctttacccgtctacacgttcgaattttttctccgggtcgggtcaatgtcaagaacgacgagaattgtatataatcgtcgattcacgtggccgggtttatcatttactgctggatctcgttttcaattttgagtcagattccccccaattgagagattctagggttttaagatgattgaacatgggaactctacctttgattaccggagtattagagaagtcgctgcaaacgccggcgccggagccaccgcaggggctatcgcggcgacttttgtttgtccattagatgtgatcaaaacaaggttacaggttcttggtctccctgaagctccagcctctggtcaaagaggtggtgtaatcattacaagtctgaagaatataattaaggaagaaggttataggggaatgtatcgagggctttcaccaaccatcatagctctccttccaaattgggctgtctacttctcagtttatgggaagctaaaggatgtgctgcagtcaagtgatggcaagcttagtattgggtcaaacatgatagctgcagctggtgctggagctgccacatctattgcaactaatccgctttgggttgtcaagacaagattaatgacgcaaggaattaggcctggtgtggtaccttacaaaagtgtaatgtctgcatttagtaggatttgtcatgaagaaggagtgcgagggttgtacagtggcatattgccttctttggcgggagtaagccatgtcgcgatccagtttccagcttatgaaaaaattaagcaatacatggcaaagatggataatacatccgtggagaatctgagtcctgggaatgttgctattgcctcctccatcgcgaaagtgatcgcctctattttgacttacccacacgaggtaattagggcgaagcttcaagaacaagggcagattagaaatgctgagactaagtattcaggagtcattgattgcatcacaaaggtgttcagaagcgaagggattcctgggttgtaccgtggatgtgccactaatctactgaggacaactccatcagcagttattacatttacaacctatgagatgatgcttaggtttttccgacaagttgtgccaccagagactaataggtcggatgatcgcagaagagaagaagaaagaaagaatttagttagccgacgaggagaagaagaagataaagatttgggtttgagagaatcacaaactcaatctaataagatcagcactccccatatccctcttggaagcaaataaaactttttcagactcaagccatgcttcataggttttctttttttcgatgccatgttccaactacgtaatttttccccatgcggtgattgagttgtaaccttttctcgtggttctaacaaatgtgtaaactatcaataaactactttttggcccttttgatgatcagtgagtatttgaagatcgt

SEQ ID NO: 100458 - protein, 363 aa, Arabidopsis thaliana; identical to SEQ ID NO: 22211
  peptide (1)..(363): Ceres Seq. ID no. 13605168
  misc_feature (1)..(363): Homolog of NCBI NO: 18395659 NR Description: mitochondrial carrier protein family [Arabidopsis >gi|20260666|gb|AAM13231.1| unknown protein [Arabidopsis
  misc_feature (1)..(363): Homolog of NCBI NO: 11067279 NR Description: unknown protein [Arabidopsis thaliana]
  misc_feature (112)..(363): Homolog of NCBI NO: 25403521 NR Description: probable mitochondrial carrier protein [imported] Arabidopsis thaliana >gi|12321512|gb|AAG50815.1|AC079281_17
  misc_feature (1)..(96): Homolog of NCBI NO: 25403521 NR Description: probable mitochondrial carrier protein [imported] Arabidopsis thaliana >gi|12321512|gb|AAG50815.1|AC079281_17
  misc_feature (15)..(313): Homolog of NCBI NO: 18407372 NR Description: mitochondrial carrier protein family [Arabidopsis >gi|13937206|gb|AAK50096.1|AF372957_1 At2g47490/T30B22.21 thaliana] >gi|18491125|gb|AAL69531.1| At2g47490/T30B22.21
  misc_feature (27)..(311): Homolog of NCBI NO: 34914648 NR Description: OSJNBa0054L14.23 [Oryza sativa (japonica
  misc_feature (50)..(313): Homolog of NCBI NO: 7487567 NR Description: probable mitochondrial carrier protein [imported]
  misc_feature (20)..(248): Homolog of NCBI NO: 32421779 NR Description: hypothetical protein [Neurospora crassa] hypothetical protein [Neurospora crassa] related to folate transporter/carrier (mitochondrial) [Neurospora
  misc_feature (247)..(308): Homolog of NCBI NO: 32421779 NR Description: hypothetical protein [Neurospora crassa] hypothetical protein [Neurospora crassa] related to folate transporter/carrier (mitochondrial) [Neurospora
  misc_feature (23)..(305): Homolog of NCBI NO: 6320831 NR Description: Hypothetical ORF; Yel006wp [Saccharomyces >gi|731395|sp|P39953|YEA6_YEAST PUTATIVE MITOCHONDRIAL CARRIER

SEQ ID NO: 100459 - protein, 285 aa, Arabidopsis thaliana; identical to SEQ ID NO: 22212
  peptide (1)..(285): Ceres Seq. ID no. 13605169
  misc_feature (1)..(285): Homolog of NCBI NO: 18395659 NR Description: mitochondrial carrier protein family [Arabidopsis >gi|20260666|gb|AAM13231.1| unknown protein [Arabidopsis
  misc_feature (1)..(285): Homolog of NCBI NO: 11067279 NR Description: unknown protein [Arabidopsis thaliana]
  misc_feature (34)..(285): Homolog of NCBI NO: 25403521 NR Description: probable mitochondrial carrier protein [imported] Arabidopsis thaliana >gi|12321512|gb|AAG50815.1|AC079281_17
  misc_feature (1)..(18): Homolog of NCBI NO: 25403521 NR Description: probable mitochondrial carrier protein [imported] Arabidopsis thaliana >gi|12321512|gb|AAG50815.1|AC079281_17
  misc_feature (1)..(235): Homolog of NCBI NO: 18407372 NR Description: mitochondrial carrier protein family [Arabidopsis >gi|13937206|gb|AAK50096.1|AF372957_1 At2g47490/T30B22.21 thaliana] >gi|18491125|gb|AAL69531.1| At2g47490/T30B22.21
  misc_feature (1)..(233): Homolog of NCBI NO: 34914648 NR Description: OSJNBa0054L14.23 [Oryza sativa (japonica
  misc_feature (1)..(235): Homolog of NCBI NO: 7487567 NR Description: probable mitochondrial carrier protein [imported]
  misc_feature (1)..(170): Homolog of NCBI NO: 32421779 NR Description: hypothetical protein [Neurospora crassa] hypothetical protein [Neurospora crassa] related to folate transporter/carrier (mitochondrial) [Neurospora
  misc_feature (169)..(230): Homolog of NCBI NO: 32421779 NR Description: hypothetical protein [Neurospora crassa] hypothetical protein [Neurospora crassa] related to folate transporter/carrier (mitochondrial) [Neurospora
  misc_feature (1)..(227): Homolog of NCBI NO: 6320831 NR Description: Hypothetical ORF; Yel006wp [Saccharomyces >gi|731395|sp|P39953|YEA6_YEAST PUTATIVE MITOCHONDRIAL CARRIER

SEQ ID NO: 100460 - protein, 243 aa, Arabidopsis thaliana; identical to SEQ ID NO: 22213
  peptide (1)..(243): Ceres Seq. ID no. 13605170
  misc_feature (1)..(243): Homolog of NCBI NO: 18395659 NR Description: mitochondrial carrier protein family [Arabidopsis >gi|20260666|gb|AAM13231.1| unknown protein [Arabidopsis
  misc_feature (1)..(243): Homolog of NCBI NO: 11067279 NR Description: unknown protein [Arabidopsis thaliana]
  misc_feature (1)..(243): Homolog of NCBI NO: 25403521 NR Description: probable mitochondrial carrier protein [imported] Arabidopsis thaliana >gi|12321512|gb|AAG50815.1|AC079281_17
  misc_feature (1)..(193): Homolog of NCBI NO: 18407372 NR Description: mitochondrial carrier protein family [Arabidopsis >gi|13937206|gb|AAK50096.1|AF372957_1 At2g47490/T30B22.21 thaliana] >gi|18491125|gb|AAL69531.1| At2g47490/T30B22.21
  misc_feature (1)..(191): Homolog of NCBI NO: 34914648 NR Description: OSJNBa0054L14.23 [Oryza sativa (japonica
  misc_feature (1)..(193): Homolog of NCBI NO: 7487567 NR Description: probable mitochondrial carrier protein [imported]
  misc_feature (1)..(128): Homolog of NCBI NO: 32421779 NR Description: hypothetical protein [Neurospora crassa] hypothetical protein [Neurospora crassa] related to folate transporter/carrier (mitochondrial) [Neurospora
  misc_feature (127)..(188): Homolog of NCBI NO: 32421779 NR Description: hypothetical protein [Neurospora crassa] hypothetical protein [Neurospora crassa] related to folate transporter/carrier (mitochondrial) [Neurospora
  misc_feature (1)..(185): Homolog of NCBI NO: 6320831 NR Description: Hypothetical ORF; Yel006wp [Saccharomyces >gi|731395|sp|P39953|YEA6_YEAST PUTATIVE MITOCHONDRIAL CARRIER
  misc_feature (1)..(180): Homolog of NCBI NO: 6322185 NR Description: Hypothetical ORF; Yil006wp [Saccharomyces >gi|731775|sp|P40556|YIA6_YEAST PUTATIVE MITOCHONDRIAL CARRIER

SEQ ID NO: 100461 - DNA, 1305 bp, Arabidopsis thaliana
  misc_feature (1)..(1305): Ceres Seq. ID no. 13605175
  misc_feature: MA Experiment ID: 108595 Result: Down-regulated in Transcription
  misc_feature: MA Experiment 108595 PARAMETER Experiment Name: At_Ler-pi_Ovule_cDNA_P Parameter: Plant Line Value: null
atcttcttcgttttcctttttcctcaatcgacgacgatcaatctccaacctccaccgcattgattcctctgcttccggttcaatgtcgctgctaaaccaactcttcaaccgtgggatctttggcgccaaatgcaagacaagcttgaacttggcgatagctcgaatgaaattgctgcaaaacaagagagatatgcagcttaaacatatgaagaaggagatagctcacttcttgcaagctggacaagaacccattgctcgaattcgggtggagcatgtgatcagagaaatgaatttatgggcagcttatgagatattggagctattctgcgagtttatacttgctcgtgttccaattcttgaaagtgaaaaggaatgcccgagagagttgagagaggctattgctagcattatctttgctgctccaaggtgctctgaagtacctgatcttcttcaaataaagaatctgtttggtacaaaatatggaaaagaatttatcatggttgcttctgagcttcgtccggattctggtgtcaatcgtactatcattgagaagctttctcctaccagtccatctggagcggcaaggctcaagatgttaaaggaaattgcgcaggagtacagtttgaattgggattcttctgccacggaagcagagttcatgaagagccatgaagacctactgggtggagctaagcaaatacatcgtcaagatggtatctctgaatctcgaccgtcccaacaaggctacggtcagtcttcggtttctagggaagttgaaagtctgcctgcagaggccacacagagattccaaaagcttcaagctcaaaacccagtgagcaaaagcatgccatcatctaagctgacttcagcctttcaagctcctcctgatactagacggaatcagactgatgtaatggagatagctcgagctgccctagctagcgctgatcgtgcaacagcagctgctcgtgctgctgcgcaactagtgaatgtctcttatggggctactacacccacagtagcagcagaagggaagcccttaaacttaatgtagttgccacgtcgtcatttgtgaataaaagcaactgtatttgcttcatacacagaaagaaggataacgatgttttctttggtacttcataggtttggaaaaatgagtatgctaaagagtattggtagattatgctcgagtgttgtgaccttaggttgattcaaaagacagtgatgtttaaatgtgacatacagatataactctgaagtttgttggttttacaaaatctatgcagaaaaaacaacattatcatg

SEQ ID NO: 100462 - protein, 350 aa, Arabidopsis thaliana; identical to SEQ ID NO: 27959
  peptide (1)..(350): Ceres Seq. ID no. 13605176
  misc_feature (50)..(171): Pfam Name: Eukaryotic protein of unknown function, DUF292 Pfam Description: Eukaryotic protein of unknown function, DUF292
  misc_feature (28)..(350): Homolog of NCBI NO: 18395668 NR Description: expressed protein [Arabidopsis thaliana]
  misc_feature (28)..(350): Homolog of NCBI NO: 21595428 NR Description: unknown [Arabidopsis thaliana]
  misc_feature (28)..(232): Homolog of NCBI NO: 15218545 NR Description: expressed protein [Arabidopsis thaliana]
  misc_feature (28)..(331): Homolog of NCBI NO: 34911298 NR Description: P0519D04.18 [Oryza sativa (japonica
  misc_feature (38)..(229): Homolog of NCBI NO: 40253290 NR Description: unknown protein [Oryza sativa (japonica
  misc_feature (28)..(179): Homolog of NCBI NO: 33589706 NR Description: At1g34220 [Arabidopsis thaliana]
  misc_feature (181)..(232): Homolog of NCBI NO: 33589706 NR Description: At1g34220 [Arabidopsis thaliana]
  misc_feature (50)..(232): Homolog of NCBI NO: 15237108 NR Description: expressed protein [Arabidopsis thaliana]
  misc_feature (21)..(227): Homolog of NCBI NO: 34910388 NR Description: P0692C11.15 [Oryza sativa (japonica
  misc_feature (31)..(289): Homolog of NCBI NO: 30688332 NR Description: expressed protein [Arabidopsis thaliana]

SEQ ID NO: 100463 - protein, 323 aa, Arabidopsis thaliana; identical to SEQ ID NO: 27960
  peptide (1)..(323): Ceres Seq. ID no. 13605177
  misc_feature (23)..(144): Pfam Name: Eukaryotic protein of unknown function, DUF292 Pfam Description: Eukaryotic protein of unknown function, DUF292
  misc_feature (1)..(323): Homolog of NCBI NO: 18395668 NR Description: expressed protein [Arabidopsis thaliana]
  misc_feature (1)..(323): Homolog of NCBI NO: 21595428 NR Description: unknown [Arabidopsis thaliana]
  misc_feature (1)..(205): Homolog of NCBI NO: 15218545 NR Description: expressed protein [Arabidopsis thaliana]
  misc_feature (1)..(304): Homolog of NCBI NO: 34911298 NR Description: P0519D04.18 [Oryza sativa (japonica
  misc_feature (11)..(202): Homolog of NCBI NO: 40253290 NR Description: unknown protein [Oryza sativa (japonica
  misc_feature (1)..(152): Homolog of NCBI NO: 33589706 NR Description: At1g34220 [Arabidopsis thaliana]
  misc_feature (154)..(205): Homolog of NCBI NO: 33589706 NR Description: At1g34220 [Arabidopsis thaliana]
  misc_feature (23)..(205): Homolog of NCBI NO: 15237108 NR Description: expressed protein [Arabidopsis thaliana]
  misc_feature (1)..(200): Homolog of NCBI NO: 34910388 NR Description: P0692C11.15 [Oryza sativa (japonica
  misc_feature (4)..(262): Homolog of NCBI NO: 30688332 NR Description: expressed protein [Arabidopsis thaliana]

SEQ ID NO: 100464 - protein, 296 aa, Arabidopsis thaliana; identical to SEQ ID NO: 27961
  peptide (1)..(296): Ceres Seq. ID no. 13605178
  misc_feature (1)..(117): Pfam Name: Eukaryotic protein of unknown function, DUF292 Pfam Description: Eukaryotic protein of unknown function, DUF292
  misc_feature (1)..(296): Homolog of NCBI NO: 18395668 NR Description: expressed protein [Arabidopsis thaliana]
  misc_feature (1)..(296): Homolog of NCBI NO: 21595428 NR Description: unknown [Arabidopsis thaliana]
  misc_feature (1)..(178): Homolog of NCBI NO: 15218545 NR Description: expressed protein [Arabidopsis thaliana]
  misc_feature (1)..(277): Homolog of NCBI NO: 34911298 NR Description: P0519D04.18 [Oryza sativa (japonica
  misc_feature (1)..(175): Homolog of NCBI NO: 40253290 NR Description: unknown protein [Oryza sativa (japonica
  misc_feature (1)..(125): Homolog of NCBI NO: 33589706 NR Description: At1g34220 [Arabidopsis thaliana]
  misc_feature (127)..(178): Homolog of NCBI NO: 33589706 NR Description: At1g34220 [Arabidopsis thaliana]
  misc_feature (1)..(178): Homolog of NCBI NO: 15237108 NR Description: expressed protein [Arabidopsis thaliana]
  misc_feature (1)..(173): Homolog of NCBI NO: 34910388 NR Description: P0692C11.15 [Oryza sativa (japonica
  misc_feature (1)..(235): Homolog of NCBI NO: 30688332 NR Description: expressed protein [Arabidopsis thaliana]

SEQ ID NO: 100465 - DNA, 1925 bp, Arabidopsis thaliana
  misc_feature (1)..(1925): Ceres Seq. ID no. 13605191
  misc_feature: MA Experiment ID: 108463 Result: Down-regulated in Transcription
  misc_feature: MA Experiment 108463 PARAMETER Experiment Name: At_Germinating_Seeds_cDNA_P Parameter: Age (day) Value: 3 vs. 0
  misc_feature: MA Experiment 108463 PARAMETER Experiment Name: At_Germinating_Seeds_cDNA_P Parameter: Tissue Value: Germinating Seeds
  misc_feature: MA Experiment ID: 108464 Result: Down-regulated in Transcription
  misc_feature: MA Experiment 108464 PARAMETER Experiment Name: At_Germinating_Seeds_cDNA_P Parameter: Age (day) Value: 4 vs. 0
  misc_feature: MA Experiment 108464 PARAMETER Experiment Name: At_Germinating_Seeds_cDNA_P Parameter: Tissue Value: Germinating Seeds
  misc_feature: MA Experiment ID: 108577 Result: Down-regulated in Transcription
  misc_feature: MA Experiment 108577 PARAMETER Experiment Name: At_42deg_Heat_cDNA_P Parameter: Temperature (deg C) Value: 42 vs. 22
  misc_feature: MA Experiment 108577 PARAMETER Experiment Name: At_42deg_Heat_cDNA_P Parameter: Timepoint (hr) Value: 6
  misc_feature: MA Experiment 108577 PARAMETER Experiment Name: At_42deg_Heat_cDNA_P Parameter: Tissue Value: Aerial
  misc_feature: MA Experiment ID: 108579 Result: Down-regulated in Transcription
  misc_feature: MA Experiment 108579 PARAMETER Experiment Name: At_4deg_Cold_cDNA_P Parameter: Temperature (deg C) Value: 4 vs. 22
  misc_feature: MA Experiment 108579 PARAMETER Experiment Name: At_4deg_Cold_cDNA_P Parameter: Timepoint (hr) Value: 6
  misc_feature: MA Experiment 108579 PARAMETER Experiment Name: At_4deg_Cold_cDNA_P Parameter: Tissue Value: Aerial
  misc_feature: MA Experiment ID: 108594 Result: Up-regulated in Transcription
  misc_feature: MA Experiment 108594 PARAMETER Experiment Name: At_Ler-rhl_Root_cDNA_P Parameter: Plant Line Value: null
  misc_feature: MA Experiment ID: 20000113 Result: Down-regulated in Transcription
  misc_feature: MA Experiment 20000113 PARAMETER Experiment Name: At_42deg_Heat_cDNA_P Parameter: Temperature (deg C) Value: 42 vs. 22
  misc_feature: MA Experiment 20000113 PARAMETER Experiment Name: At_42deg_Heat_cDNA_P Parameter: Timepoint (hr) Value: 8
  misc_feature: MA Experiment 20000113 PARAMETER Experiment Name: At_42deg_Heat_cDNA_P Parameter: Tissue Value: Aerial
  misc_feature: MA Experiment ID: 20000180 Result: Up-regulated in Transcription
  misc_feature: MA Experiment 20000180 PARAMETER Experiment Name: At_Germinating_Seeds_P Parameter: Age (hr) Value: 24 vs. 0
  misc_feature: MA Experiment 20000180 PARAMETER Experiment Name: At_Germinating_Seeds_P Parameter: Tissue Value: Germinating Seeds
  misc_feature: MA Experiment ID: 20000265 Result: Up-regulated in Transcription
  misc_feature: MA Experiment 20000265 PARAMETER Experiment Name: At_Open_Flower_P Parameter: Age (day) Value: 21
  misc_feature: MA Experiment 20000265 PARAMETER Experiment Name: At_Open_Flower_P Parameter: Plant Line Value: WS
  misc_feature: MA Experiment 20000265 PARAMETER Experiment Name: At_Open_Flower_P Parameter: Tissue Value: Closed Flower vs. Whole Plant
  misc_feature: MA Experiment ID: 20000286 Result: Up-regulated in Transcription
  misc_feature: MA Experiment 20000286 PARAMETER Experiment Name: At_Open_Flower_P Parameter: Age (day) Value: 21
  misc_feature: MA Experiment 20000286 PARAMETER Experiment Name: At_Open_Flower_P Parameter: Plant Line Value: WS
  misc_feature: MA Experiment 20000286 PARAMETER Experiment Name: At_Open_Flower_P Parameter: Tissue Value: Half Open vs. Whole Plant
  misc_feature: MA Experiment ID: 20000443 Result: Down-regulated in Transcription
  misc_feature: MA Experiment 20000443 PARAMETER Experiment Name: At_1uM_BR-BRZ__P Parameter: Tissue Value: Shoot Apices
  misc_feature: MA Experiment 20000443 PARAMETER Experiment Name: At_1uM_BR-BRZ__P Parameter: Treatment Value: 1uM BRZ vs. No Treatment
  misc_feature: MA Experiment ID: 20000495 Result: Up-regulated in Transcription
  misc_feature: MA Experiment 20000495 PARAMETER Experiment Name: At_Guard_Cells_P Parameter: Harvest Date Value: 8/2/2002
  misc_feature: MA Experiment 20000495 PARAMETER Experiment Name: At_Guard_Cells_P Parameter: Organism Value: A. thaliana
  misc_feature: MA Experiment 20000495 PARAMETER Experiment Name: At_Guard_Cells_P Parameter: Tissue Value: Guard Cells vs. Leaves
cttcttaaactcgtttttaactctccatctctaaaaagaccatcaacgctcttctctttattgcagcagaaacagaacccagttcaataaagctttttggtaagaaaatttgaaaggaaaagatatttgaaaactcgtagagagaaagtggcacagaatctgaaattctgacactttttaccacgaataatgattctcttttgaaaaacatgactcaatgttttctttatctttttctctgaattaaggtttgtttgtacttaaagtatgctcctttatctaccgttgactgattctactcttttattctcaacttttctctgatttgctcgtgtgtttacttcaattcctcagttcttgtgtagaaagttgagtttcatgtgatcaaaattggggctttactacttttaagagaatgagtgacaaagacgagtttgccgcaaagaagaaggatttggtcaatacgccagtggatttgtatcctccggagaatccaatgttgggtccttctccgatgatggattcattcagagaaactctttggcatgatggtggtttcaatgtccacacagatgcagacacttcctttagaggtaataataatattgatatacctcttgaaatgggttggaatatggctcagttccctgcagattcaggattcattgagcgtgctgcaaagttttctttttttggatgtggtgaaatgatgatgaaccaacaacaatcatctcttggagttccagattcaactggcttgtttcttcaagatacacagattcctagtggatccaaactagataatggtcctcttactgatgcatctaagttagtgaaagagagatcgattaataatgtatcagaggattctcaatctagtggaggtaatggtcatgatgatgctaagtgtgggcaaacatcttccaaggggtttagtagtaagaagaggaaaagaattgggaaggattgtgaagaagaagaagataaaaagcaaaaggatgagcaaagtccaacttcaaatgcgaacaagacaaacagtgagaagcaaccttctgattctttaaaggatgggtatattcacatgagggcacgaagaggccaggctactaatagtcacagtcttgctgaaagagtaagaagagaaaaaatcagtgaaaggatgaagttcttgcaagatcttgtgccaggttgcgacaaggtgactggtaaggcagttatgctcgatgaaatcattaactatgtgcaatcacttcaatgccaaatcgagtttttatcgatgaaactttcggctgtgaatcctgtgctcgattttaacctcgaaagcctccttgcaaaagatgctcttcaatcatctgcaccgacatttccccacaacatgtcgatgctttatcctcctgtatcgtatctctctcaaacaggattcatgcaaccgaacatttcctcaatgtcgctattgagtggaggattaaaacggcaggaaacacatggatatgaaagtgatcaccacaatcttgtccacatgaaccatgaaaccggcactgcacctgatcatgaagatacaacagctgacatgaaggtggagccgtagatgtttcttcttcactttgtactcagctttagctgctgatatagtgcgccgcggtcgagaattttattaacttcgaacagaagagtgaaaacgaaacagaggaggaagcagattttgtctttgaaatattgacagctcccggagaaagagtcgagagtaagaatcaacaatgttgtgtaatgaatagctactgtctgcttcttttgtagctattgtctgcttcttttttgtacatataaatccatgcaagggaagaggaatgttaattcaacacatgtgcacaacatgatcatcacatatgtacttcaacttgatcaatcggaattagctctacttg

SEQ ID NO: 100466 - protein, 390 aa, Arabidopsis thaliana; identical to SEQ ID NO: 40832
  peptide (1)..(390): Ceres Seq. ID no. 13605192
  misc_feature (230)..(280): Pfam Name: Helix-loop-helix DNA-binding domain Pfam Description: Helix-loop-helix DNA-binding domain
  misc_feature (1)..(390): Homolog of NCBI NO: 15222679 NR Description: bHLH protein [Arabidopsis thaliana]
  misc_feature (147)..(390): Homolog of NCBI NO: 15221563 NR Description: DNA-binding protein -related [Arabidopsis
  misc_feature (147)..(390): Homolog of NCBI NO: 20127044 NR Description: putative bHLH transcription factor [Arabidopsis
  misc_feature (147)..(390): Homolog of NCBI NO: 30697769 NR Description: DNA-binding protein -related [Arabidopsis
  misc_feature (61)..(347): Homolog of NCBI NO: 15239013 NR Description: bHLH protein family [Arabidopsis thaliana] contains similarity to unknown [Arabidopsis thaliana] >gi|27754625|gb|AAO22758.1| unknown
  misc_feature (61)..(347): Homolog of NCBI NO: 20127085 NR Description: putative bHLH transcription factor [Arabidopsis
  misc_feature (68)..(349): Homolog of NCBI NO: 34906952 NR Description: DNA-binding protein-like protein [Oryza sativa
  misc_feature (155)..(316): Homolog of NCBI NO: 34898690 NR Description: hypothetical protein [Oryza sativa (japonica group)] >gi|11862964|dbj|BAB19345.1| hypothetical protein [Oryza
  misc_feature (167)..(368): Homolog of NCBI NO: 15231450 NR Description: bHLH protein family [Arabidopsis thaliana]
  misc_feature (167)..(368): Homolog of NCBI NO: 20127064 NR Description: putative bHLH transcription factor [Arabidopsis

SEQ ID NO: 100467 - protein, 363 aa, Arabidopsis thaliana; identical to SEQ ID NO: 40833
  peptide (1)..(363): Ceres Seq. ID no. 13605193
  misc_feature (203)..(253): Pfam Name: Helix-loop-helix DNA-binding domain Pfam Description: Helix-loop-helix DNA-binding domain
  misc_feature (1)..(363): Homolog of NCBI NO: 15222679 NR Description: bHLH protein [Arabidopsis thaliana]
  misc_feature (120)..(363): Homolog of NCBI NO: 15221563 NR Description: DNA-binding protein -related [Arabidopsis
  misc_feature (120)..(363): Homolog of NCBI NO: 20127044 NR Description: putative bHLH transcription factor [Arabidopsis
  misc_feature (120)..(363): Homolog of NCBI NO: 30697769 NR Description: DNA-binding protein -related [Arabidopsis
  misc_feature (34)..(320): Homolog of NCBI NO: 15239013 NR Description: bHLH protein family [Arabidopsis thaliana] contains similarity to unknown [Arabidopsis thaliana] >gi|27754625|gb|AAO22758.1| unknown
  misc_feature (34)..(320): Homolog of NCBI NO: 20127085 NR Description: putative bHLH transcription factor [Arabidopsis
  misc_feature (41)..(322): Homolog of NCBI NO: 34906952 NR Description: DNA-binding protein-like protein [Oryza sativa
  misc_feature (128)..(289): Homolog of NCBI NO: 34898690 NR Description: hypothetical protein [Oryza sativa (japonica group)] >gi|11862964|dbj|BAB19345.1| hypothetical protein [Oryza
  misc_feature (140)..(341): Homolog of NCBI NO: 15231450 NR Description: bHLH protein family [Arabidopsis thaliana]
  misc_feature (140)..(341): Homolog of NCBI NO: 20127064 NR Description: putative bHLH transcription factor [Arabidopsis

SEQ ID NO: 100468 - protein, 357 aa, Arabidopsis thaliana; identical to SEQ ID NO: 40834
  peptide (1)..(357): Ceres Seq. ID no. 13605194
  misc_feature (197)..(247): Pfam Name: Helix-loop-helix DNA-binding domain Pfam Description: Helix-loop-helix DNA-binding domain
  misc_feature (1)..(357): Homolog of NCBI NO: 15222679 NR Description: bHLH protein [Arabidopsis thaliana]
  misc_feature (114)..(357): Homolog of NCBI NO: 15221563 NR Description: DNA-binding protein -related [Arabidopsis
  misc_feature (114)..(357): Homolog of NCBI NO: 20127044 NR Description: putative bHLH transcription factor [Arabidopsis
  misc_feature (114)..(357): Homolog of NCBI NO: 30697769 NR Description: DNA-binding protein -related [Arabidopsis
  misc_feature (28)..(314): Homolog of NCBI NO: 15239013 NR Description: bHLH protein family [Arabidopsis thaliana] contains similarity to unknown [Arabidopsis thaliana] >gi|27754625|gb|AAO22758.1| unknown
  misc_feature (28)..(314): Homolog of NCBI NO: 20127085 NR Description: putative bHLH transcription factor [Arabidopsis
  misc_feature (35)..(316): Homolog of NCBI NO: 34906952 NR Description: DNA-binding protein-like protein [Oryza sativa
  misc_feature (122)..(283): Homolog of NCBI NO: 34898690 NR Description: hypothetical protein [Oryza sativa (japonica group)] >gi|11862964|dbj|BAB19345.1| hypothetical protein [Oryza
  misc_feature (134)..(335): Homolog of NCBI NO: 15231450 NR Description: bHLH protein family [Arabidopsis thaliana]
  misc_feature (134)..(335): Homolog of NCBI NO: 20127064 NR Description: putative bHLH transcription factor [Arabidopsis

SEQ ID NO: 100469 - DNA, 1707 bp, Arabidopsis thaliana
  misc_feature (1)..(1707): Ceres Seq. ID no. 13605199
  misc_feature: MA Experiment ID: 108461 Result: Up-regulated in Transcription
  misc_feature: MA Experiment 108461 PARAMETER Experiment Name: At_Germinating_Seeds_cDNA_P Parameter: Age (day) Value: 1 vs. 0
  misc_feature: MA Experiment 108461 PARAMETER Experiment Name: At_Germinating_Seeds_cDNA_P Parameter: Tissue Value: Germinating Seeds
  misc_feature: MA Experiment ID: 20000171 Result: Down-regulated in Transcription
  misc_feature: MA Experiment 20000171 PARAMETER Experiment Name: At_42deg_Heat_P Parameter: Age (day) Value: 14
  misc_feature: MA Experiment 20000171 PARAMETER Experiment Name: At_42deg_Heat_P Parameter: Organism Value: A. thaliana
  misc_feature: MA Experiment 20000171 PARAMETER Experiment Name: At_42deg_Heat_P Parameter: Plant Line Value: WS
  misc_feature: MA Experiment 20000171 PARAMETER Experiment Name: At_42deg_Heat_P Parameter: Temperature (deg C) Value: 42 vs. 22
  misc_feature: MA Experiment 20000171 PARAMETER Experiment Name: At_42deg_Heat_P Parameter: Timepoint (hr) Value: 1
  misc_feature: MA Experiment 20000171 PARAMETER Experiment Name: At_42deg_Heat_P Parameter: Tissue Value: Aerial
  misc_feature: MA Experiment ID: 20000173 Result: Down-regulated in Transcription
  misc_feature: MA Experiment 20000173 PARAMETER Experiment Name: At_42deg_Heat_P Parameter: Age (day) Value: 14
  misc_feature: MA Experiment 20000173 PARAMETER Experiment Name: At_42deg_Heat_P Parameter: Organism Value: A. thaliana
  misc_feature: MA Experiment 20000173 PARAMETER Experiment Name: At_42deg_Heat_P Parameter: Plant Line Value: WS
  misc_feature: MA Experiment 20000173 PARAMETER Experiment Name: At_42deg_Heat_P Parameter: Temperature (deg C) Value: 42 vs. 22
  misc_feature: MA Experiment 20000173 PARAMETER Experiment Name: At_42deg_Heat_P Parameter: Timepoint (hr) Value: 6
  misc_feature: MA Experiment 20000173 PARAMETER Experiment Name: At_42deg_Heat_P Parameter: Tissue Value: Aerial
  misc_feature: MA Experiment ID: 20000179 Result: Up-regulated in Transcription
  misc_feature: MA Experiment 20000179 PARAMETER Experiment Name: At_Germinating_Seeds_P Parameter: Age (hr) Value: 6 vs. 0
  misc_feature: MA Experiment 20000179 PARAMETER Experiment Name: At_Germinating_Seeds_P Parameter: Tissue Value: Germinating Seeds
  misc_feature: MA Experiment ID: 20000180 Result: Up-regulated in Transcription
  misc_feature: MA Experiment 20000180 PARAMETER Experiment Name: At_Germinating_Seeds_P Parameter: Age (hr) Value: 24 vs. 0
  misc_feature: MA Experiment 20000180 PARAMETER Experiment Name: At_Germinating_Seeds_P Parameter: Tissue Value: Germinating Seeds
  misc_feature: MA Experiment ID: 20000185 Result: Down-regulated in Transcription
  misc_feature: MA Experiment 20000185 PARAMETER Experiment Name: At_Roots__P Parameter: Age (day) Value: 7 vs. 21
  misc_feature: MA Experiment 20000185 PARAMETER Experiment Name: At_Roots__P Parameter: Organism Value: A. thaliana
  misc_feature: MA Experiment 20000185 PARAMETER Experiment Name: At_Roots__P Parameter: Tissue Value: Roots vs. Whole Plant
  misc_feature: MA Experiment ID: 20000439 Result: Down-regulated in Transcription
  misc_feature: MA Experiment 20000439 PARAMETER Experiment Name: At_Roots__P Parameter: Age (day) Value: 14 vs. 21
  misc_feature: MA Experiment 20000439 PARAMETER Experiment Name: At_Roots__P Parameter: Organism Value: A. thaliana
  misc_feature: MA Experiment 20000439 PARAMETER Experiment Name: At_Roots__P Parameter: Tissue Value: Roots vs. Whole Plant
  misc_feature: MA Experiment ID: 20000794 Result: Down-regulated in Transcription
  misc_feature: MA Experiment 20000794 PARAMETER Experiment Name: At_Petals_P Parameter: Age (day) Value: 23-25 days
  misc_feature: MA Experiment 20000794 PARAMETER Experiment Name: At_Petals_P Parameter: Plant Line Value: WS
  misc_feature: MA Experiment 20000794 PARAMETER Experiment Name: At_Petals_P Parameter: Tissue Value: Petals vs. Whole plant
  misc_feature: MA Experiment ID: 20001247 Result: Up-regulated in Transcription
  misc_feature: MA Experiment 20001247 PARAMETER Experiment Name: At_Far-red-induction_P Parameter: Age (day) Value: 7
  misc_feature: MA Experiment 20001247 PARAMETER Experiment Name: At_Far-red-induction_P Parameter: Light Value: Far-red vs. White
  misc_feature: MA Experiment 20001247 PARAMETER Experiment Name: At_Far-red-induction_P Parameter: Organism Value: A. thaliana
  misc_feature: MA Experiment 20001247 PARAMETER Experiment Name: At_Far-red-induction_P Parameter: Plant Line Value: Columbia
  misc_feature: MA Experiment 20001247 PARAMETER Experiment Name: At_Far-red-induction_P Parameter: Timepoint (hr) Value: 1
  misc_feature: MA Experiment 20001247 PARAMETER Experiment Name: At_Far-red-induction_P Parameter: Tissue Value: Whole Plant
  misc_feature: MA Experiment ID: 20001557 Result: Up-regulated in Transcription
  misc_feature: MA Experiment 20001557 PARAMETER Experiment Name: At_Drought_Soil_Dry_P Parameter: Age (day) Value: 27
  misc_feature: MA Experiment 20001557 PARAMETER Experiment Name: At_Drought_Soil_Dry_P Parameter: Organism Value: A. thaliana
  misc_feature: MA Experiment 20001557 PARAMETER Experiment Name: At_Drought_Soil_Dry_P Parameter: Plant Line Value: WS
  misc_feature: MA Experiment 20001557 PARAMETER Experiment Name: At_Drought_Soil_Dry_P Parameter: Post Timepoint (hr) Value: 3
  misc_feature: MA Experiment 20001557 PARAMETER Experiment Name: At_Drought_Soil_Dry_P Parameter: Post-Treatment Value: Re-Water vs. No Drought
  misc_feature: MA Experiment 20001557 PARAMETER Experiment Name: At_Drought_Soil_Dry_P Parameter: Timepoint (day) Value: 13
  misc_feature: MA Experiment 20001557 PARAMETER Experiment Name: At_Drought_Soil_Dry_P Parameter: Treatment Value: Drought vs. No Drought
  misc_feature: MA Experiment ID: 20001558 Result: Up-regulated in Transcription
  misc_feature: MA Experiment 20001558 PARAMETER Experiment Name: At_Drought_Soil_Dry_P Parameter: Age (day) Value: 27
  misc_feature: MA Experiment 20001558 PARAMETER Experiment Name: At_Drought_Soil_Dry_P Parameter: Organism Value: A. thaliana
  misc_feature: MA Experiment 20001558 PARAMETER Experiment Name: At_Drought_Soil_Dry_P Parameter: Plant Line Value: WS
  misc_feature: MA Experiment 20001558 PARAMETER Experiment Name: At_Drought_Soil_Dry_P Parameter: Post Timepoint (hr) Value: 6
  misc_feature: MA Experiment 20001558 PARAMETER Experiment Name: At_Drought_Soil_Dry_P Parameter: Post-Treatment Value: Re-Water vs. No Drought
  misc_feature: MA Experiment 20001558 PARAMETER Experiment Name: At_Drought_Soil_Dry_P Parameter: Timepoint (day) Value: 13
  misc_feature: MA Experiment 20001558 PARAMETER Experiment Name: At_Drought_Soil_Dry_P Parameter: Treatment Value: Drought vs. No Drought
  misc_feature: MA Experiment ID: 20001911 Result: Down-regulated in Transcription
  misc_feature: MA Experiment 20001911 PARAMETER Experiment Name: At_Drought_Reproduction_P Parameter: Age (day) Value: 40
  misc_feature: MA Experiment 20001911 PARAMETER Experiment Name: At_Drought_Reproduction_P Parameter: Organism Value: A. thaliana
  misc_feature: MA Experiment 20001911 PARAMETER Experiment Name: At_Drought_Reproduction_P Parameter: Plant Line Value: WS
  misc_feature: MA Experiment 20001911 PARAMETER Experiment Name: At_Drought_Reproduction_P Parameter: Timepoint (day) Value: 10
  misc_feature: MA Experiment 20001911 PARAMETER Experiment Name: At_Drought_Reproduction_P Parameter: Tissue Value: Flowers
  misc_feature: MA Experiment 20001911 PARAMETER Experiment Name: At_Drought_Reproduction_P Parameter: Treatment Value: Drought vs. No Drought
caaattccatcatcgtcgccgcaacaatatcttttgctttctctctcattcttcaccagtaacaagcccatctctcgattcttcactctcaaggaaggagacgttttgaaaatcagaaatggtgaagatatgctgcataggagctggttatgtgggtggtccaaccatggcggtgatggctcttaagtgtcctgagattgaagtagtcgttgtggatatctctgaaccaaggatcaatgcttggaacagtgataggcttcctatttacgagccgggattggaagatgtggtgaaacaatgcagagggaaaaacctcttctttagcacagacgtggagaaacatgtatttgagagtgatattgtatttgtctcagttaacactccaaccaaaacacaaggtcttggtgctggcaaagctgctgatcttacttactgggagagtgctgctcggatgatcgctgatgtctccaaatctagcaaaatcgttgttgagaaatccacggttcctgtgaggacagcagaggctattgaaaagatactgacacataacagcaaaggcatagagtttcagattctctctaaccctgaatttcttgctgagggtactgcaattaaggatctttataacccagaccgtgtgttgattggtggtagggatactgcagcagggcaaaaggctattaaagctttaagagatgtttatgctcattgggttccagtggaacaaatcatttgcacgaacctgtggtccgctgagctctctaagcttgcagcaaatgcattcttagctcagaggatatcatctgtcaatgccatgtcagctctatgtgaggcaactggcgctgatgttacacaagttgcgcatgccgtgggtacagatactagaattggtccaaagttcttgaatgctagtgttggttttggtggatcatgtttccaaaaggacatcctaaatcttatctatatttgtgaatgcaacggcttgcccgaagcagctaattactggaaacaagtcgtaaaggtgaacgactatcagaaaatacggtttgcaaaccgggttgtttcttcaatgtttaacacagtctcgggcaagaaaatcgcgatcctcggttttgccttcaagaaggacacaggtgacacgagagagactccagcgattgatgtttgtaacagattagttgcagacaaggccaagctgagcatatacgacccacaagttcttgaagaacagatcagaagagatctttccatggctaggtttgactgggaccaccctgttcctcttcagcagattaaagctgaaggtatctcagagcaagtgaatgtcgtctcagatgcttacgaggcaactaaagatgcgcacggcctatgtgtcttaaccgaatgggatgagtttaaatccttggacttcaagaaaatctttgacaatatgcagaaaccagcttttgtgttcgatggtaggaatgttgttgatgcagtgaagctgcgtgagatcggtttcatcgtctactccattggtaaaccgcttgattcatggctcaaggatatgcctgctgtggcatgaaggtgccaacttcaaccaaactatatgtcttttctaaaatatagtatcttaagattccttataaattctgttgtaaccaagctgaaacaatgatatgtatttgctgaatctgccttagctggaatagtatatgaatttctttg

SEQ ID NO: 100470 - protein, 481 aa, Arabidopsis thaliana; identical to SEQ ID NO: 39599
  peptide (1)..(481): Ceres Seq. ID no. 13605200
  misc_feature (2)..(200): Pfam Name: UDP-glucose/GDP-mannose dehydrogenase family, Pfam Description: UDP-glucose/GDP-mannose dehydrogenase family,

SEQ ID NO: 100471 - protein, 465 aa, Arabidopsis thaliana; identical to SEQ ID NO: 39600
  peptide (1)..(465): Ceres Seq. ID no. 13605201
  misc_feature (1)..(184): Pfam Name: UDP-glucose/GDP-mannose dehydrogenase family, Pfam Description: UDP-glucose/GDP-mannose dehydrogenase family,

SEQ ID NO: 100472 - protein, 462 aa, Arabidopsis thaliana; identical to SEQ ID NO: 39601
  peptide (1)..(462): Ceres Seq. ID no. 13605202
  misc_feature (1)..(181): Pfam Name: UDP-glucose/GDP-mannose dehydrogenase family, Pfam Description: UDP-glucose/GDP-mannose dehydrogenase family,

SEQ ID NO: 100473 - DNA, 1022 bp, Arabidopsis thaliana
  misc_feature (1)..(1022): Ceres Seq. ID no. 13605207
  misc_feature: MA Experiment ID: 108435 Result: Down-regulated in Transcription
  misc_feature: MA Experiment 108435 PARAMETER Experiment Name: At_stm_Mutants_cDNA_P Parameter: Plant Line Value: wt Landsburg vs stm
  misc_feature: MA Experiment 108435 PARAMETER Experiment Name: At_stm_Mutants_cDNA_P Parameter: Tissue Value: Shoot Apical Meristem Region
  misc_feature: MA Experiment ID: 108501 Result: Down-regulated in Transcription
  misc_feature: MA Experiment 108501 PARAMETER Experiment Name: At_ap2_floral_buds_cDNA_P Parameter: Plant Line Value: ap2 (Ler.)
  misc_feature: MA Experiment 108501 PARAMETER Experiment Name: At_ap2_floral_buds_cDNA_P Parameter: Tissue Value: Closed Flower
  misc_feature: MA Experiment ID: 108577 Result: Up-regulated in Transcription
  misc_feature: MA Experiment 108577 PARAMETER Experiment Name: At_42deg_Heat_cDNA_P Parameter: Temperature (deg C) Value: 42 vs. 22
  misc_feature: MA Experiment 108577 PARAMETER Experiment Name: At_42deg_Heat_cDNA_P Parameter: Timepoint (hr) Value: 6
  misc_feature: MA Experiment 108577 PARAMETER Experiment Name: At_42deg_Heat_cDNA_P Parameter: Tissue Value: Aerial
  misc_feature: MA Experiment ID: 20000179 Result: Up-regulated in Transcription
  misc_feature: MA Experiment 20000179 PARAMETER Experiment Name: At_Germinating_Seeds_P Parameter: Age (hr) Value: 6 vs. 0
  misc_feature: MA Experiment 20000179 PARAMETER Experiment Name: At_Germinating_Seeds_P Parameter: Tissue Value: Germinating Seeds
  misc_feature: MA Experiment ID: 20000184 Result: Down-regulated in Transcription
  misc_feature: MA Experiment 20000184 PARAMETER Experiment Name: At_Shoots__P Parameter: Age (day) Value: 7
  misc_feature: MA Experiment 20000184 PARAMETER Experiment Name: At_Shoots__P Parameter: Tissue Value: Shoots vs. Whole Plant
  misc_feature: MA Experiment ID: 20000224 Result: Up-regulated in Transcription
  misc_feature: MA Experiment ID: 20000234 Result: Down-regulated in Transcription
  misc_feature: MA Experiment 20000234 PARAMETER Experiment Name: At_Siliques_P Parameter: Age (day) Value: 21
  misc_feature: MA Experiment 20000234 PARAMETER Experiment Name: At_Siliques_P Parameter: Organism Value: A. thaliana
  misc_feature: MA Experiment 20000234 PARAMETER Experiment Name: At_Siliques_P Parameter: Plant Line Value: WS
  misc_feature: MA Experiment 20000234 PARAMETER Experiment Name: At_Siliques_P Parameter: Tissue Value: Less Than 5mm Siliques vs. Whole Plant
  misc_feature: MA Experiment ID: 20000264 Result: Down-regulated in Transcription
  misc_feature: MA Experiment 20000264 PARAMETER Experiment Name: At_Open_Flower_P Parameter: Age (day) Value: 21
  misc_feature: MA Experiment 20000264 PARAMETER Experiment Name: At_Open_Flower_P Parameter: Plant Line Value: WS
  misc_feature: MA Experiment 20000264 PARAMETER Experiment Name: At_Open_Flower_P Parameter: Tissue Value: Open Flower vs. Whole Plant
  misc_feature: MA Experiment ID: 20000265 Result: Down-regulated in Transcription
  misc_feature: MA Experiment 20000265 PARAMETER Experiment Name: At_Open_Flower_P Parameter: Age (day) Value: 21
  misc_feature: MA Experiment 20000265 PARAMETER Experiment Name: At_Open_Flower_P Parameter: Plant Line Value: WS
  misc_feature: MA Experiment 20000265 PARAMETER Experiment Name: At_Open_Flower_P Parameter: Tissue Value: Closed Flower vs. Whole Plant
  misc_feature: MA Experiment ID: 20000437 Result: Up-regulated in Transcription
  misc_feature: MA Experiment 20000437 PARAMETER Experiment Name: At_Drought_P Parameter: Age (day) Value: 8
  misc_feature: MA Experiment 20000437 PARAMETER Experiment Name: At_Drought_P Parameter: Organism Value: A. thaliana
  misc_feature: MA Experiment 20000437 PARAMETER Experiment Name: At_Drought_P Parameter: Plant Line Value: WS
  misc_feature: MA Experiment 20000437 PARAMETER Experiment Name: At_Drought_P Parameter: Timepoint (hr) Value: 24
  misc_feature: MA Experiment 20000437 PARAMETER Experiment Name: At_Drought_P Parameter: Tissue Value: Whole Plant
  misc_feature: MA Experiment 20000437 PARAMETER Experiment Name: At_Drought_P Parameter: Treatment Value: Drought vs. No Drought
  misc_feature: MA Experiment ID: 20000496 Result: Down-regulated in Transcription
  misc_feature: MA Experiment 20000496 PARAMETER Experiment Name: At_Guard_Cells_P Parameter: Harvest Date Value: 7/19/2002
  misc_feature: MA Experiment 20000496 PARAMETER Experiment Name: At_Guard_Cells_P Parameter: Organism Value: Canola
  misc_feature: MA Experiment 20000496 PARAMETER Experiment Name: At_Guard_Cells_P Parameter: Tissue Value: Guard Cells vs. Leaves
  misc_feature: MA Experiment ID: 20001557 Result: Down-regulated in Transcription
  misc_feature: MA Experiment 20001557 PARAMETER Experiment Name: At_Drought_Soil_Dry_P Parameter: Age (day) Value: 27
  misc_feature: MA Experiment 20001557 PARAMETER Experiment Name: At_Drought_Soil_Dry_P Parameter: Organism Value: A. thaliana
  misc_feature: MA Experiment 20001557 PARAMETER Experiment Name: At_Drought_Soil_Dry_P Parameter: Plant Line Value: WS
  misc_feature: MA Experiment 20001557 PARAMETER Experiment Name: At_Drought_Soil_Dry_P Parameter: Post Timepoint (hr) Value: 3
  misc_feature: MA Experiment 20001557 PARAMETER Experiment Name: At_Drought_Soil_Dry_P Parameter: Post-Treatment Value: Re-Water vs. No Drought
  misc_feature: MA Experiment 20001557 PARAMETER Experiment Name: At_Drought_Soil_Dry_P Parameter: Timepoint (day) Value: 13
  misc_feature: MA Experiment 20001557 PARAMETER Experiment Name: At_Drought_Soil_Dry_P Parameter: Treatment Value: Drought vs. No Drought
  misc_feature: MA Experiment ID: 20001558 Result: Down-regulated in Transcription
  misc_feature: MA Experiment 20001558 PARAMETER Experiment Name: At_Drought_Soil_Dry_P Parameter: Age (day) Value: 27
  misc_feature: MA Experiment 20001558 PARAMETER Experiment Name: At_Drought_Soil_Dry_P Parameter: Organism Value: A. thaliana
  misc_feature: MA Experiment 20001558 PARAMETER Experiment Name: At_Drought_Soil_Dry_P Parameter: Plant Line Value: WS
  misc_feature: MA Experiment 20001558 PARAMETER Experiment Name: At_Drought_Soil_Dry_P Parameter: Post Timepoint (hr) Value: 6
  misc_feature: MA Experiment 20001558 PARAMETER Experiment Name: At_Drought_Soil_Dry_P Parameter: Post-Treatment Value: Re-Water vs. No Drought
  misc_feature: MA Experiment 20001558 PARAMETER Experiment Name: At_Drought_Soil_Dry_P Parameter: Timepoint (day) Value: 13
  misc_feature: MA Experiment 20001558 PARAMETER Experiment Name: At_Drought_Soil_Dry_P Parameter: Treatment Value: Drought vs. No Drought
aaaacgcaccgctttgtttgattgttcctccttgtccccgagcagagaaatacaaaggaagaagaagaagagttgtttgattatctttaagcaaagaggaaactgttttgcttctagatccgatccaatccaatcaaacaaaggatccgattgatcagaaaaaatccaccaaatttctcaagatcgaaacatataattgaagatgagcgacgtatttgaagggtacgagcgtcaatactgcgagctctcaaccaatctctctagaaaatgtcactctgcatcggttctctccaacggagaggagaagaaggggaagattgctgagatcaagtctggaatagacgaagctgatgtcttgatccggaaaatggatcttgaggcaagaagtttgcagccgagtgctaaagctgtgtgtctttctaaactaagagagtataaatctgatctgaaccaattgaagaaggaattcaaacgagtctcttccgcagatgctaagccgtcttcccgtgaagagttgatggaatccggaatggcggatctgcatgcagtatctgctgatcaaagaggaagattggcaatgtccgtggagaggcttgaccaatcaagtgacagaatcagggagagtagaagactaatgctggagacagaagaggttggcatctcaattgtccaagatttgagtcagcaacgccaaaccctccttcatgcgcacaacaagcttcatggtgtggatgacgccattgacaagagcaagaaggtgttgacggctatgtcaaggagaatgactaggaacaaatggatcattacatcggtaatcgtggctctcgttctcgccatcatcttgatcatctcatacaagctttctcattaatatactcaaaaaacattattcatcgtgattgtgtatatatatatgatggttgatttactttgtaatggcccaagtggttacttgtatttttaagtacgatgtttgtattgaagtggcaacacttttaacattcataaggtttcccaagtct

SEQ ID NO: 100474 - protein, 222 aa, Arabidopsis thaliana
  peptide (1)..(222): Ceres Seq. ID no. 13605208
  misc_feature (1)..(222): Homolog of NCBI NO: 18396008 NR Description: v-SNARE protein AtVTI1b, putative [Arabidopsis >gi|9295720|gb|AAF87026.1|AC006535_4 T24P13.5 [Arabidopsis
  misc_feature (1)..(222): Homolog of NCBI NO: 6690276 NR Description: v-SNARE AtVTI1b [Arabidopsis thaliana]
  misc_feature (1)..(222): Homolog of NCBI NO: 27805772 NR Description: Vesicle transport v-SNARE 12 (AtVTI12) (Vesicle v- SNARE protein VTI1b) (Vesicle soluble NSF attachment protein
  misc_feature (1)..(222): Homolog of NCBI NO: 34910406 NR Description: putative vesicle transport v-SNARE protein [Oryza
  misc_feature (1)..(221): Homolog of NCBI NO: 15241780 NR Description: v-SNARE AtVTI1a (ZIG) [Arabidopsis thaliana]
  misc_feature (1)..(221): Homolog of NCBI NO: 6690274 NR Description: v-SNARE AtVTI1a [Arabidopsis thaliana]
  misc_feature (1)..(221): Homolog of NCBI NO: 15228600 NR Description: SNARE protein AtVTI13 [Arabidopsis thaliana]
  misc_feature (1)..(222): Homolog of NCBI NO: 34914100 NR Description: similar to vesicle transport protein [Oryza
  misc_feature (56)..(221): Homolog of NCBI NO: 26451552 NR Description: putative vesicle transport protein [Arabidopsis
  misc_feature (126)..(222): Homolog of NCBI NO: 26451851 NR Description: putative v-SNARE AtVTI1b [Arabidopsis thaliana]
MSDVFEGYERQYCELSTNLSRKCHSASVLSNGEEKKGKIAEIKSGIDEADVLIRKMDLEARSLQPSAKAVCLSKLREYKSDLNQLKKEFKRVSSADAKPSSREELMESGMADLHAVSADQRGRLAMSVERLDQSSDRIRESRRLMLETEEVGISIVQDLSQQRQTLLHAHNKLHGVDDAIDKSKKVLTAMSRRMTRNKWIITSVIVALVLAIILIISYKLSH

SEQ ID NO: 100475 - protein, 167 aa, Arabidopsis thaliana; identical to SEQ ID NO: 30816
  peptide (1)..(167): Ceres Seq. ID no. 13605209
  misc_feature (1)..(167): Homolog of NCBI NO: 18396008 NR Description: v-SNARE protein AtVTI1b, putative [Arabidopsis >gi|9295720|gb|AAF87026.1|AC006535_4 T24P13.5 [Arabidopsis
  misc_feature (1)..(167): Homolog of NCBI NO: 6690276 NR Description: v-SNARE AtVTI1b [Arabidopsis thaliana]
  misc_feature (1)..(167): Homolog of NCBI NO: 27805772 NR Description: Vesicle transport v-SNARE 12 (AtVTI12) (Vesicle v- SNARE protein VTI1b) (Vesicle soluble NSF attachment protein
  misc_feature (1)..(167): Homolog of NCBI NO: 34910406 NR Description: putative vesicle transport v-SNARE protein [Oryza
  misc_feature (1)..(166): Homolog of NCBI NO: 15241780 NR Description: v-SNARE AtVTI1a (ZIG) [Arabidopsis thaliana]
  misc_feature (1)..(166): Homolog of NCBI NO: 6690274 NR Description: v-SNARE AtVTI1a [Arabidopsis thaliana]
  misc_feature (1)..(166): Homolog of NCBI NO: 15228600 NR Description: SNARE protein AtVTI13 [Arabidopsis thaliana]
  misc_feature (1)..(167): Homolog of NCBI NO: 34914100 NR Description: similar to vesicle transport protein [Oryza
  misc_feature (1)..(166): Homolog of NCBI NO: 26451552 NR Description: putative vesicle transport protein [Arabidopsis
  misc_feature (71)..(167): Homolog of NCBI NO: 26451851 NR Description: putative v-SNARE AtVTI1b [Arabidopsis thaliana]

SEQ ID NO: 100476 - protein, 117 aa, Arabidopsis thaliana; identical to SEQ ID NO: 30817
  peptide (1)..(117): Ceres Seq. ID no. 13605210
  misc_feature (1)..(117): Homolog of NCBI NO: 18396008 NR Description: v-SNARE protein AtVTI1b, putative [Arabidopsis >gi|9295720|gb|AAF87026.1|AC006535_4 T24P13.5 [Arabidopsis
  misc_feature (1)..(117): Homolog of NCBI NO: 6690276 NR Description: v-SNARE AtVTI1b [Arabidopsis thaliana]
  misc_feature (1)..(117): Homolog of NCBI NO: 27805772 NR Description: Vesicle transport v-SNARE 12 (AtVTI12) (Vesicle v- SNARE protein VTI1b) (Vesicle soluble NSF attachment protein
  misc_feature (1)..(117): Homolog of NCBI NO: 34910406 NR Description: putative vesicle transport v-SNARE protein [Oryza
  misc_feature (1)..(116): Homolog of NCBI NO: 15241780 NR Description: v-SNARE AtVTI1a (ZIG) [Arabidopsis thaliana]
  misc_feature (1)..(116): Homolog of NCBI NO: 6690274 NR Description: v-SNARE AtVTI1a [Arabidopsis thaliana]
  misc_feature (1)..(116): Homolog of NCBI NO: 15228600 NR Description: SNARE protein AtVTI13 [Arabidopsis thaliana]
  misc_feature (1)..(117): Homolog of NCBI NO: 34914100 NR Description: similar to vesicle transport protein [Oryza
  misc_feature (1)..(116): Homolog of NCBI NO: 26451552 NR Description: putative vesicle transport protein [Arabidopsis
  misc_feature (21)..(117): Homolog of NCBI NO: 26451851 NR Description: putative v-SNARE AtVTI1b [Arabidopsis thaliana]

SEQ ID NO: 100477 - DNA, 868 bp, Arabidopsis thaliana
  misc_feature (1)..(868): Ceres Seq. ID no. 13605211
  misc_feature: MA Experiment ID: 108462 Result: Up-regulated in Transcription
  misc_feature: MA Experiment 108462 PARAMETER Experiment Name: At_Germinating_Seeds_cDNA_P Parameter: Age (day) Value: 2 vs. 0
  misc_feature: MA Experiment 108462 PARAMETER Experiment Name: At_Germinating_Seeds_cDNA_P Parameter: Tissue Value: Germinating Seeds
  misc_feature: MA Experiment ID: 108464 Result: Up-regulated in Transcription
  misc_feature: MA Experiment 108464 PARAMETER Experiment Name: At_Germinating_Seeds_cDNA_P Parameter: Age (day) Value: 4 vs. 0
  misc_feature: MA Experiment 108464 PARAMETER Experiment Name: At_Germinating_Seeds_cDNA_P Parameter: Tissue Value: Germinating Seeds
  misc_feature: MA Experiment ID: 108579 Result: Down-regulated in Transcription
  misc_feature: MA Experiment 108579 PARAMETER Experiment Name: At_4deg_Cold_cDNA_P Parameter: Temperature (deg C) Value: 4 vs. 22
  misc_feature: MA Experiment 108579 PARAMETER Experiment Name: At_4deg_Cold_cDNA_P Parameter: Timepoint (hr) Value: 6
  misc_feature: MA Experiment 108579 PARAMETER Experiment Name: At_4deg_Cold_cDNA_P Parameter: Tissue Value: Aerial
  misc_feature: MA Experiment ID: 108585 Result: Up-regulated in Transcription
  misc_feature: MA Experiment 108585 PARAMETER Experiment Name: At_5mM_NaNP_cDNA_P Parameter: Timepoint (hr) Value: 6
  misc_feature: MA Experiment 108585 PARAMETER Experiment Name: At_5mM_NaNP_cDNA_P Parameter: Tissue Value: Aerial
  misc_feature: MA Experiment 108585 PARAMETER Experiment Name: At_5mM_NaNP_cDNA_P Parameter: Treatment Value: null
  misc_feature: MA Experiment ID: 108668 Result: Up-regulated in Transcription
  misc_feature: MA Experiment 108668 PARAMETER Experiment Name: At_2mM_SA_cDNA_P Parameter: Plant Line Value: WS
  misc_feature: MA Experiment 108668 PARAMETER Experiment Name: At_2mM_SA_cDNA_P Parameter: Timepoint (hr) Value: 6
  misc_feature: MA Experiment 108668 PARAMETER Experiment Name: At_2mM_SA_cDNA_P Parameter: Treatment Value: 2mM SA vs. No Treatment
  misc_feature: MA Experiment ID: 20000090 Result: Up-regulated in Transcription
  misc_feature: MA Experiment ID: 20000179 Result: Up-regulated in Transcription
  misc_feature: MA Experiment 20000179 PARAMETER Experiment Name: At_Germinating_Seeds_P Parameter: Age (hr) Value: 6 vs. 0
  misc_feature: MA Experiment 20000179 PARAMETER Experiment Name: At_Germinating_Seeds_P Parameter: Tissue Value: Germinating Seeds
  misc_feature: MA Experiment ID: 20000180 Result: Up-regulated in Transcription
  misc_feature: MA Experiment 20000180 PARAMETER Experiment Name: At_Germinating_Seeds_P Parameter: Age (hr) Value: 24 vs. 0
  misc_feature: MA Experiment 20000180 PARAMETER Experiment Name: At_Germinating_Seeds_P Parameter: Tissue Value: Germinating Seeds
  misc_feature: MA Experiment ID: 20000182 Result: Up-regulated in Transcription
  misc_feature: MA Experiment 20000182 PARAMETER Experiment Name: At_2mM_SA_P Parameter: Age (day) Value: 14
  misc_feature: MA Experiment 20000182 PARAMETER Experiment Name: At_2mM_SA_P Parameter: Organism Value: A. thaliana
  misc_feature: MA Experiment 20000182 PARAMETER Experiment Name: At_2mM_SA_P Parameter: Plant Line Value: WS
  misc_feature: MA Experiment 20000182 PARAMETER Experiment Name: At_2mM_SA_P Parameter: Timepoint (hr) Value: 6
  misc_feature: MA Experiment 20000182 PARAMETER Experiment Name: At_2mM_SA_P Parameter: Tissue Value: Aerial
  misc_feature: MA Experiment 20000182 PARAMETER Experiment Name: At_2mM_SA_P Parameter: Treatment Value: 2mM SA vs. No Treatment
  misc_feature: MA Experiment ID: 20000184 Result: Down-regulated in Transcription
  misc_feature: MA Experiment 20000184 PARAMETER Experiment Name: At_Shoots__P Parameter: Age (day) Value: 7
  misc_feature: MA Experiment 20000184 PARAMETER Experiment Name: At_Shoots__P Parameter: Tissue Value: Shoots vs. Whole Plant
  misc_feature: MA Experiment ID: 20000438 Result: Down-regulated in Transcription
  misc_feature: MA Experiment 20000438 PARAMETER Experiment Name: At_Shoots__P Parameter: Age (day) Value: 14
  misc_feature: MA Experiment 20000438 PARAMETER Experiment Name: At_Shoots__P Parameter: Tissue Value: Shoots vs. Whole Plant
  misc_feature: MA Experiment ID: 20001557 Result: Down-regulated in Transcription
  misc_feature: MA Experiment 20001557 PARAMETER Experiment Name: At_Drought_Soil_Dry_P Parameter: Age (day) Value: 27
  misc_feature: MA Experiment 20001557 PARAMETER Experiment Name: At_Drought_Soil_Dry_P Parameter: Organism Value: A. thaliana
  misc_feature: MA Experiment 20001557 PARAMETER Experiment Name: At_Drought_Soil_Dry_P Parameter: Plant Line Value: WS
  misc_feature: MA Experiment 20001557 PARAMETER Experiment Name: At_Drought_Soil_Dry_P Parameter: Post Timepoint (hr) Value: 3
  misc_feature: MA Experiment 20001557 PARAMETER Experiment Name: At_Drought_Soil_Dry_P Parameter: Post-Treatment Value: Re-Water vs. No Drought
  misc_feature: MA Experiment 20001557 PARAMETER Experiment Name: At_Drought_Soil_Dry_P Parameter: Timepoint (day) Value: 13
  misc_feature: MA Experiment 20001557 PARAMETER Experiment Name: At_Drought_Soil_Dry_P Parameter: Treatment Value: Drought vs. No Drought
  misc_feature: MA Experiment ID: 20001558 Result: Down-regulated in Transcription
  misc_feature: MA Experiment 20001558 PARAMETER Experiment Name: At_Drought_Soil_Dry_P Parameter: Age (day) Value: 27
  misc_feature: MA Experiment 20001558 PARAMETER Experiment Name: At_Drought_Soil_Dry_P Parameter: Organism Value: A. thaliana
  misc_feature: MA Experiment 20001558 PARAMETER Experiment Name: At_Drought_Soil_Dry_P Parameter: Plant Line Value: WS
  misc_feature: MA Experiment 20001558 PARAMETER Experiment Name: At_Drought_Soil_Dry_P Parameter: Post Timepoint (hr) Value: 6
  misc_feature: MA Experiment 20001558 PARAMETER Experiment Name: At_Drought_Soil_Dry_P Parameter: Post-Treatment Value: Re-Water vs. No Drought
  misc_feature: MA Experiment 20001558 PARAMETER Experiment Name: At_Drought_Soil_Dry_P Parameter: Timepoint (day) Value: 13
  misc_feature: MA Experiment 20001558 PARAMETER Experiment Name: At_Drought_Soil_Dry_P Parameter: Treatment Value: Drought vs. No Drought
cttcgtcttccatctctctaccaactccacgatcaacgaaaccaaagatctctcttcaaagcttccaccatgtttctccgatcactcaatctctgtacaatactactcttcctagcgatttcatcacaagtttctcaatctctccacttcgaattgcaatctggtcgaacaaaatgtatatcggaagacataaaaagcaattcaatgaccgtcgggaagtacaccgtcgttaaccctaacgaagctcatccttctcctcaatctcacaagatctccatcagagtgacatcgagttacgggaacacgtatcatcacgcggaagatgtagaatcgggacaattcgcgttcacggcggtggagtctggagattacatggcttgttacacagctgttgatcataaacctgaggttacattgagtattgatttcgattggagaactggtgttcaatctaaaagctggagtagtgttgctaagaagagccaagtcgaagttatggagtttgatgtaaaaagacttattgaaaccgtcaattcgattcatgaagagatgttttatctcagagaaagggaagaagagatgcagaatctgaaccgggctactaactcgaaaatggcgtggttgagtttcctctctcttttcgtatgcttaggagtcgcgggaatgcagtttgtgcatttgaagacgtttttcgagaagaagaaagtcatctaagatggttagatgaaacaaatcccactcttttcttttcccaactcaaaggagtcttctattcctccatgagttttgtacatttagatctttacttttgagtatgtactctcggaactggaaattaaatgaatatgaaagtattgcccctttttgc

SEQ ID NO: 100478 - protein, 237 aa, Arabidopsis thaliana
  peptide (1)..(237): Ceres Seq. ID no. 13605212
  misc_feature (32)..(237): Pfam Name: emp24/gp25L/p24 family Pfam Description: emp24/gp25L/p24 family
  misc_feature (24)..(237): Homolog of NCBI NO: 18396016 NR Description: emp24/gp25L/p24 family [Arabidopsis thaliana]
  misc_feature (24)..(237): Homolog of NCBI NO: 21618241 NR Description: unknown [Arabidopsis thaliana]
  misc_feature (24)..(237): Homolog of NCBI NO: 22330523 NR Description: emp24/gp25L/p24 family [Arabidopsis thaliana] unknown protein [Arabidopsis thaliana]
  misc_feature (34)..(237): Homolog of NCBI NO: 12597802 NR Description: unknown protein [Arabidopsis thaliana]
  misc_feature (74)..(237): Homolog of NCBI NO: 26452085 NR Description: unknown protein [Arabidopsis thaliana]
  misc_feature (34)..(237): Homolog of NCBI NO: 15223027 NR Description: emp24/gp25L/p24 family [Arabidopsis thaliana]
  misc_feature (34)..(237): Homolog of NCBI NO: 8778403 NR Description: F16A14.23 [Arabidopsis thaliana]
  misc_feature (29)..(237): Homolog of NCBI NO: 15227591 NR Description: emp24/gp25L/p24 family [Arabidopsis thaliana]
  misc_feature (29)..(237): Homolog of NCBI NO: 33146897 NR Description: putative transmembrane protein [Oryza sativa
  misc_feature (37)..(237): Homolog of NCBI NO: 18921314 NR Description: putative transmembrane protein [Oryza sativa]
LRLPSLYQLHDQRNQRSLFKASTMFLRSLNLCTILLFLAISSQVSQSLHFELQSGRTKCISEDIKSNSMTVGKYTVVNPNEAHPSPQSHKISIRVTSSYGNTYHHAEDVESGQFAFTAVESGDYMACYTAVDHKPEVTLSIDFDWRTGVQSKSWSSVAKKSQVEVMEFDVKRLIETVNSIHEEMFYLREREEEMQNLNRATNSKMAWLSFLSLFVCLGVAGMQFVHLKTFFEKKKVI

SEQ ID NO: 100479 - protein, 214 aa, Arabidopsis thaliana
  peptide (1)..(214): Ceres Seq. ID no. 13605213
  misc_feature (9)..(214): Pfam Name: emp24/gp25L/p24 family Pfam Description: emp24/gp25L/p24 family
  misc_feature (1)..(214): Homolog of NCBI NO: 18396016 NR Description: emp24/gp25L/p24 family [Arabidopsis thaliana]
  misc_feature (1)..(214): Homolog of NCBI NO: 21618241 NR Description: unknown [Arabidopsis thaliana]
  misc_feature (1)..(214): Homolog of NCBI NO: 22330523 NR Description: emp24/gp25L/p24 family [Arabidopsis thaliana] unknown protein [Arabidopsis thaliana]
  misc_feature (11)..(214): Homolog of NCBI NO: 12597802 NR Description: unknown protein [Arabidopsis thaliana]
  misc_feature (51)..(214): Homolog of NCBI NO: 26452085 NR Description: unknown protein [Arabidopsis thaliana]
  misc_feature (11)..(214): Homolog of NCBI NO: 15223027 NR Description: emp24/gp25L/p24 family [Arabidopsis thaliana]
  misc_feature (11)..(214): Homolog of NCBI NO: 8778403 NR Description: F16A14.23 [Arabidopsis thaliana]
  misc_feature (6)..(214): Homolog of NCBI NO: 15227591 NR Description: emp24/gp25L/p24 family [Arabidopsis thaliana]
  misc_feature (6)..(214): Homolog of NCBI NO: 33146897 NR Description: putative transmembrane protein [Oryza sativa
  misc_feature (14)..(214): Homolog of NCBI NO: 18921314 NR Description: putative transmembrane protein [Oryza sativa]
MFLRSLNLCTILLFLAISSQVSQSLHFELQSGRTKCISEDIKSNSMTVGKYTVVNPNEAHPSPQSHKISIRVTSSYGNTYHHAEDVESGQFAFTAVESGDYMACYTAVDHKPEVTLSIDFDWRTGVQSKSWSSVAKKSQVEVMEFDVKRLIETVNSIHEEMFYLREREEEMQNLNRATNSKMAWLSFLSLFVCLGVAGMQFVHLKTFFEKKKVI

SEQ ID NO: 100480 - protein, 169 aa, Arabidopsis thaliana
  peptide (1)..(169): Ceres Seq. ID no. 13605214
  misc_feature (1)..(169): Pfam Name: emp24/gp25L/p24 family Pfam Description: emp24/gp25L/p24 family
  misc_feature (1)..(169): Homolog of NCBI NO: 18396016 NR Description: emp24/gp25L/p24 family [Arabidopsis thaliana]
  misc_feature (1)..(169): Homolog of NCBI NO: 21618241 NR Description: unknown [Arabidopsis thaliana]
  misc_feature (1)..(169): Homolog of NCBI NO: 22330523 NR Description: emp24/gp25L/p24 family [Arabidopsis thaliana] unknown protein [Arabidopsis thaliana]
  misc_feature (1)..(169): Homolog of NCBI NO: 12597802 NR Description: unknown protein [Arabidopsis thaliana]
  misc_feature (6)..(169): Homolog of NCBI NO: 26452085 NR Description: unknown protein [Arabidopsis thaliana]
  misc_feature (1)..(169): Homolog of NCBI NO: 15223027 NR Description: emp24/gp25L/p24 family [Arabidopsis thaliana]
  misc_feature (1)..(169): Homolog of NCBI NO: 8778403 NR Description: F16A14.23 [Arabidopsis thaliana]
  misc_feature (1)..(169): Homolog of NCBI NO: 15227591 NR Description: emp24/gp25L/p24 family [Arabidopsis thaliana]
  misc_feature (1)..(169): Homolog of NCBI NO: 33146897 NR Description: putative transmembrane protein [Oryza sativa
  misc_feature (1)..(169): Homolog of NCBI NO: 18921314 NR Description: putative transmembrane protein [Oryza sativa]
MTVGKYTVVNPNEAHPSPQSHKISIRVTSSYGNTYHHAEDVESGQFAFTAVESGDYMACYTAVDHKPEVTLSIDFDWRTGVQSKSWSSVAKKSQVEVMEFDVKRLIETVNSIHEEMFYLREREEEMQNLNRATNSKMAWLSFLSLFVCLGVAGMQFVHLKTFFEKKKVI

SEQ ID NO: 100481 - DNA, 899 bp, Arabidopsis thaliana
  misc_feature (1)..(899): Ceres Seq. ID no. 13605225
  misc_feature: MA Experiment ID: 20000355 Result: Down-regulated in Transcription
  misc_feature: MA Experiment 20000355 PARAMETER Experiment Name: At_Siliques_Sub_P Parameter: Age (day) Value: 21
  misc_feature: MA Experiment 20000355 PARAMETER Experiment Name: At_Siliques_Sub_P Parameter: Organism Value: A. thaliana
  misc_feature: MA Experiment 20000355 PARAMETER Experiment Name: At_Siliques_Sub_P Parameter: Plant Line Value: WS
  misc_feature: MA Experiment 20000355 PARAMETER Experiment Name: At_Siliques_Sub_P Parameter: Tissue Value: Less Than 5mm Siliques vs. Whole Plant
ctcgatccctcactctctctcgcgtcagtcgttactgctgcaacaaatctgtatttgatttctccattaacaacgaatctaaatggccgctgcttttgcttccagattaacccgaggaggacgttcattgcttggaggtcttaacaatggtggttcgatgaattcttctaatggaatgatgaatgaaagtatcctctctcagcagcagcagagaaggacatttattcagatggggactgttctcaaagtcgtggacaattcaggtgcgaagaaagtgatgtgtattcaagctctaaaggggaaaaaaggagctagacttggagatactatagttgcttcagtgaaagaagcgatgccaaacggtaaagtgaagaaaggagcggttgtgtatggtgtggttgttcgtgctgcgatgcagagaggtcgtgttgatggaagtgaagttaggtttgatgataacgcggttgttcttgttgatagtaaagataagaatactaaaactgatcgccagccgattggtactagagtgtttggtcctgttcctcatgagcttcgcaagaagaaacatctcaagattcttgctttggctcaacacgttgcgtgagatgcaacaaaaccgtaaacctcgtactgtctttttttatgtaaactctagttacccgcatgttttttttttgtgtgttcttaacggaatttagaggcttcaaactttaaaaagtccccacacttttaaagtctctctctattactctcttccctacatttctatctcctttattatacaagtggtatacagactcagatgaagaaccacaaaagagggaggagtgaggcggcacattaaagtccccaatttcgaagacgatctcttctcgagagcctgtctcggagtattaccc

SEQ ID NO: 100482 - protein, 173 aa, Arabidopsis thaliana; identical to SEQ ID NO: 89637
  peptide (1)..(173): Ceres Seq. ID no. 13605226
  misc_feature (48)..(173): Pfam Name: Ribosomal protein L14p/L23e Pfam Description: Ribosomal protein L14p/L23e
  misc_feature (1)..(173): Homolog of NCBI NO: 30694896 NR Description: ribosomal protein L14p family [Arabidopsis >gi|16604452|gb|AAL24232.1| AT5g46160/MCL19_22 [Arabidopsis >gi|18140860|gb|AAL60452.1|AF402993_1 HUELLENLOS PARALOG
  misc_feature (1)..(173): Homolog of NCBI NO: 30694900 NR Description: ribosomal protein L14p family [Arabidopsis
  misc_feature (1)..(173): Homolog of NCBI NO: 20260394 NR Description: unknown protein [Arabidopsis thaliana]
  misc_feature (50)..(173): Homolog of NCBI NO: 9757736 NR Description: 50S ribosomal protein L14 [Arabidopsis thaliana]
  misc_feature (1)..(172): Homolog of NCBI NO: 18140856 NR Description: HUELLENLOS-like protein [Oryza sativa]
  misc_feature (1)..(136): Homolog of NCBI NO: 8778471 NR Description: F1L3.27 [Arabidopsis thaliana]
  misc_feature (1)..(136): Homolog of NCBI NO: 15220161 NR Description: ribosomal protein L14p family [Arabidopsis >gi|28393761|gb|AAO42290.1| putative ribosomal protein thaliana] >gi|28973235|gb|AAO63942.1| putative ribosomal protein
  misc_feature (1)..(136): Homolog of NCBI NO: 18140858 NR Description: HUELLENLOS [Arabidopsis thaliana]
  misc_feature (26)..(136): Homolog of NCBI NO: 21555596 NR Description: ribosomal protein, putative [Arabidopsis thaliana]
  misc_feature (48)..(172): Homolog of NCBI NO: 15889233 NR Description: AGR_C_3539p [Agrobacterium tumefaciens] >gi|25295210|pir||B97593 hypothetical protein AGR_C_3539

SEQ ID NO: 100483 - protein, 148 aa, Arabidopsis thaliana; identical to SEQ ID NO: 89638
  peptide (1)..(148): Ceres Seq. ID no. 13605227
  misc_feature (23)..(148): Pfam Name: Ribosomal protein L14p/L23e Pfam Description: Ribosomal protein L14p/L23e
  misc_feature (1)..(148): Homolog of NCBI NO: 30694896 NR Description: ribosomal protein L14p family [Arabidopsis >gi|16604452|gb|AAL24232.1| AT5g46160/MCL19_22 [Arabidopsis >gi|18140860|gb|AAL60452.1|AF402993_1 HUELLENLOS PARALOG
  misc_feature (1)..(148): Homolog of NCBI NO: 30694900 NR Description: ribosomal protein L14p family [Arabidopsis
  misc_feature (1)..(148): Homolog of NCBI NO: 20260394 NR Description: unknown protein [Arabidopsis thaliana]
  misc_feature (25)..(148): Homolog of NCBI NO: 9757736 NR Description: 50S ribosomal protein L14 [Arabidopsis thaliana]
  misc_feature (1)..(147): Homolog of NCBI NO: 18140856 NR Description: HUELLENLOS-like protein [Oryza sativa]
  misc_feature (1)..(111): Homolog of NCBI NO: 8778471 NR Description: F1L3.27 [Arabidopsis thaliana]
  misc_feature (1)..(111): Homolog of NCBI NO: 18140858 NR Description: HUELLENLOS [Arabidopsis thaliana]
  misc_feature (1)..(111): Homolog of NCBI NO: 15220161 NR Description: ribosomal protein L14p family [Arabidopsis >gi|28393761|gb|AAO42290.1| putative ribosomal protein thaliana] >gi|28973235|gb|AAO63942.1| putative ribosomal protein
  misc_feature (1)..(111): Homolog of NCBI NO: 21555596 NR Description: ribosomal protein, putative [Arabidopsis thaliana]
  misc_feature (23)..(147): Homolog of NCBI NO: 15889233 NR Description: AGR_C_3539p [Agrobacterium tumefaciens] >gi|25295210|pir||B97593 hypothetical protein AGR_C_3539

SEQ ID NO: 100484 - protein, 142 aa, Arabidopsis thaliana; identical to SEQ ID NO: 89639
  peptide (1)..(142): Ceres Seq. ID no. 13605228
  misc_feature (17)..(142): Pfam Name: Ribosomal protein L14p/L23e Pfam Description: Ribosomal protein L14p/L23e
  misc_feature (1)..(142): Homolog of NCBI NO: 30694896 NR Description: ribosomal protein L14p family [Arabidopsis >gi|16604452|gb|AAL24232.1| AT5g46160/MCL19_22 [Arabidopsis >gi|18140860|gb|AAL60452.1|AF402993_1 HUELLENLOS PARALOG
  misc_feature (1)..(142): Homolog of NCBI NO: 30694900 NR Description: ribosomal protein L14p family [Arabidopsis
  misc_feature (1)..(142): Homolog of NCBI NO: 20260394 NR Description: unknown protein [Arabidopsis thaliana]
  misc_feature (19)..(142): Homolog of NCBI NO: 9757736 NR Description: 50S ribosomal protein L14 [Arabidopsis thaliana]
  misc_feature (1)..(141): Homolog of NCBI NO: 18140856 NR Description: HUELLENLOS-like protein [Oryza sativa]
  misc_feature (1)..(105): Homolog of NCBI NO: 8778471 NR Description: F1L3.27 [Arabidopsis thaliana]
  misc_feature (1)..(105): Homolog of NCBI NO: 18140858 NR Description: HUELLENLOS [Arabidopsis thaliana]
  misc_feature (1)..(105): Homolog of NCBI NO: 15220161 NR Description: ribosomal protein L14p family [Arabidopsis >gi|28393761|gb|AAO42290.1| putative ribosomal protein thaliana] >gi|28973235|gb|AAO63942.1| putative ribosomal protein
  misc_feature (1)..(105): Homolog of NCBI NO: 21555596 NR Description: ribosomal protein, putative [Arabidopsis thaliana]
  misc_feature (17)..(141): Homolog of NCBI NO: 15889233 NR Description: AGR_C_3539p [Agrobacterium tumefaciens] >gi|25295210|pir||B97593 hypothetical protein AGR_C_3539

SEQ ID NO: 100485 - DNA, 578 bp, Arabidopsis thaliana
  misc_feature (1)..(578): Ceres Seq. ID no. 13605237
  misc_feature: MA Experiment ID: 20000437 Result: Up-regulated in Transcription
  misc_feature: MA Experiment 20000437 PARAMETER Experiment Name: At_Drought_P Parameter: Age (day) Value: 8
  misc_feature: MA Experiment 20000437 PARAMETER Experiment Name: At_Drought_P Parameter: Organism Value: A. thaliana
  misc_feature: MA Experiment 20000437 PARAMETER Experiment Name: At_Drought_P Parameter: Plant Line Value: WS
  misc_feature: MA Experiment 20000437 PARAMETER Experiment Name: At_Drought_P Parameter: Timepoint (hr) Value: 24
  misc_feature: MA Experiment 20000437 PARAMETER Experiment Name: At_Drought_P Parameter: Tissue Value: Whole Plant
  misc_feature: MA Experiment 20000437 PARAMETER Experiment Name: At_Drought_P Parameter: Treatment Value: Drought vs. No Drought
  misc_feature: MA Experiment ID: 20001560 Result: Up-regulated in Transcription
  misc_feature: MA Experiment 20001560 PARAMETER Experiment Name: At_Drought_Soil_Dry_P Parameter: Age (day) Value: 28
  misc_feature: MA Experiment 20001560 PARAMETER Experiment Name: At_Drought_Soil_Dry_P Parameter: Organism Value: A. thaliana
  misc_feature: MA Experiment 20001560 PARAMETER Experiment Name: At_Drought_Soil_Dry_P Parameter: Plant Line Value: WS
  misc_feature: MA Experiment 20001560 PARAMETER Experiment Name: At_Drought_Soil_Dry_P Parameter: Post Timepoint (hr) Value: None
  misc_feature: MA Experiment 20001560 PARAMETER Experiment Name: At_Drought_Soil_Dry_P Parameter: Post-Treatment Value: None
  misc_feature: MA Experiment 20001560 PARAMETER Experiment Name: At_Drought_Soil_Dry_P Parameter: Timepoint (day) Value: 14
  misc_feature: MA Experiment 20001560 PARAMETER Experiment Name: At_Drought_Soil_Dry_P Parameter: Treatment Value: Drought vs. No Drought
  misc_feature: MA Experiment ID: 20001905 Result: Up-regulated in Transcription
  misc_feature: MA Experiment 20001905 PARAMETER Experiment Name: At_Drought_Reproduction_P Parameter: Age (day) Value: 40
  misc_feature: MA Experiment 20001905 PARAMETER Experiment Name: At_Drought_Reproduction_P Parameter: Organism Value: A. thaliana
  misc_feature: MA Experiment 20001905 PARAMETER Experiment Name: At_Drought_Reproduction_P Parameter: Plant Line Value: WS
  misc_feature: MA Experiment 20001905 PARAMETER Experiment Name: At_Drought_Reproduction_P Parameter: Timepoint (day) Value: 10
  misc_feature: MA Experiment 20001905 PARAMETER Experiment Name: At_Drought_Reproduction_P Parameter: Tissue Value: Rosettes
  misc_feature: MA Experiment 20001905 PARAMETER Experiment Name: At_Drought_Reproduction_P Parameter: Treatment Value: Drought vs. No Drought
aggaactcatcgccatgggaggatcaaacaagaacctcatattcgtgtacggaacgttaaaaagaaaccatcgaaaccatttcctcctagaagatctgatctcaacaaacgacgccgtttacataggacaacgcacgacccggttacaatacccgctcgttacaggtctctatgggatcccttacttaatcaacaaatccgggtcgggtcaaaagatccgaggcgagctttattcggtttcaaaacgtgggcttgtacgtcttgatgaattggaaggtatcaaagttaatcactacgagagattaccaatagaagttattgaggaagatgatgaagaagaagaatcaaacggtgtcgtcttggctgaggcttattttgctcactttggatttggtgagagattgtgggagaagaaaggtaaatgtgggatgtgtgaatttggtgaaaacgatggcgttttgtatgttcgtcctaaagataggccaatgtttagctctgttcttgatgaaattgaaacttttgtgtcttctagtaatgattgattaccaatttaattcaatgggtatgttcaaaattcc

SEQ ID NO: 100486 - protein, 179 aa, Arabidopsis thaliana
  peptide (1)..(179): Ceres Seq. ID no. 13605238
  misc_feature (24)..(129): Pfam Name: Uncharacterised protein family (UPF0131) Pfam Description: Uncharacterised protein family (UPF0131)
  misc_feature (5)..(179): Homolog of NCBI NO: 15237492 NR Description: expressed protein [Arabidopsis thaliana] gene_id:MZA15.13~unknown protein [Arabidopsis thaliana] unknown protein [Arabidopsis thaliana]
  misc_feature (5)..(179): Homolog of NCBI NO: 11387354 NR Description: Hypothetical protein At3g02910
  misc_feature (5)..(179): Homolog of NCBI NO: 18396380 NR Description: expressed protein [Arabidopsis thaliana] AT3g02910/F13E7_14 [Arabidopsis thaliana]
  misc_feature (5)..(179): Homolog of NCBI NO: 21555032 NR Description: unknown [Arabidopsis thaliana]
  misc_feature (10)..(178): Homolog of NCBI NO: 29126342 NR Description: unknown protein [Oryza sativa (japonica
  misc_feature (13)..(138): Homolog of NCBI NO: 11387365 NR Description: Hypothetical protein CG2811
  misc_feature (13)..(111): Homolog of NCBI NO: 28573638 NR Description: CG2811-PA [Drosophila melanogaster]
  misc_feature (13)..(124): Homolog of NCBI NO: 31204899 NR Description: ENSANGP00000017416 [Anopheles gambiae]
  misc_feature (12)..(108): Homolog of NCBI NO: 13279332 NR Description: Unknown (protein for IMAGE:2822295) [Homo sapiens]
  misc_feature (12)..(108): Homolog of NCBI NO: 33875960 NR Description: LOC87769 protein [Homo sapiens]
ELIAMGGSNKNLIFVYGTLKRNHRNHFLLEDLISTNDAVYIGQRTTRLQYPLVTGLYGIPYLINKSGSGQKIRGELYSVSKRGLVRLDELEGIKVNHYERLPIEVIEEDDEEEESNGVVLAEAYFAHFGFGERLWEKKGKCGMCEFGENDGVLYVRPKDRPMFSSVLDEIETFVSSSND

SEQ ID NO: 100487 - protein, 175 aa, Arabidopsis thaliana
  peptide (1)..(175): Ceres Seq. ID no. 13605239
  misc_feature (20)..(125): Pfam Name: Uncharacterised protein family (UPF0131) Pfam Description: Uncharacterised protein family (UPF0131)
  misc_feature (1)..(175): Homolog of NCBI NO: 15237492 NR Description: expressed protein [Arabidopsis thaliana] gene_id:MZA15.13~unknown protein [Arabidopsis thaliana] unknown protein [Arabidopsis thaliana]
  misc_feature (1)..(175): Homolog of NCBI NO: 11387354 NR Description: Hypothetical protein At3g02910
  misc_feature (1)..(175): Homolog of NCBI NO: 18396380 NR Description: expressed protein [Arabidopsis thaliana] AT3g02910/F13E7_14 [Arabidopsis thaliana]
  misc_feature (1)..(175): Homolog of NCBI NO: 21555032 NR Description: unknown [Arabidopsis thaliana]
  misc_feature (6)..(174): Homolog of NCBI NO: 29126342 NR Description: unknown protein [Oryza sativa (japonica
  misc_feature (9)..(134): Homolog of NCBI NO: 11387365 NR Description: Hypothetical protein CG2811
  misc_feature (9)..(107): Homolog of NCBI NO: 28573638 NR Description: CG2811-PA [Drosophila melanogaster]
  misc_feature (9)..(120): Homolog of NCBI NO: 31204899 NR Description: ENSANGP00000017416 [Anopheles gambiae]
  misc_feature (8)..(104): Homolog of NCBI NO: 13279332 NR Description: Unknown (protein for IMAGE:2822295) [Homo sapiens]
  misc_feature (8)..(104): Homolog of NCBI NO: 33875960 NR Description: LOC87769 protein [Homo sapiens]
MGGSNKNLIFVYGTLKRNHRNHFLLEDLISTNDAVYIGQRTTRLQYPLVTGLYGIPYLINKSGSGQKIRGELYSVSKRGLVRLDELEGIKVNHYERLPIEVIEEDDEEEESNGVVLAEAYFAHFGFGERLWEKKGKCGMCEFGENDGVLYVRPKDRPMFSSVLDEIETFVSSSND

SEQ ID NO: 100488 - DNA, 618 bp, Arabidopsis thaliana
  misc_feature (1)..(618): Ceres Seq. ID no. 13605240
  misc_feature: MA Experiment ID: 108434 Result: Up-regulated in Transcription
  misc_feature: MA Experiment 108434 PARAMETER Experiment Name: At_Root_Tips_cDNA_P Parameter: Tissue Value: Root Tips
  misc_feature: MA Experiment ID: 108462 Result: Up-regulated in Transcription
  misc_feature: MA Experiment 108462 PARAMETER Experiment Name: At_Germinating_Seeds_cDNA_P Parameter: Age (day) Value: 2 vs. 0
  misc_feature: MA Experiment 108462 PARAMETER Experiment Name: At_Germinating_Seeds_cDNA_P Parameter: Tissue Value: Germinating Seeds
  misc_feature: MA Experiment ID: 108463 Result: Up-regulated in Transcription
  misc_feature: MA Experiment 108463 PARAMETER Experiment Name: At_Germinating_Seeds_cDNA_P Parameter: Age (day) Value: 3 vs. 0
  misc_feature: MA Experiment 108463 PARAMETER Experiment Name: At_Germinating_Seeds_cDNA_P Parameter: Tissue Value: Germinating Seeds
  misc_feature: MA Experiment ID: 108569 Result: Down-regulated in Transcription
  misc_feature: MA Experiment 108569 PARAMETER Experiment Name: At_0.001%_MeJA__cDNA_P Parameter: Timepoint (hr) Value: 6
  misc_feature: MA Experiment 108569 PARAMETER Experiment Name: At_0.001%_MeJA__cDNA_P Parameter: Tissue Value: Aerial
  misc_feature: MA Experiment 108569 PARAMETER Experiment Name: At_0.001%_MeJA__cDNA_P Parameter: Treatment Value: 0.001% MeJA vs. No Treatment
  misc_feature: MA Experiment ID: 108594 Result: Down-regulated in Transcription
  misc_feature: MA Experiment 108594 PARAMETER Experiment Name: At_Ler-rhl_Root_cDNA_P Parameter: Plant Line Value: null
  misc_feature: MA Experiment ID: 20000185 Result: Up-regulated in Transcription
  misc_feature: MA Experiment 20000185 PARAMETER Experiment Name: At_Roots__P Parameter: Age (day) Value: 7 vs. 21
  misc_feature: MA Experiment 20000185 PARAMETER Experiment Name: At_Roots__P Parameter: Organism Value: A. thaliana
  misc_feature: MA Experiment 20000185 PARAMETER Experiment Name: At_Roots__P Parameter: Tissue Value: Roots vs. Whole Plant
  misc_feature: MA Experiment ID: 20000224 Result: Down-regulated in Transcription
  misc_feature: MA Experiment ID: 20000439 Result: Up-regulated in Transcription
  misc_feature: MA Experiment 20000439 PARAMETER Experiment Name: At_Roots__P Parameter: Age (day) Value: 14 vs. 21
  misc_feature: MA Experiment 20000439 PARAMETER Experiment Name: At_Roots__P Parameter: Organism Value: A. thaliana
  misc_feature: MA Experiment 20000439 PARAMETER Experiment Name: At_Roots__P Parameter: Tissue Value: Roots vs. Whole Plant
acaacacatcaaaagcttgataaagagagagtttttagggttttcttgtacctattataagaaatactctaactgaaactttacttcttcatcaatggcttattctaaggttgcccttctcctcgtcttcaatgtcatcttcttcactttcgtcagctcgacttcggtcccttgtccaccaccaccgcccaagagctaccacaagaagcccgcaacgccatctcttaaacccacttgtaaagacgctcttaaacttaaggtatgtgctaacgtgttggatgtggttaaggtttctctaccaccaacgtccaactgttgcgctcttatcaaaggtctagttgatcttgaagccgcggtctgtctttgcactgccctaaaggctaatgttcttggtatcaaccttaatgttcccatttctttgaacgttgtcctaaaccattgtggtaagaaggttccatctggtttcaaatgtgcctagagattacacattttaaattgaggttctatataccatatttcattcttgtttttcaaattccgcgtttgatgatatctttatctattgttgtaatttgttatatgtttcatatatcaatgaaataaagtgtttcctttttc

SEQ ID NO: 100489 - protein, 127 aa, Arabidopsis thaliana; identical to SEQ ID NO: 43131
  peptide (1)..(127): Ceres Seq. ID no. 13605241
  misc_feature (48)..(126): Pfam Name: Protease inhibitor/seed storage/LTP family Pfam Description: Protease inhibitor/seed storage/LTP family
  misc_feature (1)..(127): Homolog of NCBI NO: 15237964 NR Description: protease inhibitor/seed storage/lipid transfer
  misc_feature (1)..(127): Homolog of NCBI NO: 21553657 NR Description: extA [Arabidopsis thaliana]
  misc_feature (1)..(127): Homolog of NCBI NO: 15237975 NR Description: protease inhibitor/seed storage/lipid transfer (LTP) family [Arabidopsis thaliana] >gi|297381|emb|CAA47807.1| [Arabidopsis thaliana] >gi|9759432|dbj|BAB10229.1| extA
  misc_feature (1)..(127): Homolog of NCBI NO: 18406723 NR Description: protease inhibitor/seed storage/lipid transfer
  misc_feature (4)..(126): Homolog of NCBI NO: 38345484 NR Description: OSJNBa0010H02.22 [Oryza sativa (japonica
  misc_feature (13)..(126): Homolog of NCBI NO: 2129871 NR Description: proline-rich protein, 14K - kidney bean
  misc_feature (4)..(126): Homolog of NCBI NO: 38345485 NR Description: OSJNBa0010H02.23 [Oryza sativa (japonica
  misc_feature (1)..(127): Homolog of NCBI NO: 4454097 NR Description: hybrid proline-rich protein [Catharanthus roseus]
  misc_feature (1)..(127): Homolog of NCBI NO: 481236 NR Description: hypothetical protein - Madagascar periwinkle
  misc_feature (1)..(127): Homolog of NCBI NO: 7484770 NR Description: extensin like protein - black poplar extensin like protein [Populus nigra] >gi|1199774|dbj|BAA11855.1|

SEQ ID NO: 100490 - protein, 68 aa, Arabidopsis thaliana; identical to SEQ ID NO: 43132
  peptide (1)..(68): Ceres Seq. ID no. 13605242

SEQ ID NO: 100491 - DNA, 1119 bp, Arabidopsis thaliana
  misc_feature (1)..(1119): Ceres Seq. ID no. 13605246
  misc_feature: MA Experiment ID: 20000306 Result: Up-regulated in Transcription
  misc_feature: MA Experiment 20000306 PARAMETER Experiment Name: At_Germinating_Seeds_Sub_P Parameter: Age (hr) Value: 6 vs. 0
  misc_feature: MA Experiment 20000306 PARAMETER Experiment Name: At_Germinating_Seeds_Sub_P Parameter: Organism Value: A. thaliana
  misc_feature: MA Experiment 20000306 PARAMETER Experiment Name: At_Germinating_Seeds_Sub_P Parameter: Plant Line Value: WS
  misc_feature: MA Experiment 20000306 PARAMETER Experiment Name: At_Germinating_Seeds_Sub_P Parameter: Tissue Value: Germinating Seeds
  misc_feature: MA Experiment ID: 20000314 Result: Down-regulated in Transcription
  misc_feature: MA Experiment 20000314 PARAMETER Experiment Name: At_14day_Shoots-Roots_Sub_P Parameter: Age (day) Value: 14
  misc_feature: MA Experiment 20000314 PARAMETER Experiment Name: At_14day_Shoots-Roots_Sub_P Parameter: Organism Value: A. thaliana
  misc_feature: MA Experiment 20000314 PARAMETER Experiment Name: At_14day_Shoots-Roots_Sub_P Parameter: Plant Line Value: WS
  misc_feature: MA Experiment 20000314 PARAMETER Experiment Name: At_14day_Shoots-Roots_Sub_P Parameter: Tissue Value: Roots vs. Whole Plant
  misc_feature: MA Experiment ID: 20000315 Result: Down-regulated in Transcription
  misc_feature: MA Experiment 20000315 PARAMETER Experiment Name: At_14day_Shoots-Roots_Sub_P Parameter: Age (day) Value: 14
  misc_feature: MA Experiment 20000315 PARAMETER Experiment Name: At_14day_Shoots-Roots_Sub_P Parameter: Organism Value: A. thaliana
  misc_feature: MA Experiment 20000315 PARAMETER Experiment Name: At_14day_Shoots-Roots_Sub_P Parameter: Plant Line Value: WS
  misc_feature: MA Experiment 20000315 PARAMETER Experiment Name: At_14day_Shoots-Roots_Sub_P Parameter: Tissue Value: Shoots vs. Whole Plant
  misc_feature: MA Experiment ID: 20000328 Result: Down-regulated in Transcription
  misc_feature: MA Experiment 20000328 PARAMETER Experiment Name: At_42deg_Heat_Sub_P Parameter: Age (day) Value: 14
  misc_feature: MA Experiment 20000328 PARAMETER Experiment Name: At_42deg_Heat_Sub_P Parameter: Organism Value: A. thaliana
  misc_feature: MA Experiment 20000328 PARAMETER Experiment Name: At_42deg_Heat_Sub_P Parameter: Plant Line Value: WS
  misc_feature: MA Experiment 20000328 PARAMETER Experiment Name: At_42deg_Heat_Sub_P Parameter: Temperature (deg C) Value: 42 vs. 22
  misc_feature: MA Experiment 20000328 PARAMETER Experiment Name: At_42deg_Heat_Sub_P Parameter: Timepoint (hr) Value: 6
  misc_feature: MA Experiment 20000328 PARAMETER Experiment Name: At_42deg_Heat_Sub_P Parameter: Tissue Value: Aerial
  misc_feature: MA Experiment ID: 20000346 Result: Down-regulated in Transcription
  misc_feature: MA Experiment 20000346 PARAMETER Experiment Name: At_2mM_SA_Sub_P Parameter: Age (day) Value: 14
  misc_feature: MA Experiment 20000346 PARAMETER Experiment Name: At_2mM_SA_Sub_P Parameter: Organism Value: A. thaliana
  misc_feature: MA Experiment 20000346 PARAMETER Experiment Name: At_2mM_SA_Sub_P Parameter: Plant Line Value: WS
  misc_feature: MA Experiment 20000346 PARAMETER Experiment Name: At_2mM_SA_Sub_P Parameter: Timepoint (hr) Value: 1
  misc_feature: MA Experiment 20000346 PARAMETER Experiment Name: At_2mM_SA_Sub_P Parameter: Tissue Value: Aerial
  misc_feature: MA Experiment 20000346 PARAMETER Experiment Name: At_2mM_SA_Sub_P Parameter: Treatment Value: 2mM SA vs. No Treatment
  misc_feature: MA Experiment ID: 20000349 Result: Up-regulated in Transcription
  misc_feature: MA Experiment 20000349 PARAMETER Experiment Name: At_100uM_ABA_Sub_P Parameter: Age (day) Value: 14
  misc_feature: MA Experiment 20000349 PARAMETER Experiment Name: At_100uM_ABA_Sub_P Parameter: Organism Value: A. thaliana
  misc_feature: MA Experiment 20000349 PARAMETER Experiment Name: At_100uM_ABA_Sub_P Parameter: Plant Line Value: WS
  misc_feature: MA Experiment 20000349 PARAMETER Experiment Name: At_100uM_ABA_Sub_P Parameter: Timepoint (hr) Value: 6
  misc_feature: MA Experiment 20000349 PARAMETER Experiment Name: At_100uM_ABA_Sub_P Parameter: Tissue Value: Aerial
  misc_feature: MA Experiment 20000349 PARAMETER Experiment Name: At_100uM_ABA_Sub_P Parameter: Treatment Value: 100uM ABA vs. No Treatment
  misc_feature: MA Experiment ID: 20000352 Result: Up-regulated in Transcription
  misc_feature: MA Experiment 20000352 PARAMETER Experiment Name: At_Drought_Sub_P Parameter: Age (day) Value: 7
  misc_feature: MA Experiment 20000352 PARAMETER Experiment Name: At_Drought_Sub_P Parameter: Organism Value: A. thaliana
  misc_feature: MA Experiment 20000352 PARAMETER Experiment Name: At_Drought_Sub_P Parameter: Plant Line Value: WS
  misc_feature: MA Experiment 20000352 PARAMETER Experiment Name: At_Drought_Sub_P Parameter: Timepoint (hr) Value: 6
  misc_feature: MA Experiment 20000352 PARAMETER Experiment Name: At_Drought_Sub_P Parameter: Tissue Value: Whole Plant
  misc_feature: MA Experiment 20000352 PARAMETER Experiment Name: At_Drought_Sub_P Parameter: Treatment Value: Drought vs. No Drought
attaaaaaaagaaaaagaaaaaaactataaacataaacgccaatcgcaactttcttgtctttcaatgggagagaaaggtttgaagcggtctggtgttgcggtggtggttgcattactagccatggttcatgtctctgtttcagttccgttcataatgcttcatgggatctcagctcaatgttctaatgctagggatgctaacttcacacagcttctcactaacctctctggctctcctggcttttgcttagaaattggaaatggagttgccgattcatggttaatgccgcttacacgacaagcggaaatagcgtgtgagaaggtgaagcaaatgaaagagttgagtcaaggatacaacattgttggaagatctcaggggaacctagtggctcgaggcttgatcgagttctgtgacggtggccctccggtttacaactatatatccttggccggtcctcatgctggcatctcctctgttcctatgtgtggttctggtttattctgtaagttagcagatgagctaatcaagggagatatctatagcgacttcattcaagatcatcttgctcctagtggttatctcaaaattcctactgatatgacaaagtacttgggaagctctaagtatttacctaagcttaacaatgagataccagaccaaagaaaccaaacttacaaagaccgtttcaccagtttacataacttggttcttatcaagtttcagggcgacaaggttatagttccaaaagattcatcttggttcgggttttatccggatggtgaattcgaacctcttctctctgctcaacagacaaagctctatacagaggattggatcggtctgaaaacattggatgatgcgggaaaagtgaagtttgtgagtgtagccggtgaacatatcagaatggtagatgaagatgtcgtcaaacacgttgtaccttatctccaggaccaaccgtcttcggtgcaaagcttcaaccgcaagacgaagcagcccttgcatgcttaaaaatagcaaataccacaatagttatacttattcatgcaatatatgtcgaaaaagcttagtgatgattttgtagaatccttattcttatagaaatatatacatacttatct

SEQ ID NO: 100492 - protein, 335 aa, Arabidopsis thaliana
  peptide (1)..(335): Ceres Seq. ID no. 13605247
  misc_feature (43)..(316): Pfam Name: Palmitoyl protein thioesterase Pfam Description: Palmitoyl protein thioesterase
  misc_feature (22)..(335): Homolog of NCBI NO: 15238063 NR Description: palmitoyl protein thioesterase precursor, putative
  misc_feature (22)..(335): Homolog of NCBI NO: 28393539 NR Description: putative palmitoyl-protein thioesterase precursor
  misc_feature (186)..(334): Homolog of NCBI NO: 15238065 NR Description: palmitoyl protein thioesterase precursor, putative
  misc_feature (24)..(166): Homolog of NCBI NO: 15238065 NR Description: palmitoyl protein thioesterase precursor, putative
  misc_feature (24)..(334): Homolog of NCBI NO: 15238074 NR Description: palmitoyl protein thioesterase precursor, putative
  misc_feature (24)..(334): Homolog of NCBI NO: 21537363 NR Description: palmitoyl-protein thioesterase precursor-like
  misc_feature (24)..(322): Homolog of NCBI NO: 15236078 NR Description: palmitoyl protein thioesterase precursor, [Arabidopsis thaliana] >gi|28393560|gb|AAO42200.1| unknown [Arabidopsis thaliana] >gi|28973129|gb|AAO63889.1| unknown
  misc_feature (24)..(322): Homolog of NCBI NO: 21554369 NR Description: palmitoyl-protein thioesterase precursor-like
  misc_feature (24)..(315): Homolog of NCBI NO: 15236079 NR Description: palmitoyl protein thioesterase precursor, [Arabidopsis thaliana] >gi|22136628|gb|AAM91633.1| unknown
  misc_feature (34)..(324): Homolog of NCBI NO: 15232301 NR Description: palmitoyl protein thioesterase precursor, [Arabidopsis thaliana] >gi|30695179|ref|NP_850728.1| palmitoyl thioesterase precursor, putative [Arabidopsis thaliana]
LKKEKEKNYKHKRQSQLSCLSMGEKGLKRSGVAVVVALLAMVHVSVSVPFIMLHGISAQCSNARDANFTQLLTNLSGSPGFCLEIGNGVADSWLMPLTRQAEIACEKVKQMKELSQGYNIVGRSQGNLVARGLIEFCDGGPPVYNYISLAGPHAGISSVPMCGSGLFCKLADELIKGDIYSDFIQDHLAPSGYLKIPTDMTKYLGSSKYLPKLNNEIPDQRNQTYKDRFTSLHNLVLIKFQGDKVIVPKDSSWFGFYPDGEFEPLLSAQQTKLYTEDWIGLKTLDDAGKVKFVSVAGEHIRMVDEDVVKHVVPYLQDQPSSVQSFNRKTKQPLHA

SEQ ID NO: 100493 - protein, 314 aa, Arabidopsis thaliana
  peptide (1)..(314): Ceres Seq. ID no. 13605248
  misc_feature (22)..(295): Pfam Name: Palmitoyl protein thioesterase Pfam Description: Palmitoyl protein thioesterase
  misc_feature (1)..(314): Homolog of NCBI NO: 15238063 NR Description: palmitoyl protein thioesterase precursor, putative
  misc_feature (1)..(314): Homolog of NCBI NO: 28393539 NR Description: putative palmitoyl-protein thioesterase precursor
  misc_feature (165)..(313): Homolog of NCBI NO: 15238065 NR Description: palmitoyl protein thioesterase precursor, putative
  misc_feature (3)..(145): Homolog of NCBI NO: 15238065 NR Description: palmitoyl protein thioesterase precursor, putative
  misc_feature (3)..(313): Homolog of NCBI NO: 15238074 NR Description: palmitoyl protein thioesterase precursor, putative
  misc_feature (3)..(313): Homolog of NCBI NO: 21537363 NR Description: palmitoyl-protein thioesterase precursor-like
  misc_feature (3)..(301): Homolog of NCBI NO: 15236078 NR Description: palmitoyl protein thioesterase precursor, [Arabidopsis thaliana] >gi|28393560|gb|AAO42200.1| unknown [Arabidopsis thaliana] >gi|28973129|gb|AAO63889.1| unknown
  misc_feature (3)..(301): Homolog of NCBI NO: 21554369 NR Description: palmitoyl-protein thioesterase precursor-like
  misc_feature (3)..(294): Homolog of NCBI NO: 15236079 NR Description: palmitoyl protein thioesterase precursor, [Arabidopsis thaliana] >gi|22136628|gb|AAM91633.1| unknown
  misc_feature (13)..(303): Homolog of NCBI NO: 15232301 NR Description: palmitoyl protein thioesterase precursor, [Arabidopsis thaliana] >gi|30695179|ref|NP_850728.1| palmitoyl thioesterase precursor, putative [Arabidopsis thaliana]
MGEKGLKRSGVAVVVALLAMVHVSVSVPFIMLHGISAQCSNARDANFTQLLTNLSGSPGFCLEIGNGVADSWLMPLTRQAEIACEKVKQMKELSQGYNIVGRSQGNLVARGLIEFCDGGPPVYNYISLAGPHAGISSVPMCGSGLFCKLADELIKGDIYSDFIQDHLAPSGYLKIPTDMTKYLGSSKYLPKLNNEIPDQRNQTYKDRFTSLHNLVLIKFQGDKVIVPKDSSWFGFYPDGEFEPLLSAQQTKLYTEDWIGLKTLDDAGKVKFVSVAGEHIRMVDEDVVKHVVPYLQDQPSSVQSFNRKTKQPLHA

SEQ ID NO: 100494 - protein, 295 aa, Arabidopsis thaliana
  peptide (1)..(295): Ceres Seq. ID no. 13605249
  misc_feature (3)..(276): Pfam Name: Palmitoyl protein thioesterase Pfam Description: Palmitoyl protein thioesterase
  misc_feature (1)..(295): Homolog of NCBI NO: 15238063 NR Description: palmitoyl protein thioesterase precursor, putative
  misc_feature (1)..(295): Homolog of NCBI NO: 28393539 NR Description: putative palmitoyl-protein thioesterase precursor
  misc_feature (146)..(294): Homolog of NCBI NO: 15238065 NR Description: palmitoyl protein thioesterase precursor, putative
  misc_feature (1)..(126): Homolog of NCBI NO: 15238065 NR Description: palmitoyl protein thioesterase precursor, putative
  misc_feature (1)..(294): Homolog of NCBI NO: 15238074 NR Description: palmitoyl protein thioesterase precursor, putative
  misc_feature (1)..(294): Homolog of NCBI NO: 21537363 NR Description: palmitoyl-protein thioesterase precursor-like
  misc_feature (1)..(282): Homolog of NCBI NO: 15236078 NR Description: palmitoyl protein thioesterase precursor, [Arabidopsis thaliana] >gi|28393560|gb|AAO42200.1| unknown [Arabidopsis thaliana] >gi|28973129|gb|AAO63889.1| unknown
  misc_feature (1)..(282): Homolog of NCBI NO: 21554369 NR Description: palmitoyl-protein thioesterase precursor-like
  misc_feature (1)..(275): Homolog of NCBI NO: 15236079 NR Description: palmitoyl protein thioesterase precursor, [Arabidopsis thaliana] >gi|22136628|gb|AAM91633.1| unknown
  misc_feature (1)..(284): Homolog of NCBI NO: 15232301 NR Description: palmitoyl protein thioesterase precursor, [Arabidopsis thaliana] >gi|30695179|ref|NP_850728.1| palmitoyl thioesterase precursor, putative [Arabidopsis thaliana]
MVHVSVSVPFIMLHGISAQCSNARDANFTQLLTNLSGSPGFCLEIGNGVADSWLMPLTRQAEIACEKVKQMKELSQGYNIVGRSQGNLVARGLIEFCDGGPPVYNYISLAGPHAGISSVPMCGSGLFCKLADELIKGDIYSDFIQDHLAPSGYLKIPTDMTKYLGSSKYLPKLNNEIPDQRNQTYKDRFTSLHNLVLIKFQGDKVIVPKDSSWFGFYPDGEFEPLLSAQQTKLYTEDWIGLKTLDDAGKVKFVSVAGEHIRMVDEDVVKHVVPYLQDQPSSVQSFNRKTKQPLHA

SEQ ID NO: 100495 - DNA, 1337 bp, Arabidopsis thaliana
  misc_feature (1)..(1337): Ceres Seq. ID no. 13605250
  misc_feature: MA Experiment ID: 20000184 Result: Down-regulated in Transcription
  misc_feature: MA Experiment 20000184 PARAMETER Experiment Name: At_Shoots__P Parameter: Age (day) Value: 7
  misc_feature: MA Experiment 20000184 PARAMETER Experiment Name: At_Shoots__P Parameter: Tissue Value: Shoots vs. Whole Plant
  misc_feature: MA Experiment ID: 20001556 Result: Up-regulated in Transcription
  misc_feature: MA Experiment 20001556 PARAMETER Experiment Name: At_Drought_Soil_Dry_P Parameter: Age (day) Value: 26
  misc_feature: MA Experiment 20001556 PARAMETER Experiment Name: At_Drought_Soil_Dry_P Parameter: Organism Value: A. thaliana
  misc_feature: MA Experiment 20001556 PARAMETER Experiment Name: At_Drought_Soil_Dry_P Parameter: Plant Line Value: WS
  misc_feature: MA Experiment 20001556 PARAMETER Experiment Name: At_Drought_Soil_Dry_P Parameter: Post Timepoint (hr) Value: None
  misc_feature: MA Experiment 20001556 PARAMETER Experiment Name: At_Drought_Soil_Dry_P Parameter: Post-Treatment Value: None
  misc_feature: MA Experiment 20001556 PARAMETER Experiment Name: At_Drought_Soil_Dry_P Parameter: Timepoint (day) Value: 12
  misc_feature: MA Experiment 20001556 PARAMETER Experiment Name: At_Drought_Soil_Dry_P Parameter: Treatment Value: Drought vs. No Drought
  misc_feature: MA Experiment ID: 20001560 Result: Up-regulated in Transcription
  misc_feature: MA Experiment 20001560 PARAMETER Experiment Name: At_Drought_Soil_Dry_P Parameter: Age (day) Value: 28
  misc_feature: MA Experiment 20001560 PARAMETER Experiment Name: At_Drought_Soil_Dry_P Parameter: Organism Value: A. thaliana
  misc_feature: MA Experiment 20001560 PARAMETER Experiment Name: At_Drought_Soil_Dry_P Parameter: Plant Line Value: WS
  misc_feature: MA Experiment 20001560 PARAMETER Experiment Name: At_Drought_Soil_Dry_P Parameter: Post Timepoint (hr) Value: None
  misc_feature: MA Experiment 20001560 PARAMETER Experiment Name: At_Drought_Soil_Dry_P Parameter: Post-Treatment Value: None
  misc_feature: MA Experiment 20001560 PARAMETER Experiment Name: At_Drought_Soil_Dry_P Parameter: Timepoint (day) Value: 14
  misc_feature: MA Experiment 20001560 PARAMETER Experiment Name: At_Drought_Soil_Dry_P Parameter: Treatment Value: Drought vs. No Drought
  misc_feature: MA Experiment ID: 20001911 Result: Up-regulated in Transcription
  misc_feature: MA Experiment 20001911 PARAMETER Experiment Name: At_Drought_Reproduction_P Parameter: Age (day) Value: 40
  misc_feature: MA Experiment 20001911 PARAMETER Experiment Name: At_Drought_Reproduction_P Parameter: Organism Value: A. thaliana
  misc_feature: MA Experiment 20001911 PARAMETER Experiment Name: At_Drought_Reproduction_P Parameter: Plant Line Value: WS
  misc_feature: MA Experiment 20001911 PARAMETER Experiment Name: At_Drought_Reproduction_P Parameter: Timepoint (day) Value: 10
  misc_feature: MA Experiment 20001911 PARAMETER Experiment Name: At_Drought_Reproduction_P Parameter: Tissue Value: Flowers
  misc_feature: MA Experiment 20001911 PARAMETER Experiment Name: At_Drought_Reproduction_P Parameter: Treatment Value: Drought vs. No Drought
atggaacttctcgccggcgactgtcggaaacgagtcggcgacgactttgaggaagatattaacccattcgatggttcggacggtggttgcgggtggatgtacggtacccgtcaaatgggttctaacggaaacgacgacgctttggctacgctcgcagacttggcttcgcctcctcagaaattgaaacctataaggtgtggcgttaagcttccgtcgtcgtcggaggatcgacatcctcttgatattctcgccggaaccctagataggctgccggagatgggttttggctgcttcgaagctcctttgggatcgaagattgctgacgtggaggaaagtggtcaattgactcgtgggttttcaaaggaagaggatgattctcttcctcctcttcaaatggagtttcaagctcgaaatcgcatctcttgggatggtctctctctcagctcctctgttgatagcagcgatagtgactcatctccagacgttcgcaagaccgtcacgggtaaaagaaagcgggaaacaagggtaaagctggagcatttcttggagaagcttgtggggagtatgatgaagcggcaggagaagatgcataatcagttgattaatgtgatggagaagatggaagtggagagaatacgccgtgaggaagcttggaggcaacaggaaaccgagaggatgacacagaatgaagaagcacggaagcaagagatggcacgcaacttgtctctcatctctttcatcagaagtgttactggtgacgagatcgagatccctaaacagtgtgaattcccgcaaccactccagcagattcttccggaacaatgtaaagacgagaaatgtgaatccgctcagagagaaagagagataaagtttaggtactcaagcggcagtggcagcagtggtagaaggtggccgcaagaggaagtgcaggcattgataagttcgagaagcgatgtggaagagaagacggggatcaacaagggagcgatttgggatgagatatcagcaagaatgaaagaaagagggtacgaaagatctgcgaaaaagtgtaaggagaagtgggagaacatgaacaagtactataggagagtgacggaaggtgggcagaaacagcctgagcacagcaagactcgctcatactttgagaaacttggaaatttttacaagaccatttcctcgggagagagggaaaaatgagtgaaagattttaaatttaggtgtttttggcacgcaaaacgggagaacttgtagatgattacctcgagtttaatttttatatctttggtgtagtttataatttaaaactctacggctctgtatttgtagaaggttcgaat

SEQ ID NO: 100496 - protein, 398 aa, Arabidopsis thaliana
  peptide (1)..(398): Ceres Seq. ID no. 13605251
  misc_feature (327)..(358): Pfam Name: Myb-like DNA-binding domain Pfam Description: Myb-like DNA-binding domain
  misc_feature (1)..(398): Homolog of NCBI NO: 15238160 NR Description: expressed protein [Arabidopsis thaliana]
  misc_feature (169)..(394): Homolog of NCBI NO: 40363766 NR Description: putative GT-2 factor [Oryza sativa (japonica
  misc_feature (128)..(276): Homolog of NCBI NO: 38344985 NR Description: OSJNBa0011L07.15 [Oryza sativa (japonica
  misc_feature (278)..(389): Homolog of NCBI NO: 38344985 NR Description: OSJNBa0011L07.15 [Oryza sativa (japonica
MELLAGDCRKRVGDDFEEDINPFDGSDGGCGWMYGTRQMGSNGNDDALATLADLASPPQKLKPIRCGVKLPSSSEDRHPLDILAGTLDRLPEMGFGCFEAPLGSKIADVEESGQLTRGFSKEEDDSLPPLQMEFQARNRISWDGLSLSSSVDSSDSDSSPDVRKTVTGKRKRETRVKLEHFLEKLVGSMMKRQEKMHNQLINVMEKMEVERIRREEAWRQQETERMTQNEEARKQEMARNLSLISFIRSVTGDEIEIPKQCEFPQPLQQILPEQCKDEKCESAQREREIKFRYSSGSGSSGRRWPQEEVQALISSRSDVEEKTGINKGAIWDEISARMKERGYERSAKKCKEKWENMNKYYRRVTEGGQKQPEHSKTRSYFEKLGNFYKTISSGEREK

SEQ ID NO: 100497 - protein, 366 aa, Arabidopsis thaliana
  peptide (1)..(366): Ceres Seq. ID no. 13605252
  misc_feature (295)..(326): Pfam Name: Myb-like DNA-binding domain Pfam Description: Myb-like DNA-binding domain
  misc_feature (1)..(366): Homolog of NCBI NO: 15238160 NR Description: expressed protein [Arabidopsis thaliana]
  misc_feature (137)..(362): Homolog of NCBI NO: 40363766 NR Description: putative GT-2 factor [Oryza sativa (japonica
  misc_feature (96)..(244): Homolog of NCBI NO: 38344985 NR Description: OSJNBa0011L07.15 [Oryza sativa (japonica
  misc_feature (246)..(357): Homolog of NCBI NO: 38344985 NR Description: OSJNBa0011L07.15 [Oryza sativa (japonica
MYGTRQMGSNGNDDALATLADLASPPQKLKPIRCGVKLPSSSEDRHPLDILAGTLDRLPEMGFGCFEAPLGSKIADVEESGQLTRGFSKEEDDSLPPLQMEFQARNRISWDGLSLSSSVDSSDSDSSPDVRKTVTGKRKRETRVKLEHFLEKLVGSMMKRQEKMHNQLINVMEKMEVERIRREEAWRQQETERMTQNEEARKQEMARNLSLISFIRSVTGDEIEIPKQCEFPQPLQQILPEQCKDEKCESAQREREIKFRYSSGSGSSGRRWPQEEVQALISSRSDVEEKTGINKGAIWDEISARMKERGYERSAKKCKEKWENMNKYYRRVTEGGQKQPEHSKTRSYFEKLGNFYKTISSGEREK

SEQ ID NO: 100498 - protein, 360 aa, Arabidopsis thaliana
  peptide (1)..(360): Ceres Seq. ID no. 13605253
  misc_feature (289)..(320): Pfam Name: Myb-like DNA-binding domain Pfam Description: Myb-like DNA-binding domain
  misc_feature (1)..(360): Homolog of NCBI NO: 15238160 NR Description: expressed protein [Arabidopsis thaliana]
  misc_feature (131)..(356): Homolog of NCBI NO: 40363766 NR Description: putative GT-2 factor [Oryza sativa (japonica
  misc_feature (90)..(238): Homolog of NCBI NO: 38344985 NR Description: OSJNBa0011L07.15 [Oryza sativa (japonica
  misc_feature (240)..(351): Homolog of NCBI NO: 38344985 NR Description: OSJNBa0011L07.15 [Oryza sativa (japonica
MGSNGNDDALATLADLASPPQKLKPIRCGVKLPSSSEDRHPLDILAGTLDRLPEMGFGCFEAPLGSKIADVEESGQLTRGFSKEEDDSLPPLQMEFQARNRISWDGLSLSSSVDSSDSDSSPDVRKTVTGKRKRETRVKLEHFLEKLVGSMMKRQEKMHNQLINVMEKMEVERIRREEAWRQQETERMTQNEEARKQEMARNLSLISFIRSVTGDEIEIPKQCEFPQPLQQILPEQCKDEKCESAQREREIKFRYSSGSGSSGRRWPQEEVQALISSRSDVEEKTGINKGAIWDEISARMKERGYERSAKKCKEKWENMNKYYRRVTEGGQKQPEHSKTRSYFEKLGNFYKTISSGEREK

SEQ ID NO: 100499 - DNA, 916 bp, Arabidopsis thaliana
  misc_feature (1)..(916): Ceres Seq. ID no. 13605258
  misc_feature: MA Experiment ID: 20000180 Result: Up-regulated in Transcription
  misc_feature: MA Experiment 20000180 PARAMETER Experiment Name: At_Germinating_Seeds_P Parameter: Age (hr) Value: 24 vs. 0
  misc_feature: MA Experiment 20000180 PARAMETER Experiment Name: At_Germinating_Seeds_P Parameter: Tissue Value: Germinating Seeds
  misc_feature: MA Experiment ID: 20000227 Result: Up-regulated in Transcription
  misc_feature: MA Experiment 20000227 PARAMETER Experiment Name: At_Root-Tips-vs-Tops_P Parameter: Tissue Value: Root Tips vs. Root Tops
  misc_feature: MA Experiment ID: 20001458 Result: Up-regulated in Transcription
  misc_feature: MA Experiment 20001458 PARAMETER Experiment Name: At_50mM_NH4NO3_L-to-H_P Parameter: Age (day) Value: Undefined
  misc_feature: MA Experiment 20001458 PARAMETER Experiment Name: At_50mM_NH4NO3_L-to-H_P Parameter: Organism Value: Undefined
  misc_feature: MA Experiment 20001458 PARAMETER Experiment Name: At_50mM_NH4NO3_L-to-H_P Parameter: Plant Line Value: Undefined
  misc_feature: MA Experiment 20001458 PARAMETER Experiment Name: At_50mM_NH4NO3_L-to-H_P Parameter: Timepoint (hr) Value: 2
  misc_feature: MA Experiment 20001458 PARAMETER Experiment Name: At_50mM_NH4NO3_L-to-H_P Parameter: Tissue Value: Siliques
  misc_feature: MA Experiment 20001458 PARAMETER Experiment Name: At_50mM_NH4NO3_L-to-H_P Parameter: Treatment Value: 50mM NH4NO3 vs. 100mM Manitol
atgctaattaagcaacatccaaaacataagtaaaacactattatagaagctcttacaaagaaaaaatatgaagaaagctacggcattgatgaaacatatcgttgcattgttgagttccatggcgaaggcaaaatctatagccataaagaacaaaacgagtgctttcaagacacgagtactcatgttgtctctagtgaaacacaagaaactcgggttccgttccatttccaacaagattcaccacctcttgggccatgcggatcaagacgacgataacgaccaggaccaagacaagaacaaggctatagtcctctacaacagcaaggcatccacaatggctcatcatgaggaatatgacgttcacgaggaggaaagcgacaagtatcctgatctgaggcacacgttgttcgaaggagaggaggacttcggggacttggaggaggaaggtcaaggtagttctgtgatagatatggtgaggacctcgaaggaagaagaaggagagaatttcaagctagaagatgagatcgaccatgtcgcggatctctttatttctaggtttcataagcagatgaagcttcagaaactcttgtccttcaagaggtatcaagaaatgctagcccgaggcacctaaacccatatccatatatatatataaacatgttggcaatagatatgaataatagattcatattatgatctttgctaacgtacgttcttattttgtgttgtctatgataaatccttcgagttctcttattttctaggatcgaaatattacggtctcttagatctgttttcatttaatatgttgaagttgaaggaaggatctgctttgcggaatatgttttcttcctccttgagaccgtactgtgtaagatcttttaagtgttacaatatagagcattattttttggct

SEQ ID NO: 100500 - protein, 187 aa, Arabidopsis thaliana
  peptide (1)..(187): Ceres Seq. ID no. 13605259
  misc_feature (1)..(187): Homolog of NCBI NO: 15238843 NR Description: expressed protein [Arabidopsis thaliana] emb|CAB67623.1~gene_id:MCA23.26~similar to unknown protein thaliana] >gi|26449488|dbj|BAC41870.1| unknown protein
  misc_feature (3)..(185): Homolog of NCBI NO: 38346641 NR Description: OSJNBa0072D21.11 [Oryza sativa (japonica
  misc_feature (1)..(177): Homolog of NCBI NO: 10177654 NR Description: gene_id:MAC12.16~unknown protein [Arabidopsis
  misc_feature (1)..(177): Homolog of NCBI NO: 18417222 NR Description: expressed protein [Arabidopsis thaliana]
  misc_feature (1)..(177): Homolog of NCBI NO: 15215582 NR Description: AT5g13880/MAC12_16 [Arabidopsis thaliana]
  misc_feature (8)..(168): Homolog of NCBI NO: 30060391 NR Description: P0666G10.9 [Oryza sativa (japonica
  misc_feature (19)..(186): Homolog of NCBI NO: 15230907 NR Description: hypothetical protein [Arabidopsis thaliana]
MKKATALMKHIVALLSSMAKAKSIAIKNKTSAFKTRVLMLSLVKHKKLGFRSISNKIHHLLGHADQDDDNDQDQDKNKAIVLYNSKASTMAHHEEYDVHEEESDKYPDLRHTLFEGEEDFGDLEEEGQGSSVIDMVRTSKEEEGENFKLEDEIDHVADLFISRFHKQMKLQKLLSFKRYQEMLARGT

SEQ ID NO: 100501 - protein, 180 aa, Arabidopsis thaliana
  peptide (1)..(180): Ceres Seq. ID no. 13605260
  misc_feature (1)..(180): Homolog of NCBI NO: 15238843 NR Description: expressed protein [Arabidopsis thaliana] emb|CAB67623.1~gene_id:MCA23.26~similar to unknown protein thaliana] >gi|26449488|dbj|BAC41870.1| unknown protein
  misc_feature (1)..(178): Homolog of NCBI NO: 38346641 NR Description: OSJNBa0072D21.11 [Oryza sativa (japonica
  misc_feature (1)..(170): Homolog of NCBI NO: 10177654 NR Description: gene_id:MAC12.16~unknown protein [Arabidopsis
  misc_feature (1)..(170): Homolog of NCBI NO: 18417222 NR Description: expressed protein [Arabidopsis thaliana]
  misc_feature (1)..(170): Homolog of NCBI NO: 15215582 NR Description: AT5g13880/MAC12_16 [Arabidopsis thaliana]
  misc_feature (1)..(161): Homolog of NCBI NO: 30060391 NR Description: P0666G10.9 [Oryza sativa (japonica
  misc_feature (12)..(179): Homolog of NCBI NO: 15230907 NR Description: hypothetical protein [Arabidopsis thaliana]
MKHIVALLSSMAKAKSIAIKNKTSAFKTRVLMLSLVKHKKLGFRSISNKIHHLLGHADQDDDNDQDQDKNKAIVLYNSKASTMAHHEEYDVHEEESDKYPDLRHTLFEGEEDFGDLEEEGQGSSVIDMVRTSKEEEGENFKLEDEIDHVADLFISRFHKQMKLQKLLSFKRYQEMLARGT

SEQ ID NO: 100502 - protein, 170 aa, Arabidopsis thaliana
  peptide (1)..(170): Ceres Seq. ID no. 13605261
  misc_feature (1)..(170): Homolog of NCBI NO: 15238843 NR Description: expressed protein [Arabidopsis thaliana] emb|CAB67623.1~gene_id:MCA23.26~similar to unknown protein thaliana] >gi|26449488|dbj|BAC41870.1| unknown protein
  misc_feature (1)..(168): Homolog of NCBI NO: 38346641 NR Description: OSJNBa0072D21.11 [Oryza sativa (japonica
  misc_feature (1)..(160): Homolog of NCBI NO: 10177654 NR Description: gene_id:MAC12.16~unknown protein [Arabidopsis
  misc_feature (1)..(160): Homolog of NCBI NO: 18417222 NR Description: expressed protein [Arabidopsis thaliana]
  misc_feature (1)..(160): Homolog of NCBI NO: 15215582 NR Description: AT5g13880/MAC12_16 [Arabidopsis thaliana]
  misc_feature (1)..(151): Homolog of NCBI NO: 30060391 NR Description: P0666G10.9 [Oryza sativa (japonica
  misc_feature (2)..(169): Homolog of NCBI NO: 15230907 NR Description: hypothetical protein [Arabidopsis thaliana]
MAKAKSIAIKNKTSAFKTRVLMLSLVKHKKLGFRSISNKIHHLLGHADQDDDNDQDQDKNKAIVLYNSKASTMAHHEEYDVHEEESDKYPDLRHTLFEGEEDFGDLEEEGQGSSVIDMVRTSKEEEGENFKLEDEIDHVADLFISRFHKQMKLQKLLSFKRYQEMLARGT

SEQ ID NO: 100503 - DNA, 2547 bp, Arabidopsis thaliana
  misc_feature (1)..(2547): Ceres Seq. ID no. 13605266
  misc_feature: MA Experiment ID: 20000169 Result: Up-regulated in Transcription
  misc_feature: MA Experiment 20000169 PARAMETER Experiment Name: At_100uM_ABA_P Parameter: Age (day) Value: 14
  misc_feature: MA Experiment 20000169 PARAMETER Experiment Name: At_100uM_ABA_P Parameter: Organism Value: A. thaliana
  misc_feature: MA Experiment 20000169 PARAMETER Experiment Name: At_100uM_ABA_P Parameter: Plant Line Value: WS
  misc_feature: MA Experiment 20000169 PARAMETER Experiment Name: At_100uM_ABA_P Parameter: Timepoint (hr) Value: 6
  misc_feature: MA Experiment 20000169 PARAMETER Experiment Name: At_100uM_ABA_P Parameter: Tissue Value: Aerial
  misc_feature: MA Experiment 20000169 PARAMETER Experiment Name: At_100uM_ABA_P Parameter: Treatment Value: 100uM ABA vs. No Treatment
  misc_feature: MA Experiment ID: 20000267 Result: Up-regulated in Transcription
  misc_feature: MA Experiment 20000267 PARAMETER Experiment Name: At_Drought_P Parameter: Age (day) Value: 7
  misc_feature: MA Experiment 20000267 PARAMETER Experiment Name: At_Drought_P Parameter: Organism Value: A. thaliana
  misc_feature: MA Experiment 20000267 PARAMETER Experiment Name: At_Drought_P Parameter: Plant Line Value: WS
  misc_feature: MA Experiment 20000267 PARAMETER Experiment Name: At_Drought_P Parameter: Timepoint (hr) Value: 6
  misc_feature: MA Experiment 20000267 PARAMETER Experiment Name: At_Drought_P Parameter: Tissue Value: Whole Plant
  misc_feature: MA Experiment 20000267 PARAMETER Experiment Name: At_Drought_P Parameter: Treatment Value: Drought vs. No Drought
  misc_feature: MA Experiment ID: 20000436 Result: Up-regulated in Transcription
  misc_feature: MA Experiment 20000436 PARAMETER Experiment Name: At_Drought_P Parameter: Age (day) Value: 7
  misc_feature: MA Experiment 20000436 PARAMETER Experiment Name: At_Drought_P Parameter: Organism Value: A. thaliana
  misc_feature: MA Experiment 20000436 PARAMETER Experiment Name: At_Drought_P Parameter: Plant Line Value: WS
  misc_feature: MA Experiment 20000436 PARAMETER Experiment Name: At_Drought_P Parameter: Timepoint (hr) Value: 12
  misc_feature: MA Experiment 20000436 PARAMETER Experiment Name: At_Drought_P Parameter: Tissue Value: Whole Plant
  misc_feature: MA Experiment 20000436 PARAMETER Experiment Name: At_Drought_P Parameter: Treatment Value: Drought vs. No Drought
  misc_feature: MA Experiment ID: 20000437 Result: Up-regulated in Transcription
  misc_feature: MA Experiment 20000437 PARAMETER Experiment Name: At_Drought_P Parameter: Age (day) Value: 8
  misc_feature: MA Experiment 20000437 PARAMETER Experiment Name: At_Drought_P Parameter: Organism Value: A. thaliana
  misc_feature: MA Experiment 20000437 PARAMETER Experiment Name: At_Drought_P Parameter: Plant Line Value: WS
  misc_feature: MA Experiment 20000437 PARAMETER Experiment Name: At_Drought_P Parameter: Timepoint (hr) Value: 24
  misc_feature: MA Experiment 20000437 PARAMETER Experiment Name: At_Drought_P Parameter: Tissue Value: Whole Plant
  misc_feature: MA Experiment 20000437 PARAMETER Experiment Name: At_Drought_P Parameter: Treatment Value: Drought vs. No Drought
  misc_feature: MA Experiment ID: 20000438 Result: Down-regulated in Transcription
  misc_feature: MA Experiment 20000438 PARAMETER Experiment Name: At_Shoots__P Parameter: Age (day) Value: 14
  misc_feature: MA Experiment 20000438 PARAMETER Experiment Name: At_Shoots__P Parameter: Tissue Value: Shoots vs. Whole Plant
  misc_feature: MA Experiment ID: 20000439 Result: Up-regulated in Transcription
  misc_feature: MA Experiment 20000439 PARAMETER Experiment Name: At_Roots__P Parameter: Age (day) Value: 14 vs. 21
  misc_feature: MA Experiment 20000439 PARAMETER Experiment Name: At_Roots__P Parameter: Organism Value: A. thaliana
  misc_feature: MA Experiment 20000439 PARAMETER Experiment Name: At_Roots__P Parameter: Tissue Value: Roots vs. Whole Plant
  misc_feature: MA Experiment ID: 20000441 Result: Down-regulated in Transcription
  misc_feature: MA Experiment 20000441 PARAMETER Experiment Name: At_1uM_BR-BRZ__P Parameter: Tissue Value: Shoot Apices
  misc_feature: MA Experiment 20000441 PARAMETER Experiment Name: At_1uM_BR-BRZ__P Parameter: Treatment Value: 1uM BR vs. No Treatment
  misc_feature: MA Experiment ID: 20000443 Result: Down-regulated in Transcription
  misc_feature: MA Experiment 20000443 PARAMETER Experiment Name: At_1uM_BR-BRZ__P Parameter: Tissue Value: Shoot Apices
  misc_feature: MA Experiment 20000443 PARAMETER Experiment Name: At_1uM_BR-BRZ__P Parameter: Treatment Value: 1uM BRZ vs. No Treatment
  misc_feature: MA Experiment ID: 20000453 Result: Up-regulated in Transcription
  misc_feature: MA Experiment 20000453 PARAMETER Experiment Name: At_100uM_ABA_P Parameter: Age (day) Value: 15
  misc_feature: MA Experiment 20000453 PARAMETER Experiment Name: At_100uM_ABA_P Parameter: Organism Value: A. thaliana
  misc_feature: MA Experiment 20000453 PARAMETER Experiment Name: At_100uM_ABA_P Parameter: Plant Line Value: WS
  misc_feature: MA Experiment 20000453 PARAMETER Experiment Name: At_100uM_ABA_P Parameter: Timepoint (hr) Value: 24
  misc_feature: MA Experiment 20000453 PARAMETER Experiment Name: At_100uM_ABA_P Parameter: Tissue Value: Aerial
  misc_feature: MA Experiment 20000453 PARAMETER Experiment Name: At_100uM_ABA_P Parameter: Treatment Value: 100uM ABA vs. No Treatment
  misc_feature: MA Experiment ID: 20000794 Result: Up-regulated in Transcription
  misc_feature: MA Experiment 20000794 PARAMETER Experiment Name: At_Petals_P Parameter: Age (day) Value: 23-25 days
  misc_feature: MA Experiment 20000794 PARAMETER Experiment Name: At_Petals_P Parameter: Plant Line Value: WS
  misc_feature: MA Experiment 20000794 PARAMETER Experiment Name: At_Petals_P Parameter: Tissue Value: Petals vs. Whole plant
  misc_feature: MA Experiment ID: 20001554 Result: Up-regulated in Transcription
  misc_feature: MA Experiment 20001554 PARAMETER Experiment Name: At_Drought_Soil_Dry_P Parameter: Age (day) Value: 21
  misc_feature: MA Experiment 20001554 PARAMETER Experiment Name: At_Drought_Soil_Dry_P Parameter: Organism Value: A. thaliana
  misc_feature: MA Experiment 20001554 PARAMETER Experiment Name: At_Drought_Soil_Dry_P Parameter: Plant Line Value: WS
  misc_feature: MA Experiment 20001554 PARAMETER Experiment Name: At_Drought_Soil_Dry_P Parameter: Post Timepoint (hr) Value: None
  misc_feature: MA Experiment 20001554 PARAMETER Experiment Name: At_Drought_Soil_Dry_P Parameter: Post-Treatment Value: None
  misc_feature: MA Experiment 20001554 PARAMETER Experiment Name: At_Drought_Soil_Dry_P Parameter: Timepoint (day) Value: 7
  misc_feature: MA Experiment 20001554 PARAMETER Experiment Name: At_Drought_Soil_Dry_P Parameter: Treatment Value: Drought vs. No Drought
  misc_feature: MA Experiment ID: 20001556 Result: Up-regulated in Transcription
  misc_feature: MA Experiment 20001556 PARAMETER Experiment Name: At_Drought_Soil_Dry_P Parameter: Age (day) Value: 26
  misc_feature: MA Experiment 20001556 PARAMETER Experiment Name: At_Drought_Soil_Dry_P Parameter: Organism Value: A. thaliana
  misc_feature: MA Experiment 20001556 PARAMETER Experiment Name: At_Drought_Soil_Dry_P Parameter: Plant Line Value: WS
  misc_feature: MA Experiment 20001556 PARAMETER Experiment Name: At_Drought_Soil_Dry_P Parameter: Post Timepoint (hr) Value: None
  misc_feature: MA Experiment 20001556 PARAMETER Experiment Name: At_Drought_Soil_Dry_P Parameter: Post-Treatment Value: None
  misc_feature: MA Experiment 20001556 PARAMETER Experiment Name: At_Drought_Soil_Dry_P Parameter: Timepoint (day) Value: 12
  misc_feature: MA Experiment 20001556 PARAMETER Experiment Name: At_Drought_Soil_Dry_P Parameter: Treatment Value: Drought vs. No Drought
  misc_feature: MA Experiment ID: 20001904 Result: Up-regulated in Transcription
  misc_feature: MA Experiment 20001904 PARAMETER Experiment Name: At_Drought_Reproduction_P Parameter: Age (day) Value: 37
  misc_feature: MA Experiment 20001904 PARAMETER Experiment Name: At_Drought_Reproduction_P Parameter: Organism Value: A. thaliana
  misc_feature: MA Experiment 20001904 PARAMETER Experiment Name: At_Drought_Reproduction_P Parameter: Plant Line Value: WS
  misc_feature: MA Experiment 20001904 PARAMETER Experiment Name: At_Drought_Reproduction_P Parameter: Timepoint (day) Value: 7
  misc_feature: MA Experiment 20001904 PARAMETER Experiment Name: At_Drought_Reproduction_P Parameter: Tissue Value: Rosettes
  misc_feature: MA Experiment 20001904 PARAMETER Experiment Name: At_Drought_Reproduction_P Parameter: Treatment Value: Drought vs. No Drought
  misc_feature: MA Experiment ID: 20001906 Result: Up-regulated in Transcription
  misc_feature: MA Experiment 20001906 PARAMETER Experiment Name: At_Drought_Reproduction_P Parameter: Age (day) Value: 35
  misc_feature: MA Experiment 20001906 PARAMETER Experiment Name: At_Drought_Reproduction_P Parameter: Organism Value: A. thaliana
  misc_feature: MA Experiment 20001906 PARAMETER Experiment Name: At_Drought_Reproduction_P Parameter: Plant Line Value: WS
  misc_feature: MA Experiment 20001906 PARAMETER Experiment Name: At_Drought_Reproduction_P Parameter: Timepoint (day) Value: 5
  misc_feature: MA Experiment 20001906 PARAMETER Experiment Name: At_Drought_Reproduction_P Parameter: Tissue Value: Siliques
  misc_feature: MA Experiment 20001906 PARAMETER Experiment Name: At_Drought_Reproduction_P Parameter: Treatment Value: Drought vs. No Drought
atttaaccgattcttgaaaacatgggacgtctccggagacggcaagagataatagatcatgaagaagaggaatcaaacgacgacgtttcatcaagaagaggaaaactcagtttagccgagacgtttcggtggcttgattcatcagagcatcggagaattgaaaccgatggtcataatgattataaatacatcattcatcccaaaaacaggtggtacaaggcatgggaaatgtttatattggtgtgggcaatatactcctcattgttcactcccatggagtttggtttcttccgcggtctgcctgagagactctttgtacttgacattgttggtcagatcgcgttcttggtcgatattgttcttcagttctttgttgcctatcgcgatactcagacctaccggactgtctacaaaccaacacgtattgctttccggtacttgaagtcgcattttctcatggatttcatcggttgcttcccttgggatcttatttataaggcatcagggaaacatgagttggtgaggtacttgttgtggataaggctatttcgggttcgcaaagtggttgagtttttccaaaggcttgagaaagacacaagaatcaactatctattcactagaatcttaaagctcttgttcgttgaagtttattgtactcacactgctgcttgtatcttctattacttggccaccactcttcctccagaaaacgaaggttacacttggatcggtagcttgaagctaggagactatagctacgagaatttccgagaaatcgatctctggaaacgttatactaccgctctatacttcgccattgtcactatggcaactgtcggttatggagacattcacgcggtgaatctgagggaaatgatattcgtgatgatatatgtttcgtttgatatggttctcggtgcttaccttattggtaacatcactgccttgattgtgaaaggttcaaacacagagaggttcagagataaaatgaatgatctcataagtttcatgaaccgcaaaaaactcgggagagaccttcgtagccagataactggtcatgttagattgcagtacgacagtcactacaccgacactgtcatgcttcaggacatcccagcatcaatccgcgccaagattgcgcaattattgtatctgccttacatcaaaaaagttcctctcttcaaaggctgctccacagagtttattaatcaaatagttataaggctccatgaagagtattttcttccaggagaagtaataacagagcaaggaaacgtcgtggatcatttgtatttcgtctgtgaaggcttactggctcttgttacaaaaacagatggatcagaagagagtgtgacgttacttgggcctcacacttcttttggagacatctccatcatttgcaacatttctcaacctttcactgttagggtttgtgagctatgccatcttttacgactcgataaacagtctttctcaaacatcctcgagatttattttcacgacggacgcacaatcttgaacaatattatggaggagaaggaatcaaatgataggataaagaagctagaatctgacatagtgattcacattgggaaacaagaagcagaacttgcattgaaagtaaacagtgcagctttccaaggagatttttaccagcttaagagcttaatccgatctggagccgatcctaacaaaaccgattacgatggaagatcaccgcttcatcttgcagcatgtagaggctatgaagacattacattattccttattcaggaaggtgttgatgtcaatctaaaagataagttcggacacacaccattgtttgaggctgtgaaagcaggacaagaaggagtgattggtttgcttgtcaaagaaggagcctcctttaatttagaagattcaggaaacttcctttgcacgacagttgctaaaggcgactctgattttctcaagagattgctttcaagcggtatgaacccaaacagtgaagattatgatcacagaacgccgcttcatgtcgcggcttctgaagggttattcttgatggctaaaatgttggttgaagctggagcaagcgttatttctaaagaccgatgggggaattctccgcttgatgaagcccgattgtgcggaaacaagaaactgattaagttactcgaagatgtgaaaaatgctcagtcgtctatctacccgtcaagcttgcgtgaattacaagaggagagaattgagagacggaaatgcacggtgtttccattccacccgcaagaggcgaaagaagagcgtagtagaaagcacggagttgtggtttggatcccaagcaatctcgagaaactcatagtaaccgctgcgaaagagctagggctatcggatggagcctcatttgtactattatcagaagaccaaggtcgtatcacagacattgatatgattagtgatggacacaaattgtatatgatcagtgatactactgatcaaacataatgatggactcttcgatttttccgatgattcattttgaggtttttatattctagagcattttgacgc

SEQ ID NO: 100504 - protein, 819 aa, Arabidopsis thaliana
  peptide (1)..(819): Ceres Seq. ID no. 13605267
  misc_feature (96)..(306): Pfam Name: Ion transport protein Pfam Description: Ion transport protein
  misc_feature (9)..(815): Homolog of NCBI NO: 15232991 NR Description: stelar K+ outward rectifier (potassium [Arabidopsis thaliana] >gi|6728977|gb|AAF26975.1|AC018363_20
  misc_feature (9)..(815): Homolog of NCBI NO: 3810676 NR Description: SKOR [Arabidopsis thaliana]
  misc_feature (9)..(815): Homolog of NCBI NO: 25295800 NR Description: potassium channel protein SKOR [validated] - thaliana >gi|3641845|emb|CAA11281.1| stelar K+ outward rectifying
  misc_feature (51)..(817): Homolog of NCBI NO: 27651624 NR Description: shaker-like potassium channel [Vitis vinifera]
  misc_feature (12)..(808): Homolog of NCBI NO: 10443349 NR Description: outwardly rectifying potassium channel [Samanea
  misc_feature (56)..(814): Homolog of NCBI NO: 9955728 NR Description: outward rectifying potassium channel [Populus
  misc_feature (57)..(721): Homolog of NCBI NO: 38344540 NR Description: OSJNBa0027P08.8 [Oryza sativa (japonica
  misc_feature (503)..(819): Homolog of NCBI NO: 15146306 NR Description: AT5g37500/mpa22_p_30 [Arabidopsis thaliana]
  misc_feature (55)..(713): Homolog of NCBI NO: 7445895 NR Description: potassium channel protein SKT1 - potato
  misc_feature (55)..(714): Homolog of NCBI NO: 99746 NR Description: potassium channel protein AKT1 - Arabidopsis
MGRLRRRQEIIDHEEEESNDDVSSRRGKLSLAETFRWLDSSEHRRIETDGHNDYKYIIHPKNRWYKAWEMFILVWAIYSSLFTPMEFGFFRGLPERLFVLDIVGQIAFLVDIVLQFFVAYRDTQTYRTVYKPTRIAFRYLKSHFLMDFIGCFPWDLIYKASGKHELVRYLLWIRLFRVRKVVEFFQRLEKDTRINYLFTRILKLLFVEVYCTHTAACIFYYLATTLPPENEGYTWIGSLKLGDYSYENFREIDLWKRYTTALYFAIVTMATVGYGDIHAVNLREMIFVMIYVSFDMVLGAYLIGNITALIVKGSNTERFRDKMNDLISFMNRKKLGRDLRSQITGHVRLQYDSHYTDTVMLQDIPASIRAKIAQLLYLPYIKKVPLFKGCSTEFINQIVIRLHEEYFLPGEVITEQGNVVDHLYFVCEGLLALVTKTDGSEESVTLLGPHTSFGDISIICNISQPFTVRVCELCHLLRLDKQSFSNILEIYFHDGRTILNNIMEEKESNDRIKKLESDIVIHIGKQEAELALKVNSAAFQGDFYQLKSLIRSGADPNKTDYDGRSPLHLAACRGYEDITLFLIQEGVDVNLKDKFGHTPLFEAVKAGQEGVIGLLVKEGASFNLEDSGNFLCTTVAKGDSDFLKRLLSSGMNPNSEDYDHRTPLHVAASEGLFLMAKMLVEAGASVISKDRWGNSPLDEARLCGNKKLIKLLEDVKNAQSSIYPSSLRELQEERIERRKCTVFPFHPQEAKEERSRKHGVVVWIPSNLEKLIVTAAKELGLSDGASFVLLSEDQGRITDIDMISDGHKLYMISDTTDQT

SEQ ID NO: 100505 - protein, 750 aa, Arabidopsis thaliana
  peptide (1)..(750): Ceres Seq. ID no. 13605268
  misc_feature (27)..(237): Pfam Name: Ion transport protein Pfam Description: Ion transport protein
  misc_feature (1)..(746): Homolog of NCBI NO: 15232991 NR Description: stelar K+ outward rectifier (potassium [Arabidopsis thaliana] >gi|6728977|gb|AAF26975.1|AC018363_20
  misc_feature (1)..(746): Homolog of NCBI NO: 3810676 NR Description: SKOR [Arabidopsis thaliana]
  misc_feature (1)..(746): Homolog of NCBI NO: 25295800 NR Description: potassium channel protein SKOR [validated] - thaliana >gi|3641845|emb|CAA11281.1| stelar K+ outward rectifying
  misc_feature (1)..(748): Homolog of NCBI NO: 27651624 NR Description: shaker-like potassium channel [Vitis vinifera]
  misc_feature (1)..(739): Homolog of NCBI NO: 10443349 NR Description: outwardly rectifying potassium channel [Samanea
  misc_feature (1)..(745): Homolog of NCBI NO: 9955728 NR Description: outward rectifying potassium channel [Populus
  misc_feature (1)..(652): Homolog of NCBI NO: 38344540 NR Description: OSJNBa0027P08.8 [Oryza sativa (japonica
  misc_feature (434)..(750): Homolog of NCBI NO: 15146306 NR Description: AT5g37500/mpa22_p_30 [Arabidopsis thaliana]
  misc_feature (1)..(644): Homolog of NCBI NO: 7445895 NR Description: potassium channel protein SKT1 - potato
  misc_feature (1)..(645): Homolog of NCBI NO: 99746 NR Description: potassium channel protein AKT1 - Arabidopsis
MFILVWAIYSSLFTPMEFGFFRGLPERLFVLDIVGQIAFLVDIVLQFFVAYRDTQTYRTVYKPTRIAFRYLKSHFLMDFIGCFPWDLIYKASGKHELVRYLLWIRLFRVRKVVEFFQRLEKDTRINYLFTRILKLLFVEVYCTHTAACIFYYLATTLPPENEGYTWIGSLKLGDYSYENFREIDLWKRYTTALYFAIVTMATVGYGDIHAVNLREMIFVMIYVSFDMVLGAYLIGNITALIVKGSNTERFRDKMNDLISFMNRKKLGRDLRSQITGHVRLQYDSHYTDTVMLQDIPASIRAKIAQLLYLPYIKKVPLFKGCSTEFINQIVIRLHEEYFLPGEVITEQGNVVDHLYFVCEGLLALVTKTDGSEESVTLLGPHTSFGDISIICNISQPFTVRVCELCHLLRLDKQSFSNILEIYFHDGRTILNNIMEEKESNDRIKKLESDIVIHIGKQEAELALKVNSAAFQGDFYQLKSLIRSGADPNKTDYDGRSPLHLAACRGYEDITLFLIQEGVDVNLKDKFGHTPLFEAVKAGQEGVIGLLVKEGASFNLEDSGNFLCTTVAKGDSDFLKRLLSSGMNPNSEDYDHRTPLHVAASEGLFLMAKMLVEAGASVISKDRWGNSPLDEARLCGNKKLIKLLEDVKNAQSSIYPSSLRELQEERIERRKCTVFPFHPQEAKEERSRKHGVVVWIPSNLEKLIVTAAKELGLSDGASFVLLSEDQGRITDIDMISDGHKLYMISDTTDQT

SEQ ID NO: 100506 - protein, 735 aa, Arabidopsis thaliana
  peptide (1)..(735): Ceres Seq. ID no. 13605269
  misc_feature (12)..(222): Pfam Name: Ion transport protein Pfam Description: Ion transport protein
  misc_feature (1)..(731): Homolog of NCBI NO: 15232991 NR Description: stelar K+ outward rectifier (potassium [Arabidopsis thaliana] >gi|6728977|gb|AAF26975.1|AC018363_20
  misc_feature (1)..(731): Homolog of NCBI NO: 3810676 NR Description: SKOR [Arabidopsis thaliana]
  misc_feature (1)..(731): Homolog of NCBI NO: 25295800 NR Description: potassium channel protein SKOR [validated] - thaliana >gi|3641845|emb|CAA11281.1| stelar K+ outward rectifying
  misc_feature (1)..(733): Homolog of NCBI NO: 27651624 NR Description: shaker-like potassium channel [Vitis vinifera]
  misc_feature (1)..(724): Homolog of NCBI NO: 10443349 NR Description: outwardly rectifying potassium channel [Samanea
  misc_feature (1)..(730): Homolog of NCBI NO: 9955728 NR Description: outward rectifying potassium channel [Populus
  misc_feature (1)..(637): Homolog of NCBI NO: 38344540 NR Description: OSJNBa0027P08.8 [Oryza sativa (japonica
  misc_feature (419)..(735): Homolog of NCBI NO: 15146306 NR Description: AT5g37500/mpa22_p_30 [Arabidopsis thaliana]
  misc_feature (1)..(629): Homolog of NCBI NO: 7445895 NR Description: potassium channel protein SKT1 - potato
  misc_feature (1)..(630): Homolog of NCBI NO: 99746 NR Description: potassium channel protein AKT1 - Arabidopsis
MEFGFFRGLPERLFVLDIVGQIAFLVDIVLQFFVAYRDTQTYRTVYKPTRIAFRYLKSHFLMDFIGCFPWDLIYKASGKHELVRYLLWIRLFRVRKVVEFFQRLEKDTRINYLFTRILKLLFVEVYCTHTAACIFYYLATTLPPENEGYTWIGSLKLGDYSYENFREIDLWKRYTTALYFAIVTMATVGYGDIHAVNLREMIFVMIYVSFDMVLGAYLIGNITALIVKGSNTERFRDKMNDLISFMNRKKLGRDLRSQITGHVRLQYDSHYTDTVMLQDIPASIRAKIAQLLYLPYIKKVPLFKGCSTEFINQIVIRLHEEYFLPGEVITEQGNVVDHLYFVCEGLLALVTKTDGSEESVTLLGPHTSFGDISIICNISQPFTVRVCELCHLLRLDKQSFSNILEIYFHDGRTILNNIMEEKESNDRIKKLESDIVIHIGKQEAELALKVNSAAFQGDFYQLKSLIRSGADPNKTDYDGRSPLHLAACRGYEDITLFLIQEGVDVNLKDKFGHTPLFEAVKAGQEGVIGLLVKEGASFNLEDSGNFLCTTVAKGDSDFLKRLLSSGMNPNSEDYDHRTPLHVAASEGLFLMAKMLVEAGASVISKDRWGNSPLDEARLCGNKKLIKLLEDVKNAQSSIYPSSLRELQEERIERRKCTVFPFHPQEAKEERSRKHGVVVWIPSNLEKLIVTAAKELGLSDGASFVLLSEDQGRITDIDMISDGHKLYMISDTTDQT

SEQ ID NO: 100507 - DNA, 2124 bp, Arabidopsis thaliana
  misc_feature (1)..(2124): Ceres Seq. ID no. 13605272
  misc_feature: MA Experiment ID: 20000171 Result: Down-regulated in Transcription
  misc_feature: MA Experiment 20000171 PARAMETER Experiment Name: At_42deg_Heat_P Parameter: Age (day) Value: 14
  misc_feature: MA Experiment 20000171 PARAMETER Experiment Name: At_42deg_Heat_P Parameter: Organism Value: A. thaliana
  misc_feature: MA Experiment 20000171 PARAMETER Experiment Name: At_42deg_Heat_P Parameter: Plant Line Value: WS
  misc_feature: MA Experiment 20000171 PARAMETER Experiment Name: At_42deg_Heat_P Parameter: Temperature (deg C) Value: 42 vs. 22
  misc_feature: MA Experiment 20000171 PARAMETER Experiment Name: At_42deg_Heat_P Parameter: Timepoint (hr) Value: 1
  misc_feature: MA Experiment 20000171 PARAMETER Experiment Name: At_42deg_Heat_P Parameter: Tissue Value: Aerial
  misc_feature: MA Experiment ID: 20000173 Result: Down-regulated in Transcription
  misc_feature: MA Experiment 20000173 PARAMETER Experiment Name: At_42deg_Heat_P Parameter: Age (day) Value: 14
  misc_feature: MA Experiment 20000173 PARAMETER Experiment Name: At_42deg_Heat_P Parameter: Organism Value: A. thaliana
  misc_feature: MA Experiment 20000173 PARAMETER Experiment Name: At_42deg_Heat_P Parameter: Plant Line Value: WS
  misc_feature: MA Experiment 20000173 PARAMETER Experiment Name: At_42deg_Heat_P Parameter: Temperature (deg C) Value: 42 vs. 22
  misc_feature: MA Experiment 20000173 PARAMETER Experiment Name: At_42deg_Heat_P Parameter: Timepoint (hr) Value: 6
  misc_feature: MA Experiment 20000173 PARAMETER Experiment Name: At_42deg_Heat_P Parameter: Tissue Value: Aerial
  misc_feature: MA Experiment ID: 20000179 Result: Up-regulated in Transcription
  misc_feature: MA Experiment 20000179 PARAMETER Experiment Name: At_Germinating_Seeds_P Parameter: Age (hr) Value: 6 vs. 0
  misc_feature: MA Experiment 20000179 PARAMETER Experiment Name: At_Germinating_Seeds_P Parameter: Tissue Value: Germinating Seeds
  misc_feature: MA Experiment ID: 20000180 Result: Up-regulated in Transcription
  misc_feature: MA Experiment 20000180 PARAMETER Experiment Name: At_Germinating_Seeds_P Parameter: Age (hr) Value: 24 vs. 0
  misc_feature: MA Experiment 20000180 PARAMETER Experiment Name: At_Germinating_Seeds_P Parameter: Tissue Value: Germinating Seeds
  misc_feature: MA Experiment ID: 20000184 Result: Down-regulated in Transcription
  misc_feature: MA Experiment 20000184 PARAMETER Experiment Name: At_Shoots__P Parameter: Age (day) Value: 7
  misc_feature: MA Experiment 20000184 PARAMETER Experiment Name: At_Shoots__P Parameter: Tissue Value: Shoots vs. Whole Plant
  misc_feature: MA Experiment ID: 20000438 Result: Down-regulated in Transcription
  misc_feature: MA Experiment 20000438 PARAMETER Experiment Name: At_Shoots__P Parameter: Age (day) Value: 14
  misc_feature: MA Experiment 20000438 PARAMETER Experiment Name: At_Shoots__P Parameter: Tissue Value: Shoots vs. Whole Plant
  misc_feature: MA Experiment ID: 20000709 Result: Down-regulated in Transcription
  misc_feature: MA Experiment 20000709 PARAMETER Experiment Name: At_15mM_NH4NO3_L-to-H_P Parameter: Age (hr) Value: 14
  misc_feature: MA Experiment 20000709 PARAMETER Experiment Name: At_15mM_NH4NO3_L-to-H_P Parameter: Organism Value: A. thaliana
  misc_feature: MA Experiment 20000709 PARAMETER Experiment Name: At_15mM_NH4NO3_L-to-H_P Parameter: Plant Line Value: WS
  misc_feature: MA Experiment 20000709 PARAMETER Experiment Name: At_15mM_NH4NO3_L-to-H_P Parameter: Timepoint (hr) Value: 4
  misc_feature: MA Experiment 20000709 PARAMETER Experiment Name: At_15mM_NH4NO3_L-to-H_P Parameter: Tissue Value: Aerial
  misc_feature: MA Experiment 20000709 PARAMETER Experiment Name: At_15mM_NH4NO3_L-to-H_P Parameter: Treatment Value: 15mM NH4NO3 vs. 30mM Mannitol
  misc_feature: MA Experiment ID: 20001905 Result: Down-regulated in Transcription
  misc_feature: MA Experiment 20001905 PARAMETER Experiment Name: At_Drought_Reproduction_P Parameter: Age (day) Value: 40
  misc_feature: MA Experiment 20001905 PARAMETER Experiment Name: At_Drought_Reproduction_P Parameter: Organism Value: A. thaliana
  misc_feature: MA Experiment 20001905 PARAMETER Experiment Name: At_Drought_Reproduction_P Parameter: Plant Line Value: WS
  misc_feature: MA Experiment 20001905 PARAMETER Experiment Name: At_Drought_Reproduction_P Parameter: Timepoint (day) Value: 10
  misc_feature: MA Experiment 20001905 PARAMETER Experiment Name: At_Drought_Reproduction_P Parameter: Tissue Value: Rosettes
  misc_feature: MA Experiment 20001905 PARAMETER Experiment Name: At_Drought_Reproduction_P Parameter: Treatment Value: Drought vs. No Drought
attgactctttttctctatctctctagatcgaaagggaaaaggagatagagattgaagatgcgtgacgcaatcatcgccgatcctcttctggccatcgaccatgaaacagtcgcagagaagaagaaacagagcaaaaatctaaagatttctcttttactgcttctgattctcttagcaacttcaggttattatagctttagtgacaacattacaacagttttcttatcaagacaagctattgatgatgatcatagtcttagccttggaaccatcagtgacgtggttgaatctgagaatggtgttgtggctgctgacgacgctcgatgttccgagatcggtgcctctgttcttagaagtggcggtcatgcggtggacgccgccgtggctattactttatgtgttggtgttgttaatccaatgtctagtggaatcggtggtggttctttcttgattgttagctcgcagaaagattccaaagctgaggcttttgacatgagagaaactgctccattagctgcttctaaggatatgtataagaacgatgctagtgcgaaatcgttgggcgcattgtctatgggagttccgggagagatagctggactttacgaggcttggaaacggtatggccgtcttccgtggaaaccgcttttcgagccggctattaagctggctcgggacggtttcgtggtgtatccgtatctcggaaaggccatatcgaccaaagttgcgatgatacttaaagatccgggtatgcggagtgtcttctcaagaaacggacaggttttgaaaaccggtgagacttgctataacccggagctagctcagagtcttgagactatttctgagcaaggcccgggagcgttctacaacgggacagtaggcgagaagcttgttaaagatgtgaagaaggcgggagggatcataacgatggatgatctaagaagttataaggtccgagttaccgatgcaatgtctgtggatgttatgggttatacggttcatggaatgccgcctccttcgggcggtacagtcggtttttcgatggttatgaatatcttggatagttactcgaatctttacactgcttcgggaagagagctcgggctgcaccgtttgatagaagcaatgaaacatatgtttgcagctcgtatggatcttggagaccctgagttcgttaatgtaacaaactctatgaaccaaatgctctcgaaggctcacgcggaagaaatccaaaagaggattttcgacaacacgacattcccacctgagtactatatgaaccggtggagccaactcagggaccaaggaacgagtcatttctgcgttgtggatgcggatcgcaacagtgtgtcgatgacctcaaccgtgaattaccgttttggtgccggggtgttatcaccttcaactggaattgtacttaacaacgagatggatgatttctcaacacccacggaaatcactcccgacatgcttcctccagcgcctacaaatttcattgaaccaaacaaaagaccattatcttccatgacacctctcgtgatcaccaaggatggtgagttcgtggcagcgcttggaggagctggtggaatgcatataattccagcggtgcttcaagtgtttcttaattgctttgtgttgaatatgaaacctaaagaagcagtagagagtgccagaatataccatagattgataccaaatgttgtttcctatgagaacttcaccacgatcaatggcgatcacataggggtttcagaagataccaagatgtttctagcagagagaggacatgagctaaaggagctatcaggtggagctatagttcaacttattgttcagagtttcaaggaagagaaagaagaagaaatgattattgaaattggaaggaaaatcggaaagaaatcgaaaccattaaagggcttacttactgcagttagtgatcctcgaaaagatggaaagccagctgcagtttgatttcgttattaagctaattacaaatttcctcattcaagtcccattctctatcatgtaaatttgaataaagttacatgagcctcaaagactcagcgtgggatatatacagaagcaaagttgtagttggaaccaagagttgttacattattccc

SEQ ID NO: 100508 - protein, 637 aa, Arabidopsis thaliana
  peptide (1)..(637): Ceres Seq. ID no. 13605273
  misc_feature (95)..(632): Pfam Name: Gamma-glutamyltranspeptidase Pfam Description: Gamma-glutamyltranspeptidase
  misc_feature (76)..(637): Homolog of NCBI NO: 34895870 NR Description: putative gamma-glutamyltransferase [Oryza sativa
  misc_feature (76)..(462): Homolog of NCBI NO: 34895872 NR Description: putative gamma-glutamyltransferase [Oryza sativa
  misc_feature (487)..(637): Homolog of NCBI NO: 34895872 NR Description: putative gamma-glutamyltransferase [Oryza sativa
  misc_feature (80)..(635): Homolog of NCBI NO: 15235951 NR Description: gamma-glutamyltransferase -related [Arabidopsis
  misc_feature (75)..(635): Homolog of NCBI NO: 28208262 NR Description: gamma-glutamyl transferase [Raphanus sativus]
  misc_feature (74)..(592): Homolog of NCBI NO: 38567882 NR Description: OSJNBa0036B21.10 [Oryza sativa (japonica
  misc_feature (75)..(635): Homolog of NCBI NO: 22329258 NR Description: gamma-glutamyltransferase -related [Arabidopsis >gi|17978922|gb|AAL47428.1| AT4g39640/T19P19_30 [Arabidopsis >gi|23308189|gb|AAN18064.1| At4g39640/T19P19_30 [Arabidopsis
  misc_feature (76)..(635): Homolog of NCBI NO: 27348118 NR Description: gamma-glutamyl transferase [Raphanus sativus]
  misc_feature (75)..(635): Homolog of NCBI NO: 7433816 NR Description: probable gamma-glutamyltransferase (EC 2.3.2.2)
  misc_feature (82)..(635): Homolog of NCBI NO: 2129587 NR Description: gamma-glutamyltransferase (EC 2.3.2.2) -
MRDAIIADPLLAIDHETVAEKKKQSKNLKISLLLLLILLATSGYYSFSDNITTVFLSRQAIDDDHSLSLGTISDVVESENGVVAADDARCSEIGASVLRSGGHAVDAAVAITLCVGVVNPMSSGIGGGSFLIVSSQKDSKAEAFDMRETAPLAASKDMYKNDASAKSLGALSMGVPGEIAGLYEAWKRYGRLPWKPLFEPAIKLARDGFVVYPYLGKAISTKVAMILKDPGMRSVFSRNGQVLKTGETCYNPELAQSLETISEQGPGAFYNGTVGEKLVKDVKKAGGIITMDDLRSYKVRVTDAMSVDVMGYTVHGMPPPSGGTVGFSMVMNILDSYSNLYTASGRELGLHRLIEAMKHMFAARMDLGDPEFVNVTNSMNQMLSKAHAEEIQKRIFDNTTFPPEYYMNRWSQLRDQGTSHFCVVDADRNSVSMTSTVNYRFGAGVLSPSTGIVLNNEMDDFSTPTEITPDMLPPAPTNFIEPNKRPLSSMTPLVITKDGEFVAALGGAGGMHIIPAVLQVFLNCFVLNMKPKEAVESARIYHRLIPNVVSYENFTTINGDHIGVSEDTKMFLAERGHELKELSGGAIVQLIVQSFKEEKEEEMIIEIGRKIGKKSKPLKGLLTAVSDPRKDGKPAAV

SEQ ID NO: 100509 - protein, 517 aa, Arabidopsis thaliana
  peptide (1)..(517): Ceres Seq. ID no. 13605274
  misc_feature (1)..(512): Pfam Name: Gamma-glutamyltranspeptidase Pfam Description: Gamma-glutamyltranspeptidase
  misc_feature (1)..(517): Homolog of NCBI NO: 34895870 NR Description: putative gamma-glutamyltransferase [Oryza sativa
  misc_feature (1)..(342): Homolog of NCBI NO: 34895872 NR Description: putative gamma-glutamyltransferase [Oryza sativa
  misc_feature (367)..(517): Homolog of NCBI NO: 34895872 NR Description: putative gamma-glutamyltransferase [Oryza sativa
  misc_feature (1)..(515): Homolog of NCBI NO: 15235951 NR Description: gamma-glutamyltransferase -related [Arabidopsis
  misc_feature (1)..(515): Homolog of NCBI NO: 28208262 NR Description: gamma-glutamyl transferase [Raphanus sativus]
  misc_feature (1)..(472): Homolog of NCBI NO: 38567882 NR Description: OSJNBa0036B21.10 [Oryza sativa (japonica
  misc_feature (1)..(515): Homolog of NCBI NO: 22329258 NR Description: gamma-glutamyltransferase -related [Arabidopsis >gi|17978922|gb|AAL47428.1| AT4g39640/T19P19_30 [Arabidopsis >gi|23308189|gb|AAN18064.1| At4g39640/T19P19_30 [Arabidopsis
  misc_feature (1)..(515): Homolog of NCBI NO: 27348118 NR Description: gamma-glutamyl transferase [Raphanus sativus]
  misc_feature (1)..(515): Homolog of NCBI NO: 7433816 NR Description: probable gamma-glutamyltransferase (EC 2.3.2.2)
  misc_feature (1)..(515): Homolog of NCBI NO: 2129587 NR Description: gamma-glutamyltransferase (EC 2.3.2.2) -
MSSGIGGGSFLIVSSQKDSKAEAFDMRETAPLAASKDMYKNDASAKSLGALSMGVPGEIAGLYEAWKRYGRLPWKPLFEPAIKLARDGFVVYPYLGKAISTKVAMILKDPGMRSVFSRNGQVLKTGETCYNPELAQSLETISEQGPGAFYNGTVGEKLVKDVKKAGGIITMDDLRSYKVRVTDAMSVDVMGYTVHGMPPPSGGTVGFSMVMNILDSYSNLYTASGRELGLHRLIEAMKHMFAARMDLGDPEFVNVTNSMNQMLSKAHAEEIQKRIFDNTTFPPEYYMNRWSQLRDQGTSHFCVVDADRNSVSMTSTVNYRFGAGVLSPSTGIVLNNEMDDFSTPTEITPDMLPPAPTNFIEPNKRPLSSMTPLVITKDGEFVAALGGAGGMHIIPAVLQVFLNCFVLNMKPKEAVESARIYHRLIPNVVSYENFTTINGDHIGVSEDTKMFLAERGHELKELSGGAIVQLIVQSFKEEKEEEMIIEIGRKIGKKSKPLKGLLTAVSDPRKDGKPAAV

SEQ ID NO: 100510 - protein, 492 aa, Arabidopsis thaliana
  peptide (1)..(492): Ceres Seq. ID no. 13605275
  misc_feature (1)..(487): Pfam Name: Gamma-glutamyltranspeptidase Pfam Description: Gamma-glutamyltranspeptidase
  misc_feature (1)..(492): Homolog of NCBI NO: 34895870 NR Description: putative gamma-glutamyltransferase [Oryza sativa
  misc_feature (1)..(317): Homolog of NCBI NO: 34895872 NR Description: putative gamma-glutamyltransferase [Oryza sativa
  misc_feature (342)..(492): Homolog of NCBI NO: 34895872 NR Description: putative gamma-glutamyltransferase [Oryza sativa
  misc_feature (1)..(490): Homolog of NCBI NO: 15235951 NR Description: gamma-glutamyltransferase -related [Arabidopsis
  misc_feature (1)..(490): Homolog of NCBI NO: 28208262 NR Description: gamma-glutamyl transferase [Raphanus sativus]
  misc_feature (1)..(447): Homolog of NCBI NO: 38567882 NR Description: OSJNBa0036B21.10 [Oryza sativa (japonica
  misc_feature (1)..(490): Homolog of NCBI NO: 22329258 NR Description: gamma-glutamyltransferase -related [Arabidopsis >gi|17978922|gb|AAL47428.1| AT4g39640/T19P19_30 [Arabidopsis >gi|23308189|gb|AAN18064.1| At4g39640/T19P19_30 [Arabidopsis
  misc_feature (1)..(490): Homolog of NCBI NO: 27348118 NR Description: gamma-glutamyl transferase [Raphanus sativus]
  misc_feature (1)..(490): Homolog of NCBI NO: 7433816 NR Description: probable gamma-glutamyltransferase (EC 2.3.2.2)
  misc_feature (1)..(490): Homolog of NCBI NO: 2129587 NR Description: gamma-glutamyltransferase (EC 2.3.2.2) -
MRETAPLAASKDMYKNDASAKSLGALSMGVPGEIAGLYEAWKRYGRLPWKPLFEPAIKLARDGFVVYPYLGKAISTKVAMILKDPGMRSVFSRNGQVLKTGETCYNPELAQSLETISEQGPGAFYNGTVGEKLVKDVKKAGGIITMDDLRSYKVRVTDAMSVDVMGYTVHGMPPPSGGTVGFSMVMNILDSYSNLYTASGRELGLHRLIEAMKHMFAARMDLGDPEFVNVTNSMNQMLSKAHAEEIQKRIFDNTTFPPEYYMNRWSQLRDQGTSHFCVVDADRNSVSMTSTVNYRFGAGVLSPSTGIVLNNEMDDFSTPTEITPDMLPPAPTNFIEPNKRPLSSMTPLVITKDGEFVAALGGAGGMHIIPAVLQVFLNCFVLNMKPKEAVESARIYHRLIPNVVSYENFTTINGDHIGVSEDTKMFLAERGHELKELSGGAIVQLIVQSFKEEKEEEMIIEIGRKIGKKSKPLKGLLTAVSDPRKDGKPAAV

SEQ ID NO: 100511 - DNA, 1612 bp, Arabidopsis thaliana
  misc_feature (1)..(1612): Ceres Seq. ID no. 13605292
  misc_feature: MA Experiment ID: 20000185 Result: Up-regulated in Transcription
  misc_feature: MA Experiment 20000185 PARAMETER Experiment Name: At_Roots__P Parameter: Age (day) Value: 7 vs. 21
  misc_feature: MA Experiment 20000185 PARAMETER Experiment Name: At_Roots__P Parameter: Organism Value: A. thaliana
  misc_feature: MA Experiment 20000185 PARAMETER Experiment Name: At_Roots__P Parameter: Tissue Value: Roots vs. Whole Plant
  misc_feature: MA Experiment ID: 20000439 Result: Up-regulated in Transcription
  misc_feature: MA Experiment 20000439 PARAMETER Experiment Name: At_Roots__P Parameter: Age (day) Value: 14 vs. 21
  misc_feature: MA Experiment 20000439 PARAMETER Experiment Name: At_Roots__P Parameter: Organism Value: A. thaliana
  misc_feature: MA Experiment 20000439 PARAMETER Experiment Name: At_Roots__P Parameter: Tissue Value: Roots vs. Whole Plant
  misc_feature: MA Experiment ID: 20001248 Result: Down-regulated in Transcription
  misc_feature: MA Experiment 20001248 PARAMETER Experiment Name: At_Far-red-induction_P Parameter: Age (day) Value: 7
  misc_feature: MA Experiment 20001248 PARAMETER Experiment Name: At_Far-red-induction_P Parameter: Light Value: Far-red vs. White
  misc_feature: MA Experiment 20001248 PARAMETER Experiment Name: At_Far-red-induction_P Parameter: Organism Value: A. thaliana
  misc_feature: MA Experiment 20001248 PARAMETER Experiment Name: At_Far-red-induction_P Parameter: Plant Line Value: Columbia
  misc_feature: MA Experiment 20001248 PARAMETER Experiment Name: At_Far-red-induction_P Parameter: Timepoint (hr) Value: 4
  misc_feature: MA Experiment 20001248 PARAMETER Experiment Name: At_Far-red-induction_P Parameter: Tissue Value: Whole Plant
atgaatcggcgctacgaaaagccaccgccattgtcagtttcctccaaagggaagaagaagcattttgtcaatcacacagctcccaacactcctggaaattacgagaggactcaaaccagtccaacgttatcaacggctcgatcacacgaacccgatgataagctcaattacgagatcttctcaattctcgaaagcaaatttctctttggttacgaagacccaaggctactatggattcctcagagtccattacgacccggtgattccgaagcaggtccttctcccagatcaccgttgactccaaacggcgtcgttctcccgggaacaccgtcttcatctttcagaagtccgagaggaagaatctgcgttttgagcattgacggtggcggtatgagaggtcttttggcgggaaaatccctaatctatttagagcaaatgctgaaagagaaatccggcgatccaaacgctcgaatcgccgattacttcgacgtcgctgccggatcaggtgtcggtggagtattcgctgcgatgatatttgcgacaagagacggcaaccgcccgattttcaaggcggaggacacttggaaatttctcgtagagaacgcagaaggattctacagatcagggagcggaagtggaggaggaggagcaggagcggcgattaaacgggtcataagatctggatccggatccggatcatcttcagtaaccgccgcaacggcgaagctagaaaaagcaatgaaagcatcattcgccgatctaacgcttaaagacacactcaaaccaattctcatctcttgctacgatctctcaagcacggctccgtttctattctcacgcgccgacgcgttagaaagcgacagtttcgattttcgtctccgagatatttgccgtgccacatgggcggagccggggacgtttgatccggttcgcacgtgttccgtcgacgggaaaacgcggtgcgttgcggtggggggtggattagcgatgagtaatccgacggcggcggcgataacgcacgtgtttcataacaaacaggagttcccggcggtgaaaggagtggaggatttgttggtgttgtcgcttgggactggtcagctttttgaagtgaattatgattatgaacaggttaagaattggcgcgttaaggaatgggctcggcccatggcgagaatctctggtgatgggtctgctgagtttgttgatcaagctgttgctatgggctttgggccttaccgaagtagtaattacgttcgcattcagcaggcaaatggatcgcgattaggagcttgtggaccgaacgtggacacggatccaagagcagagaatgtgaagaaactgacggagatagctgatgagatgttgaagcaaaacaatgtggagtcggttttgttcggaagcaaaaggataggagaaatgagcaattcagagaaaatagagtggtttgcgagcgagcttgtcattgagcagcagcgacgaagtgttagagcgtctccaaccgtaacgctaaagcaagctgtgtccaaaactaaccgcaatgctataaacgcaactctcactctcatatctaaagatagatgaaaacacctgtttttggtgcttcctattggtt

SEQ ID NO: 100512 - protein, 526 aa, Arabidopsis thaliana
  peptide (1)..(526): Ceres Seq. ID no. 13605293
  misc_feature (124)..(338): Pfam Name: Patatin-like phospholipase Pfam Description: Patatin-like phospholipase
  misc_feature (1)..(526): Homolog of NCBI NO: 7486230 NR Description: hypothetical protein F27B13.40 - Arabidopsis >gi|4914404|emb|CAB43655.1| putative protein [Arabidopsis >gi|7269879|emb|CAB79738.1| putative protein [Arabidopsis
  misc_feature (1)..(526): Homolog of NCBI NO: 30688454 NR Description: patatin-related [Arabidopsis thaliana]
  misc_feature (111)..(526): Homolog of NCBI NO: 15233136 NR Description: patatin-related [Arabidopsis thaliana]
  misc_feature (53)..(75): Homolog of NCBI NO: 15233136 NR Description: patatin-related [Arabidopsis thaliana]
  misc_feature (86)..(506): Homolog of NCBI NO: 15225054 NR Description: patatin family [Arabidopsis thaliana]
  misc_feature (212)..(502): Homolog of NCBI NO: 34899642 NR Description: contains ESTs
  misc_feature (118)..(216): Homolog of NCBI NO: 34899642 NR Description: contains ESTs
  misc_feature (53)..(71): Homolog of NCBI NO: 34899642 NR Description: contains ESTs
  misc_feature (123)..(429): Homolog of NCBI NO: 11357489 NR Description: hypothetical protein F16M2.50 - Arabidopsis >gi|7523402|emb|CAB86421.1| putative protein [Arabidopsis
  misc_feature (123)..(429): Homolog of NCBI NO: 18412659 NR Description: patatin-related [Arabidopsis thaliana] AT3g63200/F16M2_50 [Arabidopsis thaliana]
MNRRYEKPPPLSVSSKGKKKHFVNHTAPNTPGNYERTQTSPTLSTARSHEPDDKLNYEIFSILESKFLFGYEDPRLLWIPQSPLRPGDSEAGPSPRSPLTPNGVVLPGTPSSSFRSPRGRICVLSIDGGGMRGLLAGKSLIYLEQMLKEKSGDPNARIADYFDVAAGSGVGGVFAAMIFATRDGNRPIFKAEDTWKFLVENAEGFYRSGSGSGGGGAGAAIKRVIRSGSGSGSSSVTAATAKLEKAMKASFADLTLKDTLKPILISCYDLSSTAPFLFSRADALESDSFDFRLRDICRATWAEPGTFDPVRTCSVDGKTRCVAVGGGLAMSNPTAAAITHVFHNKQEFPAVKGVEDLLVLSLGTGQLFEVNYDYEQVKNWRVKEWARPMARISGDGSAEFVDQAVAMGFGPYRSSNYVRIQQANGSRLGACGPNVDTDPRAENVKKLTEIADEMLKQNNVESVLFGSKRIGEMSNSEKIEWFASELVIEQQRRSVRASPTVTLKQAVSKTNRNAINATLTLISKDR

SEQ ID NO: 100513 - protein, 396 aa, Arabidopsis thaliana
  peptide (1)..(396): Ceres Seq. ID no. 13605294
  misc_feature (1)..(208): Pfam Name: Patatin-like phospholipase Pfam Description: Patatin-like phospholipase
  misc_feature (1)..(396): Homolog of NCBI NO: 7486230 NR Description: hypothetical protein F27B13.40 - Arabidopsis >gi|4914404|emb|CAB43655.1| putative protein [Arabidopsis >gi|7269879|emb|CAB79738.1| putative protein [Arabidopsis
  misc_feature (1)..(396): Homolog of NCBI NO: 30688454 NR Description: patatin-related [Arabidopsis thaliana]
  misc_feature (1)..(396): Homolog of NCBI NO: 15233136 NR Description: patatin-related [Arabidopsis thaliana]
  misc_feature (1)..(376): Homolog of NCBI NO: 15225054 NR Description: patatin family [Arabidopsis thaliana]
  misc_feature (82)..(372): Homolog of NCBI NO: 34899642 NR Description: contains ESTs
  misc_feature (1)..(86): Homolog of NCBI NO: 34899642 NR Description: contains ESTs
  misc_feature (1)..(299): Homolog of NCBI NO: 11357489 NR Description: hypothetical protein F16M2.50 - Arabidopsis >gi|7523402|emb|CAB86421.1| putative protein [Arabidopsis
  misc_feature (1)..(299): Homolog of NCBI NO: 18412659 NR Description: patatin-related [Arabidopsis thaliana] AT3g63200/F16M2_50 [Arabidopsis thaliana]
  misc_feature (321)..(369): Homolog of NCBI NO: 11357489 NR Description: hypothetical protein F16M2.50 - Arabidopsis >gi|7523402|emb|CAB86421.1| putative protein [Arabidopsis
  misc_feature (321)..(369): Homolog of NCBI NO: 18412659 NR Description: patatin-related [Arabidopsis thaliana] AT3g63200/F16M2_50 [Arabidopsis thaliana]
MRGLLAGKSLIYLEQMLKEKSGDPNARIADYFDVAAGSGVGGVFAAMIFATRDGNRPIFKAEDTWKFLVENAEGFYRSGSGSGGGGAGAAIKRVIRSGSGSGSSSVTAATAKLEKAMKASFADLTLKDTLKPILISCYDLSSTAPFLFSRADALESDSFDFRLRDICRATWAEPGTFDPVRTCSVDGKTRCVAVGGGLAMSNPTAAAITHVFHNKQEFPAVKGVEDLLVLSLGTGQLFEVNYDYEQVKNWRVKEWARPMARISGDGSAEFVDQAVAMGFGPYRSSNYVRIQQANGSRLGACGPNVDTDPRAENVKKLTEIADEMLKQNNVESVLFGSKRIGEMSNSEKIEWFASELVIEQQRRSVRASPTVTLKQAVSKTNRNAINATLTLISKDR

SEQ ID NO: 100514 - protein, 381 aa, Arabidopsis thaliana
  peptide (1)..(381): Ceres Seq. ID no. 13605295
  misc_feature (1)..(193): Pfam Name: Patatin-like phospholipase Pfam Description: Patatin-like phospholipase
  misc_feature (1)..(381): Homolog of NCBI NO: 7486230 NR Description: hypothetical protein F27B13.40 - Arabidopsis >gi|4914404|emb|CAB43655.1| putative protein [Arabidopsis >gi|7269879|emb|CAB79738.1| putative protein [Arabidopsis
  misc_feature (1)..(381): Homolog of NCBI NO: 30688454 NR Description: patatin-related [Arabidopsis thaliana]
  misc_feature (1)..(381): Homolog of NCBI NO: 15233136 NR Description: patatin-related [Arabidopsis thaliana]
  misc_feature (1)..(361): Homolog of NCBI NO: 15225054 NR Description: patatin family [Arabidopsis thaliana]
  misc_feature (67)..(357): Homolog of NCBI NO: 34899642 NR Description: contains ESTs
  misc_feature (1)..(71): Homolog of NCBI NO: 34899642 NR Description: contains ESTs
  misc_feature (1)..(284): Homolog of NCBI NO: 11357489 NR Description: hypothetical protein F16M2.50 - Arabidopsis >gi|7523402|emb|CAB86421.1| putative protein [Arabidopsis
  misc_feature (1)..(284): Homolog of NCBI NO: 18412659 NR Description: patatin-related [Arabidopsis thaliana] AT3g63200/F16M2_50 [Arabidopsis thaliana]
  misc_feature (306)..(354): Homolog of NCBI NO: 11357489 NR Description: hypothetical protein F16M2.50 - Arabidopsis >gi|7523402|emb|CAB86421.1| putative protein [Arabidopsis
  misc_feature (306)..(354): Homolog of NCBI NO: 18412659 NR Description: patatin-related [Arabidopsis thaliana] AT3g63200/F16M2_50 [Arabidopsis thaliana]
MLKEKSGDPNARIADYFDVAAGSGVGGVFAAMIFATRDGNRPIFKAEDTWKFLVENAEGFYRSGSGSGGGGAGAAIKRVIRSGSGSGSSSVTAATAKLEKAMKASFADLTLKDTLKPILISCYDLSSTAPFLFSRADALESDSFDFRLRDICRATWAEPGTFDPVRTCSVDGKTRCVAVGGGLAMSNPTAAAITHVFHNKQEFPAVKGVEDLLVLSLGTGQLFEVNYDYEQVKNWRVKEWARPMARISGDGSAEFVDQAVAMGFGPYRSSNYVRIQQANGSRLGACGPNVDTDPRAENVKKLTEIADEMLKQNNVESVLFGSKRIGEMSNSEKIEWFASELVIEQQRRSVRASPTVTLKQAVSKTNRNAINATLTLISKDR

SEQ ID NO: 100515 - DNA, 1447 bp, Arabidopsis thaliana
  misc_feature (1)..(1447): Ceres Seq. ID no. 13605312
  misc_feature: MA Experiment ID: 20000451 Result: Down-regulated in Transcription
  misc_feature: MA Experiment 20000451 PARAMETER Experiment Name: At_CS6879_Shoots-Roots_P Parameter: Age (day) Value: 14
  misc_feature: MA Experiment 20000451 PARAMETER Experiment Name: At_CS6879_Shoots-Roots_P Parameter: Organism Value: A. thaliana
  misc_feature: MA Experiment 20000451 PARAMETER Experiment Name: At_CS6879_Shoots-Roots_P Parameter: Plant Line Value: CS6879 vs. WS
  misc_feature: MA Experiment 20000451 PARAMETER Experiment Name: At_CS6879_Shoots-Roots_P Parameter: Tissue Value: Roots
ccacgcgtccgaagcaagatggagtcaagtgatcgttcaagtcaagcaaaagctttcgacgagacaaaaaccggcgtgaaagggcttgtggcttcgggaatcaaagagattccagccatgttccatacacctccggatactctaacaagcctgaaacaaacagcaccaccttcgcagcagctgacgatccccacggtggatctgaaaggaggaagcatggatttgatatcgcggcggagcgtggtggagaagattggagacgctgcggagagatggggattcttccaggtggtgaatcatgggatctcggtggaggtgatggagaggatgaaagaagggattcgcaggtttcacgagcaggacccggaagtgaagaaacggttctactctagggatcacactagagatgtgctttactacagcaacatcgatctccacacttgtaataaggctgcaaattggagagatacgctcgcctgttacatggcccccgatcctcccaagttacaggacttgcccgcggtttgcggggagattatgatggagtactcaaagcaactaatgactttaggtgaatttctctttgagcttctatctgaggctttgggattaaaccctaatcacctcaaggacatgggctgtgccaagtctcatatcatgtttggccaatactatccaccttgccctcagcctgaccttactttaggcataagcaagcacaccgatttctcgtttatcaccattcttcttcaggacaatatcggagggcttcaagttatccatgaccaatgctgggttgatgtttctcctgtccctggcgcccttgtcattaacatcggagatcttctccagcttataagcaatgacaaattcattagcgcggagcatagggtgatagcaaatggatcttctgaaccgcggatttcaatgccatgtttcgtcagcacgttcatgaagccgaatccacgaatatatggacccatcaaagaacttttgtcagaacaaaaccctgccaagtatagagacttaaccatcaccgagttttcaaacaccttcaggtcccaaacgatcagtcaccctgcgttacaccatttcaggatctgaagcaattatattggtggctctgctcggtcttcatctcaaagtaactttcgtgaaaccagcttcttttttctttctcaaaaggcataaggatatttgtaacattcaaataaggtacacaatgaaaactactactacttacttacttcatcttccagccgtgatgtaataaaatttgcgaggaactttcttgttttaagtcctcgtgttaccattttcatctacgaactttggggattagattccccctcttttgaaccttgttttatgttgtatcacgaaaaaagcttattggcctcatttatcatcatcatccaccgatgatatatcgtttaattatatgttc

SEQ ID NO: 100516 - protein, 367 aa, Arabidopsis thaliana
  peptide (1)..(367): Ceres Seq. ID no. 13605313
  misc_feature (216)..(316): Pfam Name: 2OG-Fe(II) oxygenase superfamily Pfam Description: 2OG-Fe(II) oxygenase superfamily
  misc_feature (7)..(367): Homolog of NCBI NO: 15218795 NR Description: 2-oxoglutarate-dependent dioxygenase, putative
  misc_feature (4)..(357): Homolog of NCBI NO: 9280671 NR Description: F21B7.3 [Arabidopsis thaliana]
  misc_feature (7)..(367): Homolog of NCBI NO: 15218794 NR Description: 2-oxoglutarate-dependent dioxygenase, putative
  misc_feature (9)..(367): Homolog of NCBI NO: 15233096 NR Description: 2-oxoglutarate-dependent dioxygenase, putative
  misc_feature (11)..(355): Homolog of NCBI NO: 30679748 NR Description: 2-oxoglutarate-dependent dioxygenase, putative thaliana] >gi|30102640|gb|AAP21238.1| At1g06620 [Arabidopsis
  misc_feature (1)..(285): Homolog of NCBI NO: 9280671 NR Description: F21B7.3 [Arabidopsis thaliana]
  misc_feature (283)..(367): Homolog of NCBI NO: 9280671 NR Description: F21B7.3 [Arabidopsis thaliana]
  misc_feature (9)..(367): Homolog of NCBI NO: 15221544 NR Description: 2-oxoglutarate-dependent dioxygenase, putative thaliana] >gi|13430546|gb|AAK25895.1|AF360185_1 putative [Arabidopsis thaliana] >gi|14532752|gb|AAK64077.1| putative
  misc_feature (11)..(193): Homolog of NCBI NO: 25406927 NR Description: protein F12K11.6 [imported] - Arabidopsis >gi|6692693|gb|AAF24827.1|AC007592_20 F12K11.6 [Arabidopsis
  misc_feature (178)..(266): Homolog of NCBI NO: 25406927 NR Description: protein F12K11.6 [imported] - Arabidopsis >gi|6692693|gb|AAF24827.1|AC007592_20 F12K11.6 [Arabidopsis
PRVRSKMESSDRSSQAKAFDETKTGVKGLVASGIKEIPAMFHTPPDTLTSLKQTAPPSQQLTIPTVDLKGGSMDLISRRSVVEKIGDAAERWGFFQVVNHGISVEVMERMKEGIRRFHEQDPEVKKRFYSRDHTRDVLYYSNIDLHTCNKAANWRDTLACYMAPDPPKLQDLPAVCGEIMMEYSKQLMTLGEFLFELLSEALGLNPNHLKDMGCAKSHIMFGQYYPPCPQPDLTLGISKHTDFSFITILLQDNIGGLQVIHDQCWVDVSPVPGALVINIGDLLQLISNDKFISAEHRVIANGSSEPRISMPCFVSTFMKPNPRIYGPIKELLSEQNPAKYRDLTITEFSNTFRSQTISHPALHHFRI

SEQ ID NO: 100517 - protein, 361 aa, Arabidopsis thaliana
  peptide (1)..(361): Ceres Seq. ID no. 13605314
  misc_feature (210)..(310): Pfam Name: 2OG-Fe(II) oxygenase superfamily Pfam Description: 2OG-Fe(II) oxygenase superfamily
  misc_feature (1)..(361): Homolog of NCBI NO: 15218795 NR Description: 2-oxoglutarate-dependent dioxygenase, putative
  misc_feature (1)..(351): Homolog of NCBI NO: 9280671 NR Description: F21B7.3 [Arabidopsis thaliana]
  misc_feature (1)..(361): Homolog of NCBI NO: 15218794 NR Description: 2-oxoglutarate-dependent dioxygenase, putative
  misc_feature (3)..(361): Homolog of NCBI NO: 15233096 NR Description: 2-oxoglutarate-dependent dioxygenase, putative
  misc_feature (5)..(349): Homolog of NCBI NO: 30679748 NR Description: 2-oxoglutarate-dependent dioxygenase, putative thaliana] >gi|30102640|gb|AAP21238.1| At1g06620 [Arabidopsis
  misc_feature (1)..(279): Homolog of NCBI NO: 9280671 NR Description: F21B7.3 [Arabidopsis thaliana]
  misc_feature (277)..(361): Homolog of NCBI NO: 9280671 NR Description: F21B7.3 [Arabidopsis thaliana]
  misc_feature (3)..(361): Homolog of NCBI NO: 15221544 NR Description: 2-oxoglutarate-dependent dioxygenase, putative thaliana] >gi|13430546|gb|AAK25895.1|AF360185_1 putative [Arabidopsis thaliana] >gi|14532752|gb|AAK64077.1| putative
  misc_feature (5)..(187): Homolog of NCBI NO: 25406927 NR Description: protein F12K11.6 [imported] - Arabidopsis >gi|6692693|gb|AAF24827.1|AC007592_20 F12K11.6 [Arabidopsis
  misc_feature (172)..(260): Homolog of NCBI NO: 25406927 NR Description: protein F12K11.6 [imported] - Arabidopsis >gi|6692693|gb|AAF24827.1|AC007592_20 F12K11.6 [Arabidopsis
MESSDRSSQAKAFDETKTGVKGLVASGIKEIPAMFHTPPDTLTSLKQTAPPSQQLTIPTVDLKGGSMDLISRRSVVEKIGDAAERWGFFQVVNHGISVEVMERMKEGIRRFHEQDPEVKKRFYSRDHTRDVLYYSNIDLHTCNKAANWRDTLACYMAPDPPKLQDLPAVCGEIMMEYSKQLMTLGEFLFELLSEALGLNPNHLKDMGCAKSHIMFGQYYPPCPQPDLTLGISKHTDFSFITILLQDNIGGLQVIHDQCWVDVSPVPGALVINIGDLLQLISNDKFISAEHRVIANGSSEPRISMPCFVSTFMKPNPRIYGPIKELLSEQNPAKYRDLTITEFSNTFRSQTISHPALHHFRI

SEQ ID NO: 100518 - protein, 328 aa, Arabidopsis thaliana
  peptide (1)..(328): Ceres Seq. ID no. 13605315
  misc_feature (177)..(277): Pfam Name: 2OG-Fe(II) oxygenase superfamily Pfam Description: 2OG-Fe(II) oxygenase superfamily
  misc_feature (1)..(328): Homolog of NCBI NO: 15218795 NR Description: 2-oxoglutarate-dependent dioxygenase, putative
  misc_feature (1)..(318): Homolog of NCBI NO: 9280671 NR Description: F21B7.3 [Arabidopsis thaliana]
  misc_feature (1)..(328): Homolog of NCBI NO: 15218794 NR Description: 2-oxoglutarate-dependent dioxygenase, putative
  misc_feature (1)..(328): Homolog of NCBI NO: 15233096 NR Description: 2-oxoglutarate-dependent dioxygenase, putative
  misc_feature (1)..(316): Homolog of NCBI NO: 30679748 NR Description: 2-oxoglutarate-dependent dioxygenase, putative thaliana] >gi|30102640|gb|AAP21238.1| At1g06620 [Arabidopsis
  misc_feature (1)..(246): Homolog of NCBI NO: 9280671 NR Description: F21B7.3 [Arabidopsis thaliana]
  misc_feature (244)..(328): Homolog of NCBI NO: 9280671 NR Description: F21B7.3 [Arabidopsis thaliana]
  misc_feature (1)..(328): Homolog of NCBI NO: 15221544 NR Description: 2-oxoglutarate-dependent dioxygenase, putative thaliana] >gi|13430546|gb|AAK25895.1|AF360185_1 putative [Arabidopsis thaliana] >gi|14532752|gb|AAK64077.1| putative
  misc_feature (1)..(154): Homolog of NCBI NO: 25406927 NR Description: protein F12K11.6 [imported] - Arabidopsis >gi|6692693|gb|AAF24827.1|AC007592_20 F12K11.6 [Arabidopsis
  misc_feature (139)..(227): Homolog of NCBI NO: 25406927 NR Description: protein F12K11.6 [imported] - Arabidopsis >gi|6692693|gb|AAF24827.1|AC007592_20 F12K11.6 [Arabidopsis
MFHTPPDTLTSLKQTAPPSQQLTIPTVDLKGGSMDLISRRSVVEKIGDAAERWGFFQVVNHGISVEVMERMKEGIRRFHEQDPEVKKRFYSRDHTRDVLYYSNIDLHTCNKAANWRDTLACYMAPDPPKLQDLPAVCGEIMMEYSKQLMTLGEFLFELLSEALGLNPNHLKDMGCAKSHIMFGQYYPPCPQPDLTLGISKHTDFSFITILLQDNIGGLQVIHDQCWVDVSPVPGALVINIGDLLQLISNDKFISAEHRVIANGSSEPRISMPCFVSTFMKPNPRIYGPIKELLSEQNPAKYRDLTITEFSNTFRSQTISHPALHHFRI

SEQ ID NO: 100519 - DNA, 793 bp, Arabidopsis thaliana
  misc_feature (1)..(793): Ceres Seq. ID no. 13605316
  misc_feature: MA Experiment ID: 20000173 Result: Down-regulated in Transcription
  misc_feature: MA Experiment 20000173 PARAMETER Experiment Name: At_42deg_Heat_P Parameter: Age (day) Value: 14
  misc_feature: MA Experiment 20000173 PARAMETER Experiment Name: At_42deg_Heat_P Parameter: Organism Value: A. thaliana
  misc_feature: MA Experiment 20000173 PARAMETER Experiment Name: At_42deg_Heat_P Parameter: Plant Line Value: WS
  misc_feature: MA Experiment 20000173 PARAMETER Experiment Name: At_42deg_Heat_P Parameter: Temperature (deg C) Value: 42 vs. 22
  misc_feature: MA Experiment 20000173 PARAMETER Experiment Name: At_42deg_Heat_P Parameter: Timepoint (hr) Value: 6
  misc_feature: MA Experiment 20000173 PARAMETER Experiment Name: At_42deg_Heat_P Parameter: Tissue Value: Aerial
  misc_feature: MA Experiment ID: 20000180 Result: Down-regulated in Transcription
  misc_feature: MA Experiment 20000180 PARAMETER Experiment Name: At_Germinating_Seeds_P Parameter: Age (hr) Value: 24 vs. 0
  misc_feature: MA Experiment 20000180 PARAMETER Experiment Name: At_Germinating_Seeds_P Parameter: Tissue Value: Germinating Seeds
  misc_feature: MA Experiment ID: 20000184 Result: Down-regulated in Transcription
  misc_feature: MA Experiment 20000184 PARAMETER Experiment Name: At_Shoots__P Parameter: Age (day) Value: 7
  misc_feature: MA Experiment 20000184 PARAMETER Experiment Name: At_Shoots__P Parameter: Tissue Value: Shoots vs. Whole Plant
  misc_feature: MA Experiment ID: 20000794 Result: Down-regulated in Transcription
  misc_feature: MA Experiment 20000794 PARAMETER Experiment Name: At_Petals_P Parameter: Age (day) Value: 23-25 days
  misc_feature: MA Experiment 20000794 PARAMETER Experiment Name: At_Petals_P Parameter: Plant Line Value: WS
  misc_feature: MA Experiment 20000794 PARAMETER Experiment Name: At_Petals_P Parameter: Tissue Value: Petals vs. Whole plant
  misc_feature: MA Experiment ID: 20001248 Result: Up-regulated in Transcription
  misc_feature: MA Experiment 20001248 PARAMETER Experiment Name: At_Far-red-induction_P Parameter: Age (day) Value: 7
  misc_feature: MA Experiment 20001248 PARAMETER Experiment Name: At_Far-red-induction_P Parameter: Light Value: Far-red vs. White
  misc_feature: MA Experiment 20001248 PARAMETER Experiment Name: At_Far-red-induction_P Parameter: Organism Value: A. thaliana
  misc_feature: MA Experiment 20001248 PARAMETER Experiment Name: At_Far-red-induction_P Parameter: Plant Line Value: Columbia
  misc_feature: MA Experiment 20001248 PARAMETER Experiment Name: At_Far-red-induction_P Parameter: Timepoint (hr) Value: 4
  misc_feature: MA Experiment 20001248 PARAMETER Experiment Name: At_Far-red-induction_P Parameter: Tissue Value: Whole Plant
atcaaaatcaaatcacaatttccttggctcactcgctctcaccggctgcgaaaccaacgagagattccacaaaatcgaatcttttgtacaatggacaaaggagttgtggtagagctgattagagggtcgaccagttgggccaaagttgtggaagatatcgtgaagctggagaagaaaacgttccctaaacacgaatctctcgctcaaactttcgatgcagagctgcgtaagaaaaacgccggtttgctatacgtggatgctgaaggagacacagtaggctatgccatgtattcttggccatcttcgctttccgcttcaatcaccaagctcgcagtgaaggagaattgcagaagacaaggtcatggagaagcattgttgagagcggctatcgacaagtgcagaagcagaaaggtgcaacgggtttcacttcatgtcgaccccacgagaacttctgcggtgaatctgtacaaaaagcttgggttccaagtagactgtctagtgaaaagctactactcggctgatagagatgcttacagaatgtacctagattttgatgactctatttagcccaaaaggattgaatcattggatttggggttatatatgtattcccatatcttggcttgggcttgatatgccttgtacacattcattgattacttctctacatcaacatattacatatgtctagcgagtttttgatattttacgatgcaagatgaaatcatcttgggaccatcaacttatcaacttcttcacaatatagaatgagatttttaatcgttttcatgtt

SEQ ID NO: 100520 - protein, 188 aa, Arabidopsis thaliana
  peptide (1)..(188): Ceres Seq. ID no. 13605317
  misc_feature (83)..(162): Pfam Name: Acetyltransferase (GNAT) family Pfam Description: Acetyltransferase (GNAT) family
  misc_feature (31)..(188): Homolog of NCBI NO: 15218861 NR Description: GCN5-related N-acetyltransferase (GNAT) family
  misc_feature (31)..(188): Homolog of NCBI NO: 25305832 NR Description: protein F21B7.25 [imported] - Arabidopsis >gi|9280659|gb|AAF86528.1|AC002560_21 F21B7.25 [Arabidopsis
  misc_feature (36)..(180): Homolog of NCBI NO: 37535760 NR Description: putative N-acetyltransferase [Oryza sativa
  misc_feature (42)..(188): Homolog of NCBI NO: 40746387 NR Description: hypothetical protein AN1360.2 [Aspergillus
  misc_feature (50)..(182): Homolog of NCBI NO: 15606021 NR Description: ribosomal-protein-alanine acetyltransferase
  misc_feature (53)..(183): Homolog of NCBI NO: 23111906 NR Description: hypothetical protein [Desulfitobacterium
  misc_feature (53)..(186): Homolog of NCBI NO: 14590218 NR Description: acetyltransferase [Pyrococcus horikoshii]
  misc_feature (48)..(181): Homolog of NCBI NO: 13540845 NR Description: N-terminal acetyltransferase complex, Ard1
  misc_feature (48)..(181): Homolog of NCBI NO: 14324228 NR Description: N-terminal acetyltransferase complex subunit
  misc_feature (53)..(182): Homolog of NCBI NO: 14521872 NR Description: N-terminal acetyltransferase [Pyrococcus abyssi]
IKIKSQFPWLTRSHRLRNQREIPQNRIFCTMDKGVVVELIRGSTSWAKVVEDIVKLEKKTFPKHESLAQTFDAELRKKNAGLLYVDAEGDTVGYAMYSWPSSLSASITKLAVKENCRRQGHGEALLRAAIDKCRSRKVQRVSLHVDPTRTSAVNLYKKLGFQVDCLVKSYYSADRDAYRMYLDFDDSI

SEQ ID NO: 100521 - protein, 158 aa, Arabidopsis thaliana
  peptide (1)..(158): Ceres Seq. ID no. 13605318
  misc_feature (53)..(132): Pfam Name: Acetyltransferase (GNAT) family Pfam Description: Acetyltransferase (GNAT) family
  misc_feature (1)..(158): Homolog of NCBI NO: 15218861 NR Description: GCN5-related N-acetyltransferase (GNAT) family
  misc_feature (1)..(158): Homolog of NCBI NO: 25305832 NR Description: protein F21B7.25 [imported] - Arabidopsis >gi|9280659|gb|AAF86528.1|AC002560_21 F21B7.25 [Arabidopsis
  misc_feature (6)..(150): Homolog of NCBI NO: 37535760 NR Description: putative N-acetyltransferase [Oryza sativa
  misc_feature (12)..(158): Homolog of NCBI NO: 40746387 NR Description: hypothetical protein AN1360.2 [Aspergillus
  misc_feature (20)..(152): Homolog of NCBI NO: 15606021 NR Description: ribosomal-protein-alanine acetyltransferase
  misc_feature (23)..(153): Homolog of NCBI NO: 23111906 NR Description: hypothetical protein [Desulfitobacterium
  misc_feature (23)..(156): Homolog of NCBI NO: 14590218 NR Description: acetyltransferase [Pyrococcus horikoshii]
  misc_feature (18)..(151): Homolog of NCBI NO: 13540845 NR Description: N-terminal acetyltransferase complex, Ard1
  misc_feature (18)..(151): Homolog of NCBI NO: 14324228 NR Description: N-terminal acetyltransferase complex subunit
  misc_feature (23)..(152): Homolog of NCBI NO: 14521872 NR Description: N-terminal acetyltransferase [Pyrococcus abyssi]
MDKGVVVELIRGSTSWAKVVEDIVKLEKKTFPKHESLAQTFDAELRKKNAGLLYVDAEGDTVGYAMYSWPSSLSASITKLAVKENCRRQGHGEALLRAAIDKCRSRKVQRVSLHVDPTRTSAVNLYKKLGFQVDCLVKSYYSADRDAYRMYLDFDDSI

SEQ ID NO: 100522 - DNA, 1975 bp, Arabidopsis thaliana
  misc_feature (1)..(1975): Ceres Seq. ID no. 13605336
  misc_feature: MA Experiment ID: 108464 Result: Up-regulated in Transcription
  misc_feature: MA Experiment 108464 PARAMETER Experiment Name: At_Germinating_Seeds_cDNA_P Parameter: Age (day) Value: 4 vs. 0
  misc_feature: MA Experiment 108464 PARAMETER Experiment Name: At_Germinating_Seeds_cDNA_P Parameter: Tissue Value: Germinating Seeds
  misc_feature: MA Experiment ID: 20000087 Result: Down-regulated in Transcription
  misc_feature: MA Experiment 20000087 PARAMETER Experiment Name: At_100uM_ABA_Mutants_cDNA_P Parameter: Plant Line Value: WS
  misc_feature: MA Experiment 20000087 PARAMETER Experiment Name: At_100uM_ABA_Mutants_cDNA_P Parameter: Timepoint (hr) Value: 6
  misc_feature: MA Experiment 20000087 PARAMETER Experiment Name: At_100uM_ABA_Mutants_cDNA_P Parameter: Tissue Value: Aerial
  misc_feature: MA Experiment 20000087 PARAMETER Experiment Name: At_100uM_ABA_Mutants_cDNA_P Parameter: Treatment Value: 100uM ABA vs. No Treatment
  misc_feature: MA Experiment ID: 20001906 Result: Up-regulated in Transcription
  misc_feature: MA Experiment 20001906 PARAMETER Experiment Name: At_Drought_Reproduction_P Parameter: Age (day) Value: 35
  misc_feature: MA Experiment 20001906 PARAMETER Experiment Name: At_Drought_Reproduction_P Parameter: Organism Value: A. thaliana
  misc_feature: MA Experiment 20001906 PARAMETER Experiment Name: At_Drought_Reproduction_P Parameter: Plant Line Value: WS
  misc_feature: MA Experiment 20001906 PARAMETER Experiment Name: At_Drought_Reproduction_P Parameter: Timepoint (day) Value: 5
  misc_feature: MA Experiment 20001906 PARAMETER Experiment Name: At_Drought_Reproduction_P Parameter: Tissue Value: Siliques
  misc_feature: MA Experiment 20001906 PARAMETER Experiment Name: At_Drought_Reproduction_P Parameter: Treatment Value: Drought vs. No Drought
aaaagagataaacaaaacacaaaaatggtggtgaaaaactcgatcaaattcaactctcagagtgagcgcaagtctttggaagagaccaaggttcctcctatctttggccttcctccagatgccttagacgacaagaaacctacctcggattttgcagtacctatcatcgactttgcaggcgtccacaagtcgcgtgaagccgttgtggagaagatcaaagccgctgcagagaattggggaattttccaggtgatcaaccatggtgttcctttaagtgttcttgaagagattcaaaatggagttgttaggtttcatgaggaagatccggaggttaagaaatcttacttctcgcttgacctcaccaaaacatttatctaccacaataatttcgaactttacagttcgtctgctggtaactggagagactctttcgtttgttacatggatcccgatccttcaaaccctgaagatctcccagtggcttgcagagatgctatgatcggatactcgaagcatgtgatgagtttaggtggcttgctctttgaacttctctcagaagctcttggtttgaactctgatactcttaagagtatgggttgcatgaagggtttgcatatgatctgccattattaccctccctgtccacaacctgaccaaaccttaggcacaagtaagcattccgacaacacttttatcactattcttcttcaggacaacatcggtggtcttcaaattcttcatcaagactgttgggttgatgtctcgcctcttcccggggcacttatcatcaacatcggagatttcttgcagctaatgacgaacgacaagttcataagcgttgatcatagggtgcttacaaacagagttggaccgaggatttcaatcgcatgctttttcagctcgagtatgaatccaaattccacagtttacggaccaatcaaagagcttctctctgaagaaaaccctccaaaatacagagacttcactataccagagtactcaaagggatacattgagaaaggtctcgatggaacatcgcatctgtcacattacaggatttgagatctttaaaaaaacaaaatatatcctgtttgaagcaagatattcagatatgtctatgttccgtcctttccttatccatgtaaaagctagtactctgttcttgaggctgcaactgcaataacaaaagcattgtaccaaagatgagaaacaaatggtgtgtgtgtgtgtatttgttgaaaaaaaaaaaaaaacaaaactgtgagagaaaaagaaagagagaaagagatgggagagattgggtttacagagaagcaagaagctttggtgaaggaatcgtgggagatactgaaacaagacatccccaaatacagccttcacttcttctcacagatactggagatagcaccagcagcaaaaggcttgttctctttcctaagagactcagatgaagtccctcacaacaatcctaaactcaaagctcatgctgttaaagtcttcaagatgacatgtgaaacagctatacagctgagggaggaaggaaaggtggtagtggctgacacaaccctccaatatttaggctcaattcatctcaaaagcggcgttattgaccctcacttcgaggtggtgaaagaagctttgctaaggacattgaaagaggggttgggggagaaatacaatgaagaagtggaaggtgcttggtctcaagcttatgatcacttggctttagccatcaagaccgagatgaaacaagaagagtcataaaaccctattgatcatttgggtatcgcatacatgaatctattccacatacatgatacacacatacgtgtttctgtgtgtgtactatgttgctctctgactttctacagttcactattttaattataaagaaggatcttgtgctatcattagggagatacgtgatactgtagttcttcttgaaattgttattcgtgagaaatatcatggtttg

SEQ ID NO: 100523 - protein, 353 aa, Arabidopsis thaliana
  peptide (1)..(353): Ceres Seq. ID no. 13605337
  misc_feature (202)..(301): Pfam Name: 2OG-Fe(II) oxygenase superfamily Pfam Description: 2OG-Fe(II) oxygenase superfamily
  misc_feature (9)..(353): Homolog of NCBI NO: 15219718 NR Description: 2-oxoglutarate-dependent dioxygenase, putative
  misc_feature (29)..(353): Homolog of NCBI NO: 15219715 NR Description: 2-oxoglutarate-dependent dioxygenase, putative
  misc_feature (29)..(353): Homolog of NCBI NO: 15238458 NR Description: 2-oxoglutarate-dependent dioxygenase, putative
  misc_feature (29)..(353): Homolog of NCBI NO: 15238459 NR Description: oxidoreductase, 2OG-Fe(II) oxygenase family
  misc_feature (4)..(353): Homolog of NCBI NO: 15239868 NR Description: 2-oxoglutarate-dependent dioxygenase, putative
  misc_feature (27)..(353): Homolog of NCBI NO: 15239870 NR Description: 2-oxoglutarate-dependent dioxygenase, putative
  misc_feature (27)..(353): Homolog of NCBI NO: 14596165 NR Description: 1-aminocyclopropane-1-carboxylate oxidase
  misc_feature (29)..(353): Homolog of NCBI NO: 30679748 NR Description: 2-oxoglutarate-dependent dioxygenase, putative thaliana] >gi|30102640|gb|AAP21238.1| At1g06620 [Arabidopsis
  misc_feature (12)..(353): Homolog of NCBI NO: 5031283 NR Description: unknown [Prunus armeniaca]
  misc_feature (30)..(353): Homolog of NCBI NO: 15721876 NR Description: CmE8 [Cucumis melo]
KRDKQNTKMVVKNSIKFNSQSERKSLEETKVPPIFGLPPDALDDKKPTSDFAVPIIDFAGVHKSREAVVEKIKAAAENWGIFQVINHGVPLSVLEEIQNGVVRFHEEDPEVKKSYFSLDLTKTFIYHNNFELYSSSAGNWRDSFVCYMDPDPSNPEDLPVACRDAMIGYSKHVMSLGGLLFELLSEALGLNSDTLKSMGCMKGLHMICHYYPPCPQPDQTLGTSKHSDNTFITILLQDNIGGLQILHQDCWVDVSPLPGALIINIGDFLQLMTNDKFISVDHRVLTNRVGPRISIACFFSSSMNPNSTVYGPIKELLSEENPPKYRDFTIPEYSKGYIEKGLDGTSHLSHYRI

SEQ ID NO: 100524 - protein, 345 aa, Arabidopsis thaliana
  peptide (1)..(345): Ceres Seq. ID no. 13605338
  misc_feature (194)..(293): Pfam Name: 2OG-Fe(II) oxygenase superfamily Pfam Description: 2OG-Fe(II) oxygenase superfamily
  misc_feature (1)..(345): Homolog of NCBI NO: 15219718 NR Description: 2-oxoglutarate-dependent dioxygenase, putative
  misc_feature (21)..(345): Homolog of NCBI NO: 15219715 NR Description: 2-oxoglutarate-dependent dioxygenase, putative
  misc_feature (21)..(345): Homolog of NCBI NO: 15238458 NR Description: 2-oxoglutarate-dependent dioxygenase, putative
  misc_feature (21)..(345): Homolog of NCBI NO: 15238459 NR Description: oxidoreductase, 2OG-Fe(II) oxygenase family
  misc_feature (1)..(345): Homolog of NCBI NO: 15239868 NR Description: 2-oxoglutarate-dependent dioxygenase, putative
  misc_feature (19)..(345): Homolog of NCBI NO: 15239870 NR Description: 2-oxoglutarate-dependent dioxygenase, putative
  misc_feature (19)..(345): Homolog of NCBI NO: 14596165 NR Description: 1-aminocyclopropane-1-carboxylate oxidase
  misc_feature (21)..(345): Homolog of NCBI NO: 30679748 NR Description: 2-oxoglutarate-dependent dioxygenase, putative thaliana] >gi|30102640|gb|AAP21238.1| At1g06620 [Arabidopsis
  misc_feature (4)..(345): Homolog of NCBI NO: 5031283 NR Description: unknown [Prunus armeniaca]
  misc_feature (22)..(345): Homolog of NCBI NO: 15721876 NR Description: CmE8 [Cucumis melo]
MVVKNSIKFNSQSERKSLEETKVPPIFGLPPDALDDKKPTSDFAVPIIDFAGVHKSREAVVEKIKAAAENWGIFQVINHGVPLSVLEEIQNGVVRFHEEDPEVKKSYFSLDLTKTFIYHNNFELYSSSAGNWRDSFVCYMDPDPSNPEDLPVACRDAMIGYSKHVMSLGGLLFELLSEALGLNSDTLKSMGCMKGLHMICHYYPPCPQPDQTLGTSKHSDNTFITILLQDNIGGLQILHQDCWVDVSPLPGALIINIGDFLQLMTNDKFISVDHRVLTNRVGPRISIACFFSSSMNPNSTVYGPIKELLSEENPPKYRDFTIPEYSKGYIEKGLDGTSHLSHYRI

SEQ ID NO: 100525 - protein, 206 aa, Arabidopsis thaliana
  peptide (1)..(206): Ceres Seq. ID no. 13605339
  misc_feature (55)..(154): Pfam Name: 2OG-Fe(II) oxygenase superfamily Pfam Description: 2OG-Fe(II) oxygenase superfamily
  misc_feature (1)..(206): Homolog of NCBI NO: 15219718 NR Description: 2-oxoglutarate-dependent dioxygenase, putative
  misc_feature (1)..(206): Homolog of NCBI NO: 15219715 NR Description: 2-oxoglutarate-dependent dioxygenase, putative
  misc_feature (1)..(206): Homolog of NCBI NO: 15238458 NR Description: 2-oxoglutarate-dependent dioxygenase, putative
  misc_feature (1)..(206): Homolog of NCBI NO: 15238459 NR Description: oxidoreductase, 2OG-Fe(II) oxygenase family
  misc_feature (1)..(206): Homolog of NCBI NO: 15239868 NR Description: 2-oxoglutarate-dependent dioxygenase, putative
  misc_feature (1)..(206): Homolog of NCBI NO: 15239870 NR Description: 2-oxoglutarate-dependent dioxygenase, putative
  misc_feature (1)..(206): Homolog of NCBI NO: 14596165 NR Description: 1-aminocyclopropane-1-carboxylate oxidase
  misc_feature (1)..(206): Homolog of NCBI NO: 30679748 NR Description: 2-oxoglutarate-dependent dioxygenase, putative thaliana] >gi|30102640|gb|AAP21238.1| At1g06620 [Arabidopsis
  misc_feature (1)..(206): Homolog of NCBI NO: 5031283 NR Description: unknown [Prunus armeniaca]
  misc_feature (1)..(206): Homolog of NCBI NO: 15721876 NR Description: CmE8 [Cucumis melo]
MDPDPSNPEDLPVACRDAMIGYSKHVMSLGGLLFELLSEALGLNSDTLKSMGCMKGLHMICHYYPPCPQPDQTLGTSKHSDNTFITILLQDNIGGLQILHQDCWVDVSPLPGALIINIGDFLQLMTNDKFISVDHRVLTNRVGPRISIACFFSSSMNPNSTVYGPIKELLSEENPPKYRDFTIPEYSKGYIEKGLDGTSHLSHYRI

SEQ ID NO: 100526 - DNA, 2079 bp, Arabidopsis thaliana
  misc_feature (1)..(2079): Ceres Seq. ID no. 13605340
  misc_feature: MA Experiment ID: 20000173 Result: Down-regulated in Transcription
  misc_feature: MA Experiment 20000173 PARAMETER Experiment Name: At_42deg_Heat_P Parameter: Age (day) Value: 14
  misc_feature: MA Experiment 20000173 PARAMETER Experiment Name: At_42deg_Heat_P Parameter: Organism Value: A. thaliana
  misc_feature: MA Experiment 20000173 PARAMETER Experiment Name: At_42deg_Heat_P Parameter: Plant Line Value: WS
  misc_feature: MA Experiment 20000173 PARAMETER Experiment Name: At_42deg_Heat_P Parameter: Temperature (deg C) Value: 42 vs. 22
  misc_feature: MA Experiment 20000173 PARAMETER Experiment Name: At_42deg_Heat_P Parameter: Timepoint (hr) Value: 6
  misc_feature: MA Experiment 20000173 PARAMETER Experiment Name: At_42deg_Heat_P Parameter: Tissue Value: Aerial
  misc_feature: MA Experiment ID: 20000184 Result: Down-regulated in Transcription
  misc_feature: MA Experiment 20000184 PARAMETER Experiment Name: At_Shoots__P Parameter: Age (day) Value: 7
  misc_feature: MA Experiment 20000184 PARAMETER Experiment Name: At_Shoots__P Parameter: Tissue Value: Shoots vs. Whole Plant
  misc_feature: MA Experiment ID: 20000227 Result: Down-regulated in Transcription
  misc_feature: MA Experiment 20000227 PARAMETER Experiment Name: At_Root-Tips-vs-Tops_P Parameter: Tissue Value: Root Tips vs. Root Tops
  misc_feature: MA Experiment ID: 20001451 Result: Down-regulated in Transcription
  misc_feature: MA Experiment 20001451 PARAMETER Experiment Name: At_Far-red-induction_P Parameter: Age (day) Value: 7
  misc_feature: MA Experiment 20001451 PARAMETER Experiment Name: At_Far-red-induction_P Parameter: Light Value: Far-red vs. White
  misc_feature: MA Experiment 20001451 PARAMETER Experiment Name: At_Far-red-induction_P Parameter: Organism Value: A. thaliana
  misc_feature: MA Experiment 20001451 PARAMETER Experiment Name: At_Far-red-induction_P Parameter: Plant Line Value: Columbia
  misc_feature: MA Experiment 20001451 PARAMETER Experiment Name: At_Far-red-induction_P Parameter: Timepoint (hr) Value: 24
  misc_feature: MA Experiment 20001451 PARAMETER Experiment Name: At_Far-red-induction_P Parameter: Tissue Value: Whole Plant
gtattcaaatccgtaatcagatttccccatcaatcgataattttctctcgccgcgttttctatttttctcgctcttcccttttaattttcatcccattttcttgaaggagatttctaattattctgtgatctaaagtctgaagctttgtttggttgcatctcgatgatgatgatgatgatggttgattgtaaatgggtagtttcggtttggttgtagcagaagctaagtttgtcaagttaataagagtattttagttttttttttgttaaatcgatttgtgggttcatcatcctacgatcgaaagtttccatctttgataatttgagattctggggatttttactagaatttctagttttttttttggtttgttgatttcgtagctagaagaaatcgatctaggtgtgtatatatatatctattcaatcgaattttagtgaatcgattggcgatcttggtgagagtaatttcagagagatcaaggttactagagcaccaataaaaacacttatttggattgggagatagaaaaatggatcgtgtggttggtggtaagttcaagctcggacgaaagcttggaagtggctcatttggtgaaattttcctaggagtgaatgtacaaactggagaagaagtggctgttaagcttgaacctctccgagctaggcatcctcagcttcattacgagtcaaagctttatatgcttctccaaggaggaactggtattcctcacctcaaatggtttggtgttgagggtgaattcaactgtatggtgatcgaccttctcggtcctagtatggaagaatttttcaactattgcagtcgatccttctctcttaagacagttctaatgctcgcagatcaaatgataaatagagtggagtatatgcatgttaaaggcttccttcatcgtgatattaagccagataactttttgatgggtcttggacgcaaagcaaaccaggtgtacatcattgactatgggcttgccaagaagtatagagatcttcaaacacacaagcatattccatacagggaaaacaagaaccttactggaacagctcgatatgcaagtgttaacacccatcttggaattgagcaaagtagaagggatgatctggaatctctaggctatctgcttatgtattttcttcgaggaagccttccttggcaaggccttcgtgcaggtaccaaaaagcagaagtatgacaagatcagtgaaaagaaaagactaacaccagtggaggtcctctgtaaaaactttccacctgagttcacatcgtattttctctatgtgcgttcactacggtttgaagacaaaccagattattcatacctaaagaggcttttcagagacctatttatccgagaaggttatcagtttgactatgtatttgattggacaatattgaggtatccacagttcggctccagttccagctcgaattccaaaccaagaccaactttaagaccagctatgaatattccagtaccatctgccgacaaagcggaaaagcctccaattggacaggacagccgtgagaggttctcaggtgttttcgaggcatacaccagaagaaatggctcaggaaccggcgttcaagctgatcagtctagtagaccaagaacctcagagaatgttcttgcatccaaggacacgcaaaaccaggagagaccaaactctttatctaggaacctgagttcgtcaagaaaagcaattgctgggtcaagtgttcgagccacttcctcagctgatttcacagagaatcgattaagcagactcatcccaaacaatgatcggtcttctacaactctgaggacccagttcgctccttcgtcctcctcagtagccacaaaagctgcaccaacgagagccgctcgtgacattaccctccagagccttgagctcctcagtattgggaacagcaagaggaagtgactgtctgcattttgccgcccgccaggttcacagttggatcatcttttatccatctttgtttcagaaattattggtaagtaagaaacaaacatgatttgttaaaagatataaatatatattatacatggcttttcttcgt

SEQ ID NO: 100527 - protein, 468 aa, Arabidopsis thaliana
  peptide (1)..(468): Ceres Seq. ID no. 13605341
  misc_feature (1)..(468): Homolog of NCBI NO: 15219733 NR Description: casein kinase, putative [Arabidopsis thaliana]
  misc_feature (1)..(468): Homolog of NCBI NO: 27754653 NR Description: putative casein kinase I [Arabidopsis thaliana]
  misc_feature (1)..(468): Homolog of NCBI NO: 25287643 NR Description: protein F19P19.10 [imported] - Arabidopsis
  misc_feature (1)..(468): Homolog of NCBI NO: 15239840 NR Description: casein kinase I, putative [Arabidopsis thaliana] casein kinase I [Arabidopsis thaliana]
  misc_feature (1)..(445): Homolog of NCBI NO: 15236471 NR Description: casein kinase I (CKI1) [Arabidopsis thaliana]
  misc_feature (1)..(421): Homolog of NCBI NO: 15229427 NR Description: casein kinase, putative [Arabidopsis thaliana] casein kinase [Arabidopsis thaliana] >gi|15809824|gb|AAL06840.1| [Arabidopsis thaliana] >gi|18377819|gb|AAL67096.1|
  misc_feature (1)..(462): Homolog of NCBI NO: 15240091 NR Description: casein kinase, putative [Arabidopsis thaliana]
  misc_feature (1)..(462): Homolog of NCBI NO: 30678728 NR Description: protein kinase (ADK1) [Arabidopsis thaliana]
  misc_feature (1)..(462): Homolog of NCBI NO: 18087640 NR Description: AT5g44100/MLN1_2 [Arabidopsis thaliana]
  misc_feature (1)..(462): Homolog of NCBI NO: 18417216 NR Description: casein kinase, putative [Arabidopsis thaliana]
MDRVVGGKFKLGRKLGSGSFGEIFLGVNVQTGEEVAVKLEPLRARHPQLHYESKLYMLLQGGTGIPHLKWFGVEGEFNCMVIDLLGPSMEEFFNYCSRSFSLKTVLMLADQMINRVEYMHVKGFLHRDIKPDNFLMGLGRKANQVYIIDYGLAKKYRDLQTHKHIPYRENKNLTGTARYASVNTHLGIEQSRRDDLESLGYLLMYFLRGSLPWQGLRAGTKKQKYDKISEKKRLTPVEVLCKNFPPEFTSYFLYVRSLRFEDKPDYSYLKRLFRDLFIREGYQFDYVFDWTILRYPQFGSSSSSNSKPRPTLRPAMNIPVPSADKAEKPPIGQDSRERFSGVFEAYTRRNGSGTGVQADQSSRPRTSENVLASKDTQNQERPNSLSRNLSSSRKAIAGSSVRATSSADFTENRLSRLIPNNDRSSTTLRTQFAPSSSSVATKAAPTRAARDITLQSLELLSIGNSKRK

SEQ ID NO: 100528 - protein, 412 aa, Arabidopsis thaliana
  peptide (1)..(412): Ceres Seq. ID no. 13605342
  misc_feature (1)..(412): Homolog of NCBI NO: 15219733 NR Description: casein kinase, putative [Arabidopsis thaliana]
  misc_feature (1)..(412): Homolog of NCBI NO: 27754653 NR Description: putative casein kinase I [Arabidopsis thaliana]
  misc_feature (1)..(412): Homolog of NCBI NO: 25287643 NR Description: protein F19P19.10 [imported] - Arabidopsis
  misc_feature (1)..(412): Homolog of NCBI NO: 15239840 NR Description: casein kinase I, putative [Arabidopsis thaliana] casein kinase I [Arabidopsis thaliana]
  misc_feature (1)..(389): Homolog of NCBI NO: 15236471 NR Description: casein kinase I (CKI1) [Arabidopsis thaliana]
  misc_feature (1)..(365): Homolog of NCBI NO: 15229427 NR Description: casein kinase, putative [Arabidopsis thaliana] casein kinase [Arabidopsis thaliana] >gi|15809824|gb|AAL06840.1| [Arabidopsis thaliana] >gi|18377819|gb|AAL67096.1|
  misc_feature (1)..(406): Homolog of NCBI NO: 15240091 NR Description: casein kinase, putative [Arabidopsis thaliana]
  misc_feature (1)..(406): Homolog of NCBI NO: 30678728 NR Description: protein kinase (ADK1) [Arabidopsis thaliana]
  misc_feature (1)..(406): Homolog of NCBI NO: 18087640 NR Description: AT5g44100/MLN1_2 [Arabidopsis thaliana]
  misc_feature (1)..(406): Homolog of NCBI NO: 18417216 NR Description: casein kinase, putative [Arabidopsis thaliana]
MLLQGGTGIPHLKWFGVEGEFNCMVIDLLGPSMEEFFNYCSRSFSLKTVLMLADQMINRVEYMHVKGFLHRDIKPDNFLMGLGRKANQVYIIDYGLAKKYRDLQTHKHIPYRENKNLTGTARYASVNTHLGIEQSRRDDLESLGYLLMYFLRGSLPWQGLRAGTKKQKYDKISEKKRLTPVEVLCKNFPPEFTSYFLYVRSLRFEDKPDYSYLKRLFRDLFIREGYQFDYVFDWTILRYPQFGSSSSSNSKPRPTLRPAMNIPVPSADKAEKPPIGQDSRERFSGVFEAYTRRNGSGTGVQADQSSRPRTSENVLASKDTQNQERPNSLSRNLSSSRKAIAGSSVRATSSADFTENRLSRLIPNNDRSSTTLRTQFAPSSSSVATKAAPTRAARDITLQSLELLSIGNSKRK

SEQ ID NO: 100529 - protein, 389 aa, Arabidopsis thaliana
  peptide (1)..(389): Ceres Seq. ID no. 13605343
  misc_feature (1)..(389): Homolog of NCBI NO: 15219733 NR Description: casein kinase, putative [Arabidopsis thaliana]
  misc_feature (1)..(389): Homolog of NCBI NO: 27754653 NR Description: putative casein kinase I [Arabidopsis thaliana]
  misc_feature (1)..(389): Homolog of NCBI NO: 25287643 NR Description: protein F19P19.10 [imported] - Arabidopsis
  misc_feature (1)..(389): Homolog of NCBI NO: 15239840 NR Description: casein kinase I, putative [Arabidopsis thaliana] casein kinase I [Arabidopsis thaliana]
  misc_feature (1)..(366): Homolog of NCBI NO: 15236471 NR Description: casein kinase I (CKI1) [Arabidopsis thaliana]
  misc_feature (1)..(342): Homolog of NCBI NO: 15229427 NR Description: casein kinase, putative [Arabidopsis thaliana] casein kinase [Arabidopsis thaliana] >gi|15809824|gb|AAL06840.1| [Arabidopsis thaliana] >gi|18377819|gb|AAL67096.1|
  misc_feature (1)..(383): Homolog of NCBI NO: 15240091 NR Description: casein kinase, putative [Arabidopsis thaliana]
  misc_feature (1)..(383): Homolog of NCBI NO: 30678728 NR Description: protein kinase (ADK1) [Arabidopsis thaliana]
  misc_feature (1)..(383): Homolog of NCBI NO: 18087640 NR Description: AT5g44100/MLN1_2 [Arabidopsis thaliana]
  misc_feature (1)..(383): Homolog of NCBI NO: 18417216 NR Description: casein kinase, putative [Arabidopsis thaliana]
MVIDLLGPSMEEFFNYCSRSFSLKTVLMLADQMINRVEYMHVKGFLHRDIKPDNFLMGLGRKANQVYIIDYGLAKKYRDLQTHKHIPYRENKNLTGTARYASVNTHLGIEQSRRDDLESLGYLLMYFLRGSLPWQGLRAGTKKQKYDKISEKKRLTPVEVLCKNFPPEFTSYFLYVRSLRFEDKPDYSYLKRLFRDLFIREGYQFDYVFDWTILRYPQFGSSSSSNSKPRPTLRPAMNIPVPSADKAEKPPIGQDSRERFSGVFEAYTRRNGSGTGVQADQSSRPRTSENVLASKDTQNQERPNSLSRNLSSSRKAIAGSSVRATSSADFTENRLSRLIPNNDRSSTTLRTQFAPSSSSVATKAAPTRAARDITLQSLELLSIGNSKRK

SEQ ID NO: 100530 - DNA, 1512 bp, Arabidopsis thaliana
  misc_feature (1)..(1512): Ceres Seq. ID no. 13605356
  misc_feature: MA Experiment ID: 108434 Result: Down-regulated in Transcription
  misc_feature: MA Experiment 108434 PARAMETER Experiment Name: At_Root_Tips_cDNA_P Parameter: Tissue Value: Root Tips
  misc_feature: MA Experiment ID: 108463 Result: Up-regulated in Transcription
  misc_feature: MA Experiment 108463 PARAMETER Experiment Name: At_Germinating_Seeds_cDNA_P Parameter: Age (day) Value: 3 vs. 0
  misc_feature: MA Experiment 108463 PARAMETER Experiment Name: At_Germinating_Seeds_cDNA_P Parameter: Tissue Value: Germinating Seeds
  misc_feature: MA Experiment ID: 108464 Result: Up-regulated in Transcription
  misc_feature: MA Experiment 108464 PARAMETER Experiment Name: At_Germinating_Seeds_cDNA_P Parameter: Age (day) Value: 4 vs. 0
  misc_feature: MA Experiment 108464 PARAMETER Experiment Name: At_Germinating_Seeds_cDNA_P Parameter: Tissue Value: Germinating Seeds
  misc_feature: MA Experiment ID: 108579 Result: Up-regulated in Transcription
  misc_feature: MA Experiment 108579 PARAMETER Experiment Name: At_4deg_Cold_cDNA_P Parameter: Temperature (deg C) Value: 4 vs. 22
  misc_feature: MA Experiment 108579 PARAMETER Experiment Name: At_4deg_Cold_cDNA_P Parameter: Timepoint (hr) Value: 6
  misc_feature: MA Experiment 108579 PARAMETER Experiment Name: At_4deg_Cold_cDNA_P Parameter: Tissue Value: Aerial
  misc_feature: MA Experiment ID: 20000144 Result: Up-regulated in Transcription
  misc_feature: MA Experiment 20000144 PARAMETER Experiment Name: At_42deg_Heat_cDNA_P Parameter: Temperature (deg C) Value: 42 vs. 22
  misc_feature: MA Experiment 20000144 PARAMETER Experiment Name: At_42deg_Heat_cDNA_P Parameter: Timepoint (hr) Value: 1
  misc_feature: MA Experiment 20000144 PARAMETER Experiment Name: At_42deg_Heat_cDNA_P Parameter: Tissue Value: Aerial
  misc_feature: MA Experiment ID: 20000173 Result: Down-regulated in Transcription
  misc_feature: MA Experiment 20000173 PARAMETER Experiment Name: At_42deg_Heat_P Parameter: Age (day) Value: 14
  misc_feature: MA Experiment 20000173 PARAMETER Experiment Name: At_42deg_Heat_P Parameter: Organism Value: A. thaliana
  misc_feature: MA Experiment 20000173 PARAMETER Experiment Name: At_42deg_Heat_P Parameter: Plant Line Value: WS
  misc_feature: MA Experiment 20000173 PARAMETER Experiment Name: At_42deg_Heat_P Parameter: Temperature (deg C) Value: 42 vs. 22
  misc_feature: MA Experiment 20000173 PARAMETER Experiment Name: At_42deg_Heat_P Parameter: Timepoint (hr) Value: 6
  misc_feature: MA Experiment 20000173 PARAMETER Experiment Name: At_42deg_Heat_P Parameter: Tissue Value: Aerial
  misc_feature: MA Experiment ID: 20000184 Result: Down-regulated in Transcription
  misc_feature: MA Experiment 20000184 PARAMETER Experiment Name: At_Shoots__P Parameter: Age (day) Value: 7
  misc_feature: MA Experiment 20000184 PARAMETER Experiment Name: At_Shoots__P Parameter: Tissue Value: Shoots vs. Whole Plant
  misc_feature: MA Experiment ID: 20000224 Result: Up-regulated in Transcription
  misc_feature: MA Experiment ID: 20000227 Result: Down-regulated in Transcription
  misc_feature: MA Experiment 20000227 PARAMETER Experiment Name: At_Root-Tips-vs-Tops_P Parameter: Tissue Value: Root Tips vs. Root Tops
  misc_feature: MA Experiment ID: 20000234 Result: Down-regulated in Transcription
  misc_feature: MA Experiment 20000234 PARAMETER Experiment Name: At_Siliques_P Parameter: Age (day) Value: 21
  misc_feature: MA Experiment 20000234 PARAMETER Experiment Name: At_Siliques_P Parameter: Organism Value: A. thaliana
  misc_feature: MA Experiment 20000234 PARAMETER Experiment Name: At_Siliques_P Parameter: Plant Line Value: WS
  misc_feature: MA Experiment 20000234 PARAMETER Experiment Name: At_Siliques_P Parameter: Tissue Value: Less Than 5mm Siliques vs. Whole Plant
  misc_feature: MA Experiment ID: 20000235 Result: Down-regulated in Transcription
  misc_feature: MA Experiment 20000235 PARAMETER Experiment Name: At_Siliques_P Parameter: Age (day) Value: 21
  misc_feature: MA Experiment 20000235 PARAMETER Experiment Name: At_Siliques_P Parameter: Organism Value: A. thaliana
  misc_feature: MA Experiment 20000235 PARAMETER Experiment Name: At_Siliques_P Parameter: Plant Line Value: WS
  misc_feature: MA Experiment 20000235 PARAMETER Experiment Name: At_Siliques_P Parameter: Tissue Value: 5-10mm Siliques vs. Whole Plant
  misc_feature: MA Experiment ID: 20000265 Result: Down-regulated in Transcription
  misc_feature: MA Experiment 20000265 PARAMETER Experiment Name: At_Open_Flower_P Parameter: Age (day) Value: 21
  misc_feature: MA Experiment 20000265 PARAMETER Experiment Name: At_Open_Flower_P Parameter: Plant Line Value: WS
  misc_feature: MA Experiment 20000265 PARAMETER Experiment Name: At_Open_Flower_P Parameter: Tissue Value: Closed Flower vs. Whole Plant
  misc_feature: MA Experiment ID: 20000286 Result: Down-regulated in Transcription
  misc_feature: MA Experiment 20000286 PARAMETER Experiment Name: At_Open_Flower_P Parameter: Age (day) Value: 21
  misc_feature: MA Experiment 20000286 PARAMETER Experiment Name: At_Open_Flower_P Parameter: Plant Line Value: WS
  misc_feature: MA Experiment 20000286 PARAMETER Experiment Name: At_Open_Flower_P Parameter: Tissue Value: Half Open vs. Whole Plant
  misc_feature: MA Experiment ID: 20000437 Result: Up-regulated in Transcription
  misc_feature: MA Experiment 20000437 PARAMETER Experiment Name: At_Drought_P Parameter: Age (day) Value: 8
  misc_feature: MA Experiment 20000437 PARAMETER Experiment Name: At_Drought_P Parameter: Organism Value: A. thaliana
  misc_feature: MA Experiment 20000437 PARAMETER Experiment Name: At_Drought_P Parameter: Plant Line Value: WS
  misc_feature: MA Experiment 20000437 PARAMETER Experiment Name: At_Drought_P Parameter: Timepoint (hr) Value: 24
  misc_feature: MA Experiment 20000437 PARAMETER Experiment Name: At_Drought_P Parameter: Tissue Value: Whole Plant
  misc_feature: MA Experiment 20000437 PARAMETER Experiment Name: At_Drought_P Parameter: Treatment Value: Drought vs. No Drought
  misc_feature: MA Experiment ID: 20000495 Result: Up-regulated in Transcription
  misc_feature: MA Experiment 20000495 PARAMETER Experiment Name: At_Guard_Cells_P Parameter: Harvest Date Value: 8/2/2002
  misc_feature: MA Experiment 20000495 PARAMETER Experiment Name: At_Guard_Cells_P Parameter: Organism Value: A. thaliana
  misc_feature: MA Experiment 20000495 PARAMETER Experiment Name: At_Guard_Cells_P Parameter: Tissue Value: Guard Cells vs. Leaves
  misc_feature: MA Experiment ID: 20000496 Result: Up-regulated in Transcription
  misc_feature: MA Experiment 20000496 PARAMETER Experiment Name: At_Guard_Cells_P Parameter: Harvest Date Value: 7/19/2002
  misc_feature: MA Experiment 20000496 PARAMETER Experiment Name: At_Guard_Cells_P Parameter: Organism Value: Canola
  misc_feature: MA Experiment 20000496 PARAMETER Experiment Name: At_Guard_Cells_P Parameter: Tissue Value: Guard Cells vs. Leaves
aaaattttacacttatgctcttcatatcacatacaacaaactcatatatataaaaactttaaccttcgtatagcaacgatctagtagaaagcttatactaaaactttctgattctcttaatatggcggaggagtttaaagctacggcatcgatttgtggtggcggaggtggcgcgtggtggaactcgccaaggagcgttatgtctccttcggatcatttcttgtcaccatgcttcggagcggctatcacttccaatgattttagctcgcaagagaatcatctcaaatctaggatgacttgtacggacaacaacaacatcgttttcgggcagcgagaggcggattctgacagtggaggaagtaccgtgacgatggactcgacgttgcagatgatgggtctagggttttcctcaaattgttcttcagattggaaccaaaccattttacaagaagacttaaactcaagcttcataaggagctcacaagatcaagatcatggccaaggattcttatccacaactacttcaccttatatacttaatccagcttgttcttcatctccatcaacttcttcgtcctcaagcttgatacgaaccttttacgatcccgaaccaagtccatacaactttgtctccaccacaagtggttcaatcaacgatcctcaactttcttgggctaataagacaaatcctcatcatcaagtagcttatggactaattaacagcttctctaacaacgcaaactctcgacccttttggaattcttcatcaaccactaacttaaacaacacgacgccgagcaattttgtaaccactccgcagataatatctactcgtttggaggacaaaaccaagaatctgaagacaagagctcagagtgagtctttgaagagagcaaaggataatgaatctgcggcgaagaaaccgagagtcaccacgccttcaccgttgccaactttcaaggtgagaaaagagaatctaagggaccagataacttcattacaacaactagtttcacctttcggaaagacagatactgcatctgttctccaagaagctatagagtacatcaagttccttcacgaccaagtcactgttctaagcactccatacatgaaacaaggtgcctcgaaccaacaacaacagcagatatctggtaaatcgaagagtcaagatgaaaatgagaatcacgaactaagaggacatggtctatgtctcgtcccaatatcaagcacgtttccggtggctaacgaaacaacagccgatttttggacaccaacgtttgggggcaacaatttcaggtgattaaagagagagggttgtggttgtcaagacggatgggaacatatgctaaattcagcttggagactctaaagcataacaataatttttaatgtattttcttcttctttcaatattttaaggggggtttattgctgaatttagcatatatgggttgtttttatgttgaataaccttttgttcctgtcattgttcttgaatatatatatata

SEQ ID NO: 100531 - protein, 393 aa, Arabidopsis thaliana; identical to SEQ ID NO: 43463
  peptide (1)..(393): Ceres Seq. ID no. 13605357
  misc_feature (282)..(320): Pfam Name: Helix-loop-helix DNA-binding domain Pfam Description: Helix-loop-helix DNA-binding domain
  misc_feature (1)..(393): Homolog of NCBI NO: 18407276 NR Description: expressed protein [Arabidopsis thaliana] At1g61660/T13M11_21 [Arabidopsis thaliana]
  misc_feature (1)..(393): Homolog of NCBI NO: 21553730 NR Description: unknown [Arabidopsis thaliana]
  misc_feature (1)..(343): Homolog of NCBI NO: 30696595 NR Description: expressed protein [Arabidopsis thaliana]
  misc_feature (58)..(325): Homolog of NCBI NO: 25404333 NR Description: hypothetical protein T13M11.1 [imported] -
  misc_feature (340)..(393): Homolog of NCBI NO: 25404333 NR Description: hypothetical protein T13M11.1 [imported] -
  misc_feature (202)..(393): Homolog of NCBI NO: 9294343 NR Description: gene_id:F3H11.2~unknown protein [Arabidopsis
  misc_feature (202)..(393): Homolog of NCBI NO: 15232315 NR Description: bHLH transcription factor (bHLH123) -related thaliana] >gi|26451163|dbj|BAC42685.1| putative bHLH factor bHLH123 [Arabidopsis thaliana] >gi|30793909|gb|AAP40407.1|
  misc_feature (252)..(323): Homolog of NCBI NO: 34910130 NR Description: B1070A12.8 [Oryza sativa (japonica
  misc_feature (341)..(393): Homolog of NCBI NO: 34910130 NR Description: B1070A12.8 [Oryza sativa (japonica
  misc_feature (244)..(375): Homolog of NCBI NO: 15234636 NR Description: hypothetical protein [Arabidopsis thaliana]

SEQ ID NO: 100532 - protein, 367 aa, Arabidopsis thaliana; identical to SEQ ID NO: 43464
  peptide (1)..(367): Ceres Seq. ID no. 13605358
  misc_feature (256)..(294): Pfam Name: Helix-loop-helix DNA-binding domain Pfam Description: Helix-loop-helix DNA-binding domain
  misc_feature (1)..(367): Homolog of NCBI NO: 18407276 NR Description: expressed protein [Arabidopsis thaliana] At1g61660/T13M11_21 [Arabidopsis thaliana]
  misc_feature (1)..(367): Homolog of NCBI NO: 21553730 NR Description: unknown [Arabidopsis thaliana]
  misc_feature (1)..(317): Homolog of NCBI NO: 30696595 NR Description: expressed protein [Arabidopsis thaliana]
  misc_feature (32)..(299): Homolog of NCBI NO: 25404333 NR Description: hypothetical protein T13M11.1 [imported] -
  misc_feature (314)..(367): Homolog of NCBI NO: 25404333 NR Description: hypothetical protein T13M11.1 [imported] -
  misc_feature (176)..(367): Homolog of NCBI NO: 9294343 NR Description: gene_id:F3H11.2~unknown protein [Arabidopsis
  misc_feature (176)..(367): Homolog of NCBI NO: 15232315 NR Description: bHLH transcription factor (bHLH123) -related thaliana] >gi|26451163|dbj|BAC42685.1| putative bHLH factor bHLH123 [Arabidopsis thaliana] >gi|30793909|gb|AAP40407.1|
  misc_feature (226)..(297): Homolog of NCBI NO: 34910130 NR Description: B1070A12.8 [Oryza sativa (japonica
  misc_feature (315)..(367): Homolog of NCBI NO: 34910130 NR Description: B1070A12.8 [Oryza sativa (japonica
  misc_feature (218)..(349): Homolog of NCBI NO: 15234636 NR Description: hypothetical protein [Arabidopsis thaliana]

SEQ ID NO: 100533 - protein, 336 aa, Arabidopsis thaliana; identical to SEQ ID NO: 43465
  peptide (1)..(336): Ceres Seq. ID no. 13605359
  misc_feature (225)..(263): Pfam Name: Helix-loop-helix DNA-binding domain Pfam Description: Helix-loop-helix DNA-binding domain
  misc_feature (1)..(336): Homolog of NCBI NO: 18407276 NR Description: expressed protein [Arabidopsis thaliana] At1g61660/T13M11_21 [Arabidopsis thaliana]
  misc_feature (1)..(336): Homolog of NCBI NO: 21553730 NR Description: unknown [Arabidopsis thaliana]
  misc_feature (1)..(286): Homolog of NCBI NO: 30696595 NR Description: expressed protein [Arabidopsis thaliana]
  misc_feature (1)..(268): Homolog of NCBI NO: 25404333 NR Description: hypothetical protein T13M11.1 [imported] -
  misc_feature (283)..(336): Homolog of NCBI NO: 25404333 NR Description: hypothetical protein T13M11.1 [imported] -
  misc_feature (145)..(336): Homolog of NCBI NO: 9294343 NR Description: gene_id:F3H11.2~unknown protein [Arabidopsis
  misc_feature (145)..(336): Homolog of NCBI NO: 15232315 NR Description: bHLH transcription factor (bHLH123) -related thaliana] >gi|26451163|dbj|BAC42685.1| putative bHLH factor bHLH123 [Arabidopsis thaliana] >gi|30793909|gb|AAP40407.1|
  misc_feature (195)..(266): Homolog of NCBI NO: 34910130 NR Description: B1070A12.8 [Oryza sativa (japonica
  misc_feature (284)..(336): Homolog of NCBI NO: 34910130 NR Description: B1070A12.8 [Oryza sativa (japonica
  misc_feature (187)..(318): Homolog of NCBI NO: 15234636 NR Description: hypothetical protein [Arabidopsis thaliana]

SEQ ID NO: 100534 - DNA, 1583 bp, Arabidopsis thaliana
  misc_feature (1)..(1583): Ceres Seq. ID no. 13605360
  misc_feature: MA Experiment ID: 20000182 Result: Up-regulated in Transcription
  misc_feature: MA Experiment 20000182 PARAMETER Experiment Name: At_2mM_SA_P Parameter: Age (day) Value: 14
  misc_feature: MA Experiment 20000182 PARAMETER Experiment Name: At_2mM_SA_P Parameter: Organism Value: A. thaliana
  misc_feature: MA Experiment 20000182 PARAMETER Experiment Name: At_2mM_SA_P Parameter: Plant Line Value: WS
  misc_feature: MA Experiment 20000182 PARAMETER Experiment Name: At_2mM_SA_P Parameter: Timepoint (hr) Value: 6
  misc_feature: MA Experiment 20000182 PARAMETER Experiment Name: At_2mM_SA_P Parameter: Tissue Value: Aerial
  misc_feature: MA Experiment 20000182 PARAMETER Experiment Name: At_2mM_SA_P Parameter: Treatment Value: 2mM SA vs. No Treatment
  misc_feature: MA Experiment ID: 20000184 Result: Down-regulated in Transcription
  misc_feature: MA Experiment 20000184 PARAMETER Experiment Name: At_Shoots__P Parameter: Age (day) Value: 7
  misc_feature: MA Experiment 20000184 PARAMETER Experiment Name: At_Shoots__P Parameter: Tissue Value: Shoots vs. Whole Plant
  misc_feature: MA Experiment ID: 20000185 Result: Up-regulated in Transcription
  misc_feature: MA Experiment 20000185 PARAMETER Experiment Name: At_Roots__P Parameter: Age (day) Value: 7 vs. 21
  misc_feature: MA Experiment 20000185 PARAMETER Experiment Name: At_Roots__P Parameter: Organism Value: A. thaliana
  misc_feature: MA Experiment 20000185 PARAMETER Experiment Name: At_Roots__P Parameter: Tissue Value: Roots vs. Whole Plant
  misc_feature: MA Experiment ID: 20000234 Result: Down-regulated in Transcription
  misc_feature: MA Experiment 20000234 PARAMETER Experiment Name: At_Siliques_P Parameter: Age (day) Value: 21
  misc_feature: MA Experiment 20000234 PARAMETER Experiment Name: At_Siliques_P Parameter: Organism Value: A. thaliana
  misc_feature: MA Experiment 20000234 PARAMETER Experiment Name: At_Siliques_P Parameter: Plant Line Value: WS
  misc_feature: MA Experiment 20000234 PARAMETER Experiment Name: At_Siliques_P Parameter: Tissue Value: Less Than 5mm Siliques vs. Whole Plant
  misc_feature: MA Experiment ID: 20000235 Result: Down-regulated in Transcription
  misc_feature: MA Experiment 20000235 PARAMETER Experiment Name: At_Siliques_P Parameter: Age (day) Value: 21
  misc_feature: MA Experiment 20000235 PARAMETER Experiment Name: At_Siliques_P Parameter: Organism Value: A. thaliana
  misc_feature: MA Experiment 20000235 PARAMETER Experiment Name: At_Siliques_P Parameter: Plant Line Value: WS
  misc_feature: MA Experiment 20000235 PARAMETER Experiment Name: At_Siliques_P Parameter: Tissue Value: 5-10mm Siliques vs. Whole Plant
  misc_feature: MA Experiment ID: 20000264 Result: Down-regulated in Transcription
  misc_feature: MA Experiment 20000264 PARAMETER Experiment Name: At_Open_Flower_P Parameter: Age (day) Value: 21
  misc_feature: MA Experiment 20000264 PARAMETER Experiment Name: At_Open_Flower_P Parameter: Plant Line Value: WS
  misc_feature: MA Experiment 20000264 PARAMETER Experiment Name: At_Open_Flower_P Parameter: Tissue Value: Open Flower vs. Whole Plant
  misc_feature: MA Experiment ID: 20000265 Result: Down-regulated in Transcription
  misc_feature: MA Experiment 20000265 PARAMETER Experiment Name: At_Open_Flower_P Parameter: Age (day) Value: 21
  misc_feature: MA Experiment 20000265 PARAMETER Experiment Name: At_Open_Flower_P Parameter: Plant Line Value: WS
  misc_feature: MA Experiment 20000265 PARAMETER Experiment Name: At_Open_Flower_P Parameter: Tissue Value: Closed Flower vs. Whole Plant
  misc_feature: MA Experiment ID: 20000269 Result: Down-regulated in Transcription
  misc_feature: MA Experiment 20000269 PARAMETER Experiment Name: At_1mM_KNO3_L-vs-H_Roots_P Parameter: Age (day) Value: 7,10,12
  misc_feature: MA Experiment 20000269 PARAMETER Experiment Name: At_1mM_KNO3_L-vs-H_Roots_P Parameter: Organism Value: A. thaliana
  misc_feature: MA Experiment 20000269 PARAMETER Experiment Name: At_1mM_KNO3_L-vs-H_Roots_P Parameter: Plant Line Value: WS
  misc_feature: MA Experiment 20000269 PARAMETER Experiment Name: At_1mM_KNO3_L-vs-H_Roots_P Parameter: Timepoint (day) Value: 7,10,12
  misc_feature: MA Experiment 20000269 PARAMETER Experiment Name: At_1mM_KNO3_L-vs-H_Roots_P Parameter: Tissue Value: Roots
  misc_feature: MA Experiment 20000269 PARAMETER Experiment Name: At_1mM_KNO3_L-vs-H_Roots_P Parameter: Treatment Value: 1mM KNO3 vs. 50mM KNO3
  misc_feature: MA Experiment ID: 20000286 Result: Down-regulated in Transcription
  misc_feature: MA Experiment 20000286 PARAMETER Experiment Name: At_Open_Flower_P Parameter: Age (day) Value: 21
  misc_feature: MA Experiment 20000286 PARAMETER Experiment Name: At_Open_Flower_P Parameter: Plant Line Value: WS
  misc_feature: MA Experiment 20000286 PARAMETER Experiment Name: At_Open_Flower_P Parameter: Tissue Value: Half Open vs. Whole Plant
  misc_feature: MA Experiment ID: 20000438 Result: Down-regulated in Transcription
  misc_feature: MA Experiment 20000438 PARAMETER Experiment Name: At_Shoots__P Parameter: Age (day) Value: 14
  misc_feature: MA Experiment 20000438 PARAMETER Experiment Name: At_Shoots__P Parameter: Tissue Value: Shoots vs. Whole Plant
  misc_feature: MA Experiment ID: 20000439 Result: Up-regulated in Transcription
  misc_feature: MA Experiment 20000439 PARAMETER Experiment Name: At_Roots__P Parameter: Age (day) Value: 14 vs. 21
  misc_feature: MA Experiment 20000439 PARAMETER Experiment Name: At_Roots__P Parameter: Organism Value: A. thaliana
  misc_feature: MA Experiment 20000439 PARAMETER Experiment Name: At_Roots__P Parameter: Tissue Value: Roots vs. Whole Plant
  misc_feature: MA Experiment ID: 20000453 Result: Up-regulated in Transcription
  misc_feature: MA Experiment 20000453 PARAMETER Experiment Name: At_100uM_ABA_P Parameter: Age (day) Value: 15
  misc_feature: MA Experiment 20000453 PARAMETER Experiment Name: At_100uM_ABA_P Parameter: Organism Value: A. thaliana
  misc_feature: MA Experiment 20000453 PARAMETER Experiment Name: At_100uM_ABA_P Parameter: Plant Line Value: WS
  misc_feature: MA Experiment 20000453 PARAMETER Experiment Name: At_100uM_ABA_P Parameter: Timepoint (hr) Value: 24
  misc_feature: MA Experiment 20000453 PARAMETER Experiment Name: At_100uM_ABA_P Parameter: Tissue Value: Aerial
  misc_feature: MA Experiment 20000453 PARAMETER Experiment Name: At_100uM_ABA_P Parameter: Treatment Value: 100uM ABA vs. No Treatment
  misc_feature: MA Experiment ID: 20000573 Result: Up-regulated in Transcription
  misc_feature: MA Experiment 20000573 PARAMETER Experiment Name: At_100uM_ABA_Mutants__P Parameter: Organism Value: A. thaliana
  misc_feature: MA Experiment 20000573 PARAMETER Experiment Name: At_100uM_ABA_Mutants__P Parameter: Plant Line Value: CS22 vs. Ler wt
  misc_feature: MA Experiment 20000573 PARAMETER Experiment Name: At_100uM_ABA_Mutants__P Parameter: Timepoint (hr) Value: N/A
  misc_feature: MA Experiment 20000573 PARAMETER Experiment Name: At_100uM_ABA_Mutants__P Parameter: Tissue Value: Whole Plant
  misc_feature: MA Experiment 20000573 PARAMETER Experiment Name: At_100uM_ABA_Mutants__P Parameter: Treatment Value: None
  misc_feature: MA Experiment ID: 20000574 Result: Up-regulated in Transcription
  misc_feature: MA Experiment 20000574 PARAMETER Experiment Name: At_100uM_ABA_Mutants__P Parameter: Organism Value: A. thaliana
  misc_feature: MA Experiment 20000574 PARAMETER Experiment Name: At_100uM_ABA_Mutants__P Parameter: Plant Line Value: CS23 vs. Ler wt
  misc_feature: MA Experiment 20000574 PARAMETER Experiment Name: At_100uM_ABA_Mutants__P Parameter: Timepoint (hr) Value: N/A
  misc_feature: MA Experiment 20000574 PARAMETER Experiment Name: At_100uM_ABA_Mutants__P Parameter: Tissue Value: Whole Plant
  misc_feature: MA Experiment 20000574 PARAMETER Experiment Name: At_100uM_ABA_Mutants__P Parameter: Treatment Value: None
  misc_feature: MA Experiment ID: 20000794 Result: Down-regulated in Transcription
  misc_feature: MA Experiment 20000794 PARAMETER Experiment Name: At_Petals_P Parameter: Age (day) Value: 23-25 days
  misc_feature: MA Experiment 20000794 PARAMETER Experiment Name: At_Petals_P Parameter: Plant Line Value: WS
  misc_feature: MA Experiment 20000794 PARAMETER Experiment Name: At_Petals_P Parameter: Tissue Value: Petals vs. Whole plant
  misc_feature: MA Experiment ID: 20001247 Result: Up-regulated in Transcription
  misc_feature: MA Experiment 20001247 PARAMETER Experiment Name: At_Far-red-induction_P Parameter: Age (day) Value: 7
  misc_feature: MA Experiment 20001247 PARAMETER Experiment Name: At_Far-red-induction_P Parameter: Light Value: Far-red vs. White
  misc_feature: MA Experiment 20001247 PARAMETER Experiment Name: At_Far-red-induction_P Parameter: Organism Value: A. thaliana
  misc_feature: MA Experiment 20001247 PARAMETER Experiment Name: At_Far-red-induction_P Parameter: Plant Line Value: Columbia
  misc_feature: MA Experiment 20001247 PARAMETER Experiment Name: At_Far-red-induction_P Parameter: Timepoint (hr) Value: 1
  misc_feature: MA Experiment 20001247 PARAMETER Experiment Name: At_Far-red-induction_P Parameter: Tissue Value: Whole Plant
  misc_feature: MA Experiment ID: 20001904 Result: Up-regulated in Transcription
  misc_feature: MA Experiment 20001904 PARAMETER Experiment Name: At_Drought_Reproduction_P Parameter: Age (day) Value: 37
  misc_feature: MA Experiment 20001904 PARAMETER Experiment Name: At_Drought_Reproduction_P Parameter: Organism Value: A. thaliana
  misc_feature: MA Experiment 20001904 PARAMETER Experiment Name: At_Drought_Reproduction_P Parameter: Plant Line Value: WS
  misc_feature: MA Experiment 20001904 PARAMETER Experiment Name: At_Drought_Reproduction_P Parameter: Timepoint (day) Value: 7
  misc_feature: MA Experiment 20001904 PARAMETER Experiment Name: At_Drought_Reproduction_P Parameter: Tissue Value: Rosettes
  misc_feature: MA Experiment 20001904 PARAMETER Experiment Name: At_Drought_Reproduction_P Parameter: Treatment Value: Drought vs. No Drought
  misc_feature: MA Experiment ID: 20001905 Result: Up-regulated in Transcription
  misc_feature: MA Experiment 20001905 PARAMETER Experiment Name: At_Drought_Reproduction_P Parameter: Age (day) Value: 40
  misc_feature: MA Experiment 20001905 PARAMETER Experiment Name: At_Drought_Reproduction_P Parameter: Organism Value: A. thaliana
  misc_feature: MA Experiment 20001905 PARAMETER Experiment Name: At_Drought_Reproduction_P Parameter: Plant Line Value: WS
  misc_feature: MA Experiment 20001905 PARAMETER Experiment Name: At_Drought_Reproduction_P Parameter: Timepoint (day) Value: 10
  misc_feature: MA Experiment 20001905 PARAMETER Experiment Name: At_Drought_Reproduction_P Parameter: Tissue Value: Rosettes
  misc_feature: MA Experiment 20001905 PARAMETER Experiment Name: At_Drought_Reproduction_P Parameter: Treatment Value: Drought vs. No Drought
gacgacatacacgagaaagaaaaaaaaccaaaatgaaaacttttgccaactttgcaattctgtttttattacaaagcttattgtttcctctttacagttcatgccttcatcaaacttcagatgattcatctccatttccttctgatttcctctttggcacagcttcttctgctttccagtatgaaggtgccttcttaaccgatggaaaaggtctgaacaattgggatgtctttgcccatgaaaaccctgggaaaatagttgatggaagcaatggagacatagctacggaccaatatcatcgatatatggaagatatccaatcaatgaattttcttggagtcaatagttacagattatctatttcctggtctagagtcttacctaatggaagatttggagttattaattataagggaataaagtattacaacaatttgatcgacgctcttattaaaaaagggattacaccatttgtgacgttgaaccacttcgactatcctcaagaactcgagaaccggttcaagagttggttaagctccgagatgcagaaagatttcgggtacttagctgatatatgtttcaaacattttggagaccgagttaaacactggatcacgattaacgaaccaaaccaacatataagcttagcatatcgaagtggtttgtttccaccagcgcggtgctccatgccatacggaaattgtactcacgggaactcagaaactgagccttttatagccgctcataatatgatcctcgcacatgcaaaggcgattcaaatataccgaaccaaatatcaaagagaacaaaagggaatcattggcattgtggtacaaacatcatggtttgaacccataagcgattcgattgctgataaaaatgctgccgagagagctcaatcattttattcaaattggattctagatcccgttgtgtatgggaaatatccggaagaaatggtgaatctacttggatcagctttgccaaaattttcgagcaatgaaatgaacagcctaatgagctataaatcagactttttgggtattaatcactatacaagttacttcatacaagattgtttgatcactgcttgtaattctggagacggagcttctaaaagcgaaggattagccctcaaattggaccggaaaggaaatgtttccatcggagaactgaccgacgtaaattggcagcatattgatcctaacggattcagaaagatgttgaattacctaaaaaataggtaccacaacataccaatgtacatcaccgaaaatggtttcggacagttgcaaaaaccagagacaacagttgaagaacttctgcatgatacaaaaaggatacaatacttgagtggatatttggatgctttgaaagcagcaatgagggatggagcaaatgtgaagggatatttcgcatggtcactattagataattttgaatggttgtacggatacaaggttcgatttgggctattccacgttgattttacaactttgaaaaggacaccaaagcaatcagctacatggtacaagaacttcattgaacagaacgtgaatatagaagatcaaatagataaataa

SEQ ID NO: 100535 - protein, 526 aa, Arabidopsis thaliana
  peptide (1)..(526): Ceres Seq. ID no. 13605361
  misc_feature (11)..(526): Homolog of NCBI NO: 30696622 NR Description: glycosyl hydrolase family 1 [Arabidopsis thaliana]
  misc_feature (25)..(526): Homolog of NCBI NO: 7435450 NR Description: beta-glucosidase homolog F8K4.3 - Arabidopsis
  misc_feature (11)..(525): Homolog of NCBI NO: 15220627 NR Description: glycosyl hydrolase family 1 [Arabidopsis thaliana]
  misc_feature (153)..(526): Homolog of NCBI NO: 30696625 NR Description: glycosyl hydrolase family 1 [Arabidopsis thaliana]
  misc_feature (39)..(517): Homolog of NCBI NO: 22328863 NR Description: glycosyl hydrolase family 1 [Arabidopsis thaliana]
  misc_feature (26)..(523): Homolog of NCBI NO: 38345329 NR Description: OSJNBa0004N05.26 [Oryza sativa (japonica
  misc_feature (41)..(514): Homolog of NCBI NO: 38345324 NR Description: OSJNBa0004N05.21 [Oryza sativa (japonica
  misc_feature (45)..(514): Homolog of NCBI NO: 38345327 NR Description: OSJNBa0004N05.24 [Oryza sativa (japonica
  misc_feature (41)..(517): Homolog of NCBI NO: 3820531 NR Description: beta-glucosidase [Pinus contorta]
  misc_feature (45)..(516): Homolog of NCBI NO: 17226270 NR Description: beta-mannosidase enzyme [Lycopersicon esculentum]
RHTRERKKTKMKTFANFAILFLLQSLLFPLYSSCLHQTSDDSSPFPSDFLFGTASSAFQYEGAFLTDGKGLNNWDVFAHENPGKIVDGSNGDIATDQYHRYMEDIQSMNFLGVNSYRLSISWSRVLPNGRFGVINYKGIKYYNNLIDALIKKGITPFVTLNHFDYPQELENRFKSWLSSEMQKDFGYLADICFKHFGDRVKHWITINEPNQHISLAYRSGLFPPARCSMPYGNCTHGNSETEPFIAAHNMILAHAKAIQIYRTKYQREQKGIIGIVVQTSWFEPISDSIADKNAAERAQSFYSNWILDPVVYGKYPEEMVNLLGSALPKFSSNEMNSLMSYKSDFLGINHYTSYFIQDCLITACNSGDGASKSEGLALKLDRKGNVSIGELTDVNWQHIDPNGFRKMLNYLKNRYHNIPMYITENGFGQLQKPETTVEELLHDTKRIQYLSGYLDALKAAMRDGANVKGYFAWSLLDNFEWLYGYKVRFGLFHVDFTTLKRTPKQSATWYKNFIEQNVNIEDQIDK

SEQ ID NO: 100536 - protein, 516 aa, Arabidopsis thaliana
  peptide (1)..(516): Ceres Seq. ID no. 13605362
  misc_feature (1)..(516): Homolog of NCBI NO: 30696622 NR Description: glycosyl hydrolase family 1 [Arabidopsis thaliana]
  misc_feature (15)..(516): Homolog of NCBI NO: 7435450 NR Description: beta-glucosidase homolog F8K4.3 - Arabidopsis
  misc_feature (1)..(515): Homolog of NCBI NO: 15220627 NR Description: glycosyl hydrolase family 1 [Arabidopsis thaliana]
  misc_feature (143)..(516): Homolog of NCBI NO: 30696625 NR Description: glycosyl hydrolase family 1 [Arabidopsis thaliana]
  misc_feature (29)..(507): Homolog of NCBI NO: 22328863 NR Description: glycosyl hydrolase family 1 [Arabidopsis thaliana]
  misc_feature (16)..(513): Homolog of NCBI NO: 38345329 NR Description: OSJNBa0004N05.26 [Oryza sativa (japonica
  misc_feature (31)..(504): Homolog of NCBI NO: 38345324 NR Description: OSJNBa0004N05.21 [Oryza sativa (japonica
  misc_feature (35)..(504): Homolog of NCBI NO: 38345327 NR Description: OSJNBa0004N05.24 [Oryza sativa (japonica
  misc_feature (31)..(507): Homolog of NCBI NO: 3820531 NR Description: beta-glucosidase [Pinus contorta]
  misc_feature (35)..(506): Homolog of NCBI NO: 17226270 NR Description: beta-mannosidase enzyme [Lycopersicon esculentum]
MKTFANFAILFLLQSLLFPLYSSCLHQTSDDSSPFPSDFLFGTASSAFQYEGAFLTDGKGLNNWDVFAHENPGKIVDGSNGDIATDQYHRYMEDIQSMNFLGVNSYRLSISWSRVLPNGRFGVINYKGIKYYNNLIDALIKKGITPFVTLNHFDYPQELENRFKSWLSSEMQKDFGYLADICFKHFGDRVKHWITINEPNQHISLAYRSGLFPPARCSMPYGNCTHGNSETEPFIAAHNMILAHAKAIQIYRTKYQREQKGIIGIVVQTSWFEPISDSIADKNAAERAQSFYSNWILDPVVYGKYPEEMVNLLGSALPKFSSNEMNSLMSYKSDFLGINHYTSYFIQDCLITACNSGDGASKSEGLALKLDRKGNVSIGELTDVNWQHIDPNGFRKMLNYLKNRYHNIPMYITENGFGQLQKPETTVEELLHDTKRIQYLSGYLDALKAAMRDGANVKGYFAWSLLDNFEWLYGYKVRFGLFHVDFTTLKRTPKQSATWYKNFIEQNVNIEDQIDK

SEQ ID NO: 100537 - protein, 425 aa, Arabidopsis thaliana
  peptide (1)..(425): Ceres Seq. ID no. 13605363
  misc_feature (1)..(425): Homolog of NCBI NO: 30696622 NR Description: glycosyl hydrolase family 1 [Arabidopsis thaliana]
  misc_feature (1)..(425): Homolog of NCBI NO: 7435450 NR Description: beta-glucosidase homolog F8K4.3 - Arabidopsis
  misc_feature (1)..(424): Homolog of NCBI NO: 15220627 NR Description: glycosyl hydrolase family 1 [Arabidopsis thaliana]
  misc_feature (52)..(425): Homolog of NCBI NO: 30696625 NR Description: glycosyl hydrolase family 1 [Arabidopsis thaliana]
  misc_feature (1)..(416): Homolog of NCBI NO: 22328863 NR Description: glycosyl hydrolase family 1 [Arabidopsis thaliana]
  misc_feature (1)..(422): Homolog of NCBI NO: 38345329 NR Description: OSJNBa0004N05.26 [Oryza sativa (japonica
  misc_feature (1)..(413): Homolog of NCBI NO: 38345324 NR Description: OSJNBa0004N05.21 [Oryza sativa (japonica
  misc_feature (1)..(413): Homolog of NCBI NO: 38345327 NR Description: OSJNBa0004N05.24 [Oryza sativa (japonica
  misc_feature (1)..(416): Homolog of NCBI NO: 3820531 NR Description: beta-glucosidase [Pinus contorta]
  misc_feature (1)..(415): Homolog of NCBI NO: 17226270 NR Description: beta-mannosidase enzyme [Lycopersicon esculentum]
MEDIQSMNFLGVNSYRLSISWSRVLPNGRFGVINYKGIKYYNNLIDALIKKGITPFVTLNHFDYPQELENRFKSWLSSEMQKDFGYLADICFKHFGDRVKHWITINEPNQHISLAYRSGLFPPARCSMPYGNCTHGNSETEPFIAAHNMILAHAKAIQIYRTKYQREQKGIIGIVVQTSWFEPISDSIADKNAAERAQSFYSNWILDPVVYGKYPEEMVNLLGSALPKFSSNEMNSLMSYKSDFLGINHYTSYFIQDCLITACNSGDGASKSEGLALKLDRKGNVSIGELTDVNWQHIDPNGFRKMLNYLKNRYHNIPMYITENGFGQLQKPETTVEELLHDTKRIQYLSGYLDALKAAMRDGANVKGYFAWSLLDNFEWLYGYKVRFGLFHVDFTTLKRTPKQSATWYKNFIEQNVNIEDQIDK

SEQ ID NO: 100538 - DNA, 890 bp, Arabidopsis thaliana
  misc_feature (1)..(890): Ceres Seq. ID no. 13605389
  misc_feature: MA Experiment ID: 20000328 Result: Down-regulated in Transcription
  misc_feature: MA Experiment 20000328 PARAMETER Experiment Name: At_42deg_Heat_Sub_P Parameter: Age (day) Value: 14
  misc_feature: MA Experiment 20000328 PARAMETER Experiment Name: At_42deg_Heat_Sub_P Parameter: Organism Value: A. thaliana
  misc_feature: MA Experiment 20000328 PARAMETER Experiment Name: At_42deg_Heat_Sub_P Parameter: Plant Line Value: WS
  misc_feature: MA Experiment 20000328 PARAMETER Experiment Name: At_42deg_Heat_Sub_P Parameter: Temperature (deg C) Value: 42 vs. 22
  misc_feature: MA Experiment 20000328 PARAMETER Experiment Name: At_42deg_Heat_Sub_P Parameter: Timepoint (hr) Value: 6
  misc_feature: MA Experiment 20000328 PARAMETER Experiment Name: At_42deg_Heat_Sub_P Parameter: Tissue Value: Aerial
  misc_feature: MA Experiment ID: 20000355 Result: Up-regulated in Transcription
  misc_feature: MA Experiment 20000355 PARAMETER Experiment Name: At_Siliques_Sub_P Parameter: Age (day) Value: 21
  misc_feature: MA Experiment 20000355 PARAMETER Experiment Name: At_Siliques_Sub_P Parameter: Organism Value: A. thaliana
  misc_feature: MA Experiment 20000355 PARAMETER Experiment Name: At_Siliques_Sub_P Parameter: Plant Line Value: WS
  misc_feature: MA Experiment 20000355 PARAMETER Experiment Name: At_Siliques_Sub_P Parameter: Tissue Value: Less Than 5mm Siliques vs. Whole Plant
  misc_feature: MA Experiment ID: 20000440 Result: Up-regulated in Transcription
  misc_feature: MA Experiment 20000440 PARAMETER Experiment Name: At_Closed-Flower__Sub_P Parameter: Tissue Value: Closed Flower vs. Whole Plant
gcaagaaaaaaaaaaaaactcacatttttgtgtttcagagatatttaaagaaaaaaagatggaaatcactaagttgcttgtggtgattatcgttggactagtgagtgccaatgttggcgcgaggcaactccaaggacttttcgaaaacacaaaattgttggatccaaaattcgatggtgagccaatttgtgccgctgggggaggtggaggtggtggtggaggagctagtgttgaaggtggtaccgaaaaaggtatcgacgataatgcaaacgggtacggagatgggaatggaaatgggaatgcgcatggacgcgccgactgtcccggaggcatagttgttggaggtggaggtggtggtggaggcggaggtggaggcggtggcggttctggcggcagtaatggtagtttctttaatggcagtggcagcggtactggctatggtagtggtgatggtagagtcagtagcagtggtgagtattcagcaagtgcaggtgggggaggcagtggtgaaggtagtggcggtggtggtggcggtgacggtagcagcggcagcggtagtggaagcggaagtggaagtggaagtggaactggaaccgctagtggccctgatgtgtatatgcatgtagaaggtggtggaggcggtggtggaggtggtggcggcggaggcggtggtggtgttgatggtagcggaagtggcagtggtagtgggagcggtggcggaagcggcaatgtctatcattgaagttgaaatagtatctagtattatgtgtgtccttattctaagcttctatatataacattcttattcgatcttcgtcttatgtgtgatatgttcattgaatatcataatatgttggtcgcatattcacaattttatatgtttgtgtatt

SEQ ID NO: 100539 - protein, 246 aa, Arabidopsis thaliana
  peptide (1)..(246): Ceres Seq. ID no. 13605390
  misc_feature (68)..(243): Pfam Name: Herpesvirus latent membrane protein 1 (LMP1) Pfam Description: Herpesvirus latent membrane protein 1 (LMP1)
  misc_feature (20)..(246): Homolog of NCBI NO: 15220738 NR Description: expressed protein [Arabidopsis thaliana] unknown protein [Arabidopsis thaliana]
  misc_feature (66)..(242): Homolog of NCBI NO: 30679122 NR Description: expressed protein [Arabidopsis thaliana]
  misc_feature (66)..(242): Homolog of NCBI NO: 30679126 NR Description: expressed protein [Arabidopsis thaliana]
  misc_feature (66)..(243): Homolog of NCBI NO: 37534902 NR Description: putative glycine-rich protein [Oryza sativa
  misc_feature (65)..(242): Homolog of NCBI NO: 30679126 NR Description: expressed protein [Arabidopsis thaliana]
  misc_feature (66)..(242): Homolog of NCBI NO: 30679126 NR Description: expressed protein [Arabidopsis thaliana]
  misc_feature (65)..(243): Homolog of NCBI NO: 30679122 NR Description: expressed protein [Arabidopsis thaliana]
  misc_feature (93)..(245): Homolog of NCBI NO: 15228967 NR Description: glycine-rich protein [Arabidopsis thaliana]
  misc_feature (65)..(242): Homolog of NCBI NO: 30679122 NR Description: expressed protein [Arabidopsis thaliana]
  misc_feature (59)..(243): Homolog of NCBI NO: 15227583 NR Description: glycine-rich protein [Arabidopsis thaliana]
QEKKKNSHFCVSEIFKEKKMEITKLLVVIIVGLVSANVGARQLQGLFENTKLLDPKFDGEPICAAGGGGGGGGGASVEGGTEKGIDDNANGYGDGNGNGNAHGRADCPGGIVVGGGGGGGGGGGGGGGSGGSNGSFFNGSGSGTGYGSGDGRVSSSGEYSASAGGGGSGEGSGGGGGGDGSSGSGSGSGSGSGSGTGTASGPDVYMHVEGGGGGGGGGGGGGGGGVDGSGSGSGSGSGGGSGNVYH

SEQ ID NO: 100540 - protein, 227 aa, Arabidopsis thaliana
  peptide (1)..(227): Ceres Seq. ID no. 13605391
  misc_feature (49)..(224): Pfam Name: Herpesvirus latent membrane protein 1 (LMP1) Pfam Description: Herpesvirus latent membrane protein 1 (LMP1)
  misc_feature (1)..(227): Homolog of NCBI NO: 15220738 NR Description: expressed protein [Arabidopsis thaliana] unknown protein [Arabidopsis thaliana]
  misc_feature (47)..(223): Homolog of NCBI NO: 30679122 NR Description: expressed protein [Arabidopsis thaliana]
  misc_feature (47)..(223): Homolog of NCBI NO: 30679126 NR Description: expressed protein [Arabidopsis thaliana]
  misc_feature (47)..(224): Homolog of NCBI NO: 37534902 NR Description: putative glycine-rich protein [Oryza sativa
  misc_feature (46)..(223): Homolog of NCBI NO: 30679126 NR Description: expressed protein [Arabidopsis thaliana]
  misc_feature (47)..(223): Homolog of NCBI NO: 30679126 NR Description: expressed protein [Arabidopsis thaliana]
  misc_feature (46)..(224): Homolog of NCBI NO: 30679122 NR Description: expressed protein [Arabidopsis thaliana]
  misc_feature (74)..(226): Homolog of NCBI NO: 15228967 NR Description: glycine-rich protein [Arabidopsis thaliana]
  misc_feature (46)..(223): Homolog of NCBI NO: 30679122 NR Description: expressed protein [Arabidopsis thaliana]
  misc_feature (40)..(224): Homolog of NCBI NO: 15227583 NR Description: glycine-rich protein [Arabidopsis thaliana]
MEITKLLVVIIVGLVSANVGARQLQGLFENTKLLDPKFDGEPICAAGGGGGGGGGASVEGGTEKGIDDNANGYGDGNGNGNAHGRADCPGGIVVGGGGGGGGGGGGGGGSGGSNGSFFNGSGSGTGYGSGDGRVSSSGEYSASAGGGGSGEGSGGGGGGDGSSGSGSGSGSGSGSGTGTASGPDVYMHVEGGGGGGGGGGGGGGGGVDGSGSGSGSGSGGGSGNVYH

SEQ ID NO: 100541 - DNA, 1759 bp, Arabidopsis thaliana
  misc_feature (1)..(1759): Ceres Seq. ID no. 13605392
  misc_feature: MA Experiment ID: 20000234 Result: Down-regulated in Transcription
  misc_feature: MA Experiment 20000234 PARAMETER Experiment Name: At_Siliques_P Parameter: Age (day) Value: 21
  misc_feature: MA Experiment 20000234 PARAMETER Experiment Name: At_Siliques_P Parameter: Organism Value: A. thaliana
  misc_feature: MA Experiment 20000234 PARAMETER Experiment Name: At_Siliques_P Parameter: Plant Line Value: WS
  misc_feature: MA Experiment 20000234 PARAMETER Experiment Name: At_Siliques_P Parameter: Tissue Value: Less Than 5mm Siliques vs. Whole Plant
  misc_feature: MA Experiment ID: 20000265 Result: Down-regulated in Transcription
  misc_feature: MA Experiment 20000265 PARAMETER Experiment Name: At_Open_Flower_P Parameter: Age (day) Value: 21
  misc_feature: MA Experiment 20000265 PARAMETER Experiment Name: At_Open_Flower_P Parameter: Plant Line Value: WS
  misc_feature: MA Experiment 20000265 PARAMETER Experiment Name: At_Open_Flower_P Parameter: Tissue Value: Closed Flower vs. Whole Plant
  misc_feature: MA Experiment ID: 20000436 Result: Up-regulated in Transcription
  misc_feature: MA Experiment 20000436 PARAMETER Experiment Name: At_Drought_P Parameter: Age (day) Value: 7
  misc_feature: MA Experiment 20000436 PARAMETER Experiment Name: At_Drought_P Parameter: Organism Value: A. thaliana
  misc_feature: MA Experiment 20000436 PARAMETER Experiment Name: At_Drought_P Parameter: Plant Line Value: WS
  misc_feature: MA Experiment 20000436 PARAMETER Experiment Name: At_Drought_P Parameter: Timepoint (hr) Value: 12
  misc_feature: MA Experiment 20000436 PARAMETER Experiment Name: At_Drought_P Parameter: Tissue Value: Whole Plant
  misc_feature: MA Experiment 20000436 PARAMETER Experiment Name: At_Drought_P Parameter: Treatment Value: Drought vs. No Drought
  misc_feature: MA Experiment ID: 20000437 Result: Up-regulated in Transcription
  misc_feature: MA Experiment 20000437 PARAMETER Experiment Name: At_Drought_P Parameter: Age (day) Value: 8
  misc_feature: MA Experiment 20000437 PARAMETER Experiment Name: At_Drought_P Parameter: Organism Value: A. thaliana
  misc_feature: MA Experiment 20000437 PARAMETER Experiment Name: At_Drought_P Parameter: Plant Line Value: WS
  misc_feature: MA Experiment 20000437 PARAMETER Experiment Name: At_Drought_P Parameter: Timepoint (hr) Value: 24
  misc_feature: MA Experiment 20000437 PARAMETER Experiment Name: At_Drought_P Parameter: Tissue Value: Whole Plant
  misc_feature: MA Experiment 20000437 PARAMETER Experiment Name: At_Drought_P Parameter: Treatment Value: Drought vs. No Drought
  misc_feature: MA Experiment ID: 20001451 Result: Down-regulated in Transcription
  misc_feature: MA Experiment 20001451 PARAMETER Experiment Name: At_Far-red-induction_P Parameter: Age (day) Value: 7
  misc_feature: MA Experiment 20001451 PARAMETER Experiment Name: At_Far-red-induction_P Parameter: Light Value: Far-red vs. White
  misc_feature: MA Experiment 20001451 PARAMETER Experiment Name: At_Far-red-induction_P Parameter: Organism Value: A. thaliana
  misc_feature: MA Experiment 20001451 PARAMETER Experiment Name: At_Far-red-induction_P Parameter: Plant Line Value: Columbia
  misc_feature: MA Experiment 20001451 PARAMETER Experiment Name: At_Far-red-induction_P Parameter: Timepoint (hr) Value: 24
  misc_feature: MA Experiment 20001451 PARAMETER Experiment Name: At_Far-red-induction_P Parameter: Tissue Value: Whole Plant
  misc_feature: MA Experiment ID: 20001906 Result: Up-regulated in Transcription
  misc_feature: MA Experiment 20001906 PARAMETER Experiment Name: At_Drought_Reproduction_P Parameter: Age (day) Value: 35
  misc_feature: MA Experiment 20001906 PARAMETER Experiment Name: At_Drought_Reproduction_P Parameter: Organism Value: A. thaliana
  misc_feature: MA Experiment 20001906 PARAMETER Experiment Name: At_Drought_Reproduction_P Parameter: Plant Line Value: WS
  misc_feature: MA Experiment 20001906 PARAMETER Experiment Name: At_Drought_Reproduction_P Parameter: Timepoint (day) Value: 5
  misc_feature: MA Experiment 20001906 PARAMETER Experiment Name: At_Drought_Reproduction_P Parameter: Tissue Value: Siliques
  misc_feature: MA Experiment 20001906 PARAMETER Experiment Name: At_Drought_Reproduction_P Parameter: Treatment Value: Drought vs. No Drought
  misc_feature: MA Experiment ID: 20001908 Result: Up-regulated in Transcription
  misc_feature: MA Experiment 20001908 PARAMETER Experiment Name: At_Drought_Reproduction_P Parameter: Age (day) Value: 40
  misc_feature: MA Experiment 20001908 PARAMETER Experiment Name: At_Drought_Reproduction_P Parameter: Organism Value: A. thaliana
  misc_feature: MA Experiment 20001908 PARAMETER Experiment Name: At_Drought_Reproduction_P Parameter: Plant Line Value: WS
  misc_feature: MA Experiment 20001908 PARAMETER Experiment Name: At_Drought_Reproduction_P Parameter: Timepoint (day) Value: 10
  misc_feature: MA Experiment 20001908 PARAMETER Experiment Name: At_Drought_Reproduction_P Parameter: Tissue Value: Siliques
  misc_feature: MA Experiment 20001908 PARAMETER Experiment Name: At_Drought_Reproduction_P Parameter: Treatment Value: Drought vs. No Drought
ctggtgcttaaacactctggtcaaaatgggagtatactcgagagcggttgcgttttcggtctttgtgtcgtttctgctgtttttcactgcttattctaagagaaatgatggaacattcagagttggcctgaaaaaactgaagttggatcctaacaaccgactcgcaacacgctttggttccaagcaagaagaggccttgagatcttctttgcgttcgtacaacaacaatcttggtggtgattctggagatgctgatattgtcccgctcaagaattacttggatgctcagtactatggtgagattgctattggtactccaccgcagaagttcactgtcatttttgataccggaagctctaacctttgggtgccatcaggaaaatgttttttctcgctgtcttgttactttcatgctaagtacaagtcctcgcgatcaagcacatataagaagagtggaaaacgtgccgcaatccattacggctcaggatcaatctctggtttctttagttatgatgctgtcacggttggtgatttggttgtcaaagatcaggagtttattgagacaaccagtgagcctggtttaacattcctggtggctaagtttgatggtcttcttggtcttgggttccaagagatcgctgttggaaacgctactcctgtttggtacaatatgctcaagcaaggccttataaagaggccggtcttttcattttggcttaaccgtgatccaaagagtgaagaaggcggtgaaatcgtattcggaggtgttgatccaaagcattttagaggagaacatacatttgttcctgtgacacaaaggggttactggcagttcgacatgggtgaggttctcattgccggtgaatctactggatattgtggaagtggttgttctgcgatagcagattctggaacatcgttacttgcgggtccaacggctgtggttgccatgataaataaggctattggagcatctggagttgttagccagcagtgcaagactgttgttgaccagtatggacaaaccattttggatttacttttggctgagactcaaccaaagaagatttgctcacaaattggtctttgcgcttacgatggcacccatggggtcagtatggggattgaatcggtggtggacaaggaaaacacaagatcatctagtggtcttcgagacgcgggttgtcctgcatgtgaaatggcggttgtgtggatacagagccaattgaggcagaacatgactcaagagaggatagtgaactacattaatgagatatgcgagcgcatgcctagtccaaatggagagtctgctgttgactgctcacaactttctaaaatgcctactgtttcattcaccattggaggcaaagtctttgatcttgctcccgaagagtacgtactgaagattggggaaggaccagtggcacaatgtattagcggctttaccgcacttgatatccctccacctcgtggacctctctggatacttggagatgtgtttatgggaaaataccacactgtctttgacttcggaaacgagcaggttggcttcgcagaagccgtgtgaaaaatgtaacatcgatcttttgttgatatgtttttggtgtgagagctttgttgtgttgtgtttacatggagaggttttaagaatgaagcctcgttgttgttgttaacaatgttttgccataaacatacgttaaagctttggggatgttttctttctaactctcaccaataaataaaataaagacctcttttt

SEQ ID NO: 100542 - protein, 521 aa, Arabidopsis thaliana
  peptide (1)..(521): Ceres Seq. ID no. 13605393
  misc_feature (38)..(371): Pfam Name: Eukaryotic aspartyl protease Pfam Description: Eukaryotic aspartyl protease
  misc_feature (9)..(521): Homolog of NCBI NO: 22330379 NR Description: aspartic protease -related [Arabidopsis thaliana] putative aspartic protease [Arabidopsis thaliana]
  misc_feature (9)..(520): Homolog of NCBI NO: 15221141 NR Description: aspartic proteinase -related [Arabidopsis
  misc_feature (9)..(520): Homolog of NCBI NO: 7435838 NR Description: probable aspartic proteinase (EC 3.4.23.-) 1 -
  misc_feature (9)..(428): Homolog of NCBI NO: 25290004 NR Description: hypothetical protein F19K23.21 [imported] - thaliana >gi|2160151|gb|AAB60773.1| Strong similarity to Brassica
  misc_feature (31)..(520): Homolog of NCBI NO: 1354272 NR Description: aspartic proteinase [Arabidopsis thaliana]
  misc_feature (9)..(520): Homolog of NCBI NO: 21616053 NR Description: aspartic proteinase [Theobroma cacao]
WCLNTLVKMGVYSRAVAFSVFVSFLLFFTAYSKRNDGTFRVGLKKLKLDPNNRLATRFGSKQEEALRSSLRSYNNNLGGDSGDADIVPLKNYLDAQYYGEIAIGTPPQKFTVIFDTGSSNLWVPSGKCFFSLSCYFHAKYKSSRSSTYKKSGKRAAIHYGSGSISGFFSYDAVTVGDLVVKDQEFIETTSEPGLTFLVAKFDGLLGLGFQEIAVGNATPVWYNMLKQGLIKRPVFSFWLNRDPKSEEGGEIVFGGVDPKHFRGEHTFVPVTQRGYWQFDMGEVLIAGESTGYCGSGCSAIADSGTSLLAGPTAVVAMINKAIGASGVVSQQCKTVVDQYGQTILDLLLAETQPKKICSQIGLCAYDGTHGVSMGIESVVDKENTRSSSGLRDAGCPACEMAVVWIQSQLRQNMTQERIVNYINEICERMPSPNGESAVDCSQLSKMPTVSFTIGGKVFDLAPEEYVLKIGEGPVAQCISGFTALDIPPPRGPLWILGDVFMGKYHTVFDFGNEQVGFAEAV

SEQ ID NO: 100543 - protein, 513 aa, Arabidopsis thaliana
  peptide (1)..(513): Ceres Seq. ID no. 13605394
  misc_feature (30)..(363): Pfam Name: Eukaryotic aspartyl protease Pfam Description: Eukaryotic aspartyl protease
  misc_feature (1)..(513): Homolog of NCBI NO: 22330379 NR Description: aspartic protease -related [Arabidopsis thaliana] putative aspartic protease [Arabidopsis thaliana]
  misc_feature (1)..(512): Homolog of NCBI NO: 15221141 NR Description: aspartic proteinase -related [Arabidopsis
  misc_feature (1)..(512): Homolog of NCBI NO: 7435838 NR Description: probable aspartic proteinase (EC 3.4.23.-) 1 -
  misc_feature (1)..(420): Homolog of NCBI NO: 25290004 NR Description: hypothetical protein F19K23.21 [imported] - thaliana >gi|2160151|gb|AAB60773.1| Strong similarity to Brassica
  misc_feature (23)..(512): Homolog of NCBI NO: 1354272 NR Description: aspartic proteinase [Arabidopsis thaliana]
  misc_feature (1)..(512): Homolog of NCBI NO: 21616053 NR Description: aspartic proteinase [Theobroma cacao]
MGVYSRAVAFSVFVSFLLFFTAYSKRNDGTFRVGLKKLKLDPNNRLATRFGSKQEEALRSSLRSYNNNLGGDSGDADIVPLKNYLDAQYYGEIAIGTPPQKFTVIFDTGSSNLWVPSGKCFFSLSCYFHAKYKSSRSSTYKKSGKRAAIHYGSGSISGFFSYDAVTVGDLVVKDQEFIETTSEPGLTFLVAKFDGLLGLGFQEIAVGNATPVWYNMLKQGLIKRPVFSFWLNRDPKSEEGGEIVFGGVDPKHFRGEHTFVPVTQRGYWQFDMGEVLIAGESTGYCGSGCSAIADSGTSLLAGPTAVVAMINKAIGASGVVSQQCKTVVDQYGQTILDLLLAETQPKKICSQIGLCAYDGTHGVSMGIESVVDKENTRSSSGLRDAGCPACEMAVVWIQSQLRQNMTQERIVNYINEICERMPSPNGESAVDCSQLSKMPTVSFTIGGKVFDLAPEEYVLKIGEGPVAQCISGFTALDIPPPRGPLWILGDVFMGKYHTVFDFGNEQVGFAEAV

SEQ ID NO: 100544 - protein, 298 aa, Arabidopsis thaliana
  peptide (1)..(298): Ceres Seq. ID no. 13605395
  misc_feature (1)..(148): Pfam Name: Eukaryotic aspartyl protease Pfam Description: Eukaryotic aspartyl protease
  misc_feature (1)..(298): Homolog of NCBI NO: 22330379 NR Description: aspartic protease -related [Arabidopsis thaliana] putative aspartic protease [Arabidopsis thaliana]
  misc_feature (1)..(297): Homolog of NCBI NO: 15221141 NR Description: aspartic proteinase -related [Arabidopsis
  misc_feature (1)..(297): Homolog of NCBI NO: 7435838 NR Description: probable aspartic proteinase (EC 3.4.23.-) 1 -
  misc_feature (1)..(205): Homolog of NCBI NO: 25290004 NR Description: hypothetical protein F19K23.21 [imported] - thaliana >gi|2160151|gb|AAB60773.1| Strong similarity to Brassica
  misc_feature (1)..(297): Homolog of NCBI NO: 1354272 NR Description: aspartic proteinase [Arabidopsis thaliana]
  misc_feature (1)..(297): Homolog of NCBI NO: 21616053 NR Description: aspartic proteinase [Theobroma cacao]
MLKQGLIKRPVFSFWLNRDPKSEEGGEIVFGGVDPKHFRGEHTFVPVTQRGYWQFDMGEVLIAGESTGYCGSGCSAIADSGTSLLAGPTAVVAMINKAIGASGVVSQQCKTVVDQYGQTILDLLLAETQPKKICSQIGLCAYDGTHGVSMGIESVVDKENTRSSSGLRDAGCPACEMAVVWIQSQLRQNMTQERIVNYINEICERMPSPNGESAVDCSQLSKMPTVSFTIGGKVFDLAPEEYVLKIGEGPVAQCISGFTALDIPPPRGPLWILGDVFMGKYHTVFDFGNEQVGFAEAV

SEQ ID NO: 100545 - DNA, 1774 bp, Arabidopsis thaliana
  misc_feature (1)..(1774): Ceres Seq. ID no. 13605426
  misc_feature: MA Experiment ID: 20000355 Result: Up-regulated in Transcription
  misc_feature: MA Experiment 20000355 PARAMETER Experiment Name: At_Siliques_Sub_P Parameter: Age (day) Value: 21
  misc_feature: MA Experiment 20000355 PARAMETER Experiment Name: At_Siliques_Sub_P Parameter: Organism Value: A. thaliana
  misc_feature: MA Experiment 20000355 PARAMETER Experiment Name: At_Siliques_Sub_P Parameter: Plant Line Value: WS
  misc_feature: MA Experiment 20000355 PARAMETER Experiment Name: At_Siliques_Sub_P Parameter: Tissue Value: Less Than 5mm Siliques vs. Whole Plant
  misc_feature: MA Experiment ID: 20000440 Result: Up-regulated in Transcription
  misc_feature: MA Experiment 20000440 PARAMETER Experiment Name: At_Closed-Flower__Sub_P Parameter: Tissue Value: Closed Flower vs. Whole Plant
tattcggttctcgagtcatcgctgtctggaacagcgatgactcgagaaaagaataatggcgaattctcaaagatcatcatctctgatcgatccaaggaacggtttctgcacatcaaactccacattttacagtaaacgcaaaccattggcacttccttcaaaagaatcactcgacatcacaacattcatctcctcccaaacgtaccgtggcaaaaccgccttcatagacgcagccacggaccaccgcataagcttctccgatttatggatggccgtggatcgtgtcgccgactgtctcctccacgacgtgggaatacggagaggtgacgtggtcctagtcctctctcccaacaccatctccatccccattgtctgcctctccgtgatgtctcttggcgctgtcttaactaccgctaatcctctcaacaccgctagtgaaatcttaagacaaatcgcggatagcaatccaaaactcgccttcacaacaccggaactggctcccaaaatcgccagttccggtatctctatcgtcctcgagcgcgtagaagacactctacgcgttccgagaggactcaaagtggttgggaatctaactgaaatgatgaagaaagaaccaagtggacaagcagtcagaaaccaagttcataaagacgacacggcgatgttgctttactcctcggggacgacgggacgaagcaaaggagtgaattcgtctcacgggaacttaatagcacacgtggcgagatacatcgcggagccattcgagcagccacaacagaccttcatttgcactgttccgttgttccacacttttggtttactaaacttcgttttggccaccttagcgttaggtacgaccgttgtcatcctcccgaggtttgacctcggagagatgatggcggctgtcgagaaatacagagcgacgactctgattctcgtgccgccagttttagtaactatgataaacaaagcggatcaaataatgaagaagtacgacgtgagcttcttgagaacggtgcggtgcggtggagcacctttgagcaaggaagttactcaagggtttatgaagaaatatccaacggttgatgtttatcaaggatacgcattgacggaatctaacggtgcaggagcttcgatagaatcagtggaggagagtcggaggtacggtgcggtggggttgttgtcatgtggtgtagaagcgaggattgtggatccgaatacgggtcaggtcatgggtttgaaccaaacgggcgaactttggcttaaagggccttctatcgccaaaggttatttcaggaatgaagaagaaattataacttcagaaggatggcttaaaacaggagatctatgctatatagacaacgatggatttctttttatcgttgatcgattgaaagagcttatcaaatacaaaggttaccaggtacctccagctgaactagaggctctcttactaaaccatccagatattctcgatgcagccgttattccgtttccagataaagaagcaggacaatttccgatggcttacgtagcacgaaagcctgagagtaatctttgtgagaaaaaggttatcgactttatttctaaacaggtggcaccatataagaaaataagaaaagtcgcatttatagactctataccaaagactccatcgggcaaaacacttcgcaaggatctaatcaaatttgccatttcaaaaatttaaaagaatcactattttgtcatttttatttgtatgaatttctgacataataaaagagaagttatatcc

SEQ ID NO: 100546 - protein, 550 aa, Arabidopsis thaliana; identical to SEQ ID NO: 71567
  peptide (1)..(550): Ceres Seq. ID no. 13605427
  misc_feature (66)..(410): Pfam Name: AMP-binding enzyme Pfam Description: AMP-binding enzyme
  misc_feature (1)..(550): Homolog of NCBI NO: 30693203 NR Description: 4-coumarate:CoA ligase (4-coumaroyl-CoA synthase)
  misc_feature (1)..(550): Homolog of NCBI NO: 29888141 NR Description: 4-coumarate-CoA ligase-like protein [Arabidopsis
  misc_feature (1)..(550): Homolog of NCBI NO: 10177788 NR Description: AMP-binding protein-like [Arabidopsis thaliana]
  misc_feature (1)..(543): Homolog of NCBI NO: 25402913 NR Description: protein F5M15.18 [imported] - Arabidopsis >gi|8778604|gb|AAF79612.1|AC027665_13 F5M15.18 [Arabidopsis
  misc_feature (1)..(410): Homolog of NCBI NO: 15217958 NR Description: 4-coumarate:CoA ligase 1 (4-coumaroyl-CoA
  misc_feature (423)..(550): Homolog of NCBI NO: 15217958 NR Description: 4-coumarate:CoA ligase 1 (4-coumaroyl-CoA
  misc_feature (1)..(413): Homolog of NCBI NO: 25402913 NR Description: protein F5M15.18 [imported] - Arabidopsis >gi|8778604|gb|AAF79612.1|AC027665_13 F5M15.18 [Arabidopsis
  misc_feature (423)..(529): Homolog of NCBI NO: 25402913 NR Description: protein F5M15.18 [imported] - Arabidopsis >gi|8778604|gb|AAF79612.1|AC027665_13 F5M15.18 [Arabidopsis
  misc_feature (11)..(548): Homolog of NCBI NO: 18394871 NR Description: 4-coumarate:CoA ligase 1 (4-coumaroyl-CoA unknown protein [Arabidopsis thaliana]
  misc_feature (11)..(548): Homolog of NCBI NO: 29893225 NR Description: 4-coumarate-CoA ligase-like protein [Arabidopsis

SEQ ID NO: 100547 - protein, 479 aa, Arabidopsis thaliana; identical to SEQ ID NO: 71568
  peptide (1)..(479): Ceres Seq. ID no. 13605428
  misc_feature (1)..(339): Pfam Name: AMP-binding enzyme Pfam Description: AMP-binding enzyme
  misc_feature (1)..(479): Homolog of NCBI NO: 30693203 NR Description: 4-coumarate:CoA ligase (4-coumaroyl-CoA synthase)
  misc_feature (1)..(479): Homolog of NCBI NO: 29888141 NR Description: 4-coumarate-CoA ligase-like protein [Arabidopsis
  misc_feature (1)..(479): Homolog of NCBI NO: 10177788 NR Description: AMP-binding protein-like [Arabidopsis thaliana]
  misc_feature (1)..(472): Homolog of NCBI NO: 25402913 NR Description: protein F5M15.18 [imported] - Arabidopsis >gi|8778604|gb|AAF79612.1|AC027665_13 F5M15.18 [Arabidopsis
  misc_feature (1)..(339): Homolog of NCBI NO: 15217958 NR Description: 4-coumarate:CoA ligase 1 (4-coumaroyl-CoA
  misc_feature (352)..(479): Homolog of NCBI NO: 15217958 NR Description: 4-coumarate:CoA ligase 1 (4-coumaroyl-CoA
  misc_feature (1)..(342): Homolog of NCBI NO: 25402913 NR Description: protein F5M15.18 [imported] - Arabidopsis >gi|8778604|gb|AAF79612.1|AC027665_13 F5M15.18 [Arabidopsis
  misc_feature (352)..(458): Homolog of NCBI NO: 25402913 NR Description: protein F5M15.18 [imported] - Arabidopsis >gi|8778604|gb|AAF79612.1|AC027665_13 F5M15.18 [Arabidopsis
  misc_feature (1)..(477): Homolog of NCBI NO: 18394871 NR Description: 4-coumarate:CoA ligase 1 (4-coumaroyl-CoA unknown protein [Arabidopsis thaliana]
  misc_feature (1)..(477): Homolog of NCBI NO: 29893225 NR Description: 4-coumarate-CoA ligase-like protein [Arabidopsis

SEQ ID NO: 100548 - protein, 440 aa, Arabidopsis thaliana; identical to SEQ ID NO: 71569
  peptide (1)..(440): Ceres Seq. ID no. 13605429
  misc_feature (1)..(300): Pfam Name: AMP-binding enzyme Pfam Description: AMP-binding enzyme
  misc_feature (1)..(440): Homolog of NCBI NO: 30693203 NR Description: 4-coumarate:CoA ligase (4-coumaroyl-CoA synthase)
  misc_feature (1)..(440): Homolog of NCBI NO: 29888141 NR Description: 4-coumarate-CoA ligase-like protein [Arabidopsis
  misc_feature (1)..(440): Homolog of NCBI NO: 10177788 NR Description: AMP-binding protein-like [Arabidopsis thaliana]
  misc_feature (1)..(433): Homolog of NCBI NO: 25402913 NR Description: protein F5M15.18 [imported] - Arabidopsis >gi|8778604|gb|AAF79612.1|AC027665_13 F5M15.18 [Arabidopsis
  misc_feature (1)..(300): Homolog of NCBI NO: 15217958 NR Description: 4-coumarate:CoA ligase 1 (4-coumaroyl-CoA
  misc_feature (313)..(440): Homolog of NCBI NO: 15217958 NR Description: 4-coumarate:CoA ligase 1 (4-coumaroyl-CoA
  misc_feature (1)..(303): Homolog of NCBI NO: 25402913 NR Description: protein F5M15.18 [imported] - Arabidopsis >gi|8778604|gb|AAF79612.1|AC027665_13 F5M15.18 [Arabidopsis
  misc_feature (313)..(419): Homolog of NCBI NO: 25402913 NR Description: protein F5M15.18 [imported] - Arabidopsis >gi|8778604|gb|AAF79612.1|AC027665_13 F5M15.18 [Arabidopsis
  misc_feature (1)..(438): Homolog of NCBI NO: 18394871 NR Description: 4-coumarate:CoA ligase 1 (4-coumaroyl-CoA unknown protein [Arabidopsis thaliana]
  misc_feature (1)..(438): Homolog of NCBI NO: 29893225 NR Description: 4-coumarate-CoA ligase-like protein [Arabidopsis

SEQ ID NO: 100549 - DNA, 2313 bp, Arabidopsis thaliana
  misc_feature (1)..(2313): Ceres Seq. ID no. 13605437
  misc_feature: MA Experiment ID: 20000185 Result: Up-regulated in Transcription
  misc_feature: MA Experiment 20000185 PARAMETER Experiment Name: At_Roots__P Parameter: Age (day) Value: 7 vs. 21
  misc_feature: MA Experiment 20000185 PARAMETER Experiment Name: At_Roots__P Parameter: Organism Value: A. thaliana
  misc_feature: MA Experiment 20000185 PARAMETER Experiment Name: At_Roots__P Parameter: Tissue Value: Roots vs. Whole Plant
  misc_feature: MA Experiment ID: 20000439 Result: Up-regulated in Transcription
  misc_feature: MA Experiment 20000439 PARAMETER Experiment Name: At_Roots__P Parameter: Age (day) Value: 14 vs. 21
  misc_feature: MA Experiment 20000439 PARAMETER Experiment Name: At_Roots__P Parameter: Organism Value: A. thaliana
  misc_feature: MA Experiment 20000439 PARAMETER Experiment Name: At_Roots__P Parameter: Tissue Value: Roots vs. Whole Plant
cttggaatcattggtcaaaagagagaggctacaactttaaaaggccttcaataacgttggaccggctctaagaggacaaagggtagtcttatatcttcagtcttctacaagccaatggttgaagggttctcattgtcattgatgttcctccttgtttcacatttctttgtctcaggagtaatgtcgagaaactttactatagagaacaaatgcgattacactgtctggccgggattcctaaccatgactactgcggtttcgctccccaccaacggcttctccctcaagaaaggggagtcacgtgtcatcaatgtgccaccgtcatggtcaggtcgtttgtggggtagatcgttctgctccaccagctcaacagggaatttctcatgtgccacgggagactgcggctccggaaaaatcgagtgctccgattccggagcaaggcctcctacgacgctaattgattttacccttgacgctaccgacggtcaagacttctacgatgtaagcgtcgtggatggttacaaccttccgttggttgtggtcccacaacgtctagggagtggccggacatgtagcaacgttggttgtgtggttaacttgaacaagacttgtccgtcggagcttaaagtgatgggaagctctaacaaggaacatcccattgcttgcatgaacgcttgtcagaaattcgggttgccggagttctgctgctacggtgagtacggtaaacctgcaaaatgtcaaccgacgctttactctacgaatttcaagaacgagtgtccactcgcttatagctatgcttatgacaatgaaaacaacaccttcagatgctcaaactcacctaactatgtcatcaccttttgccccaacgacataagttcaatgtctcaaccatccaaggaaactaatggaggaacgaaacaaaagtcatcatggaagttaaaactcatagttggagtctcagcagctttgaccctgatgatcttaattgtggtcgtaataatagtgagaacaaagaatatgagaaatagtgagtggaatgatcagaacgttgaagcagttgcaatgttgaaacgatacagttatacaagagtcaagaagatgacaaactcatttgcgcatgttctcggtaaaggaggatttggaactgtctacaaaggaaagttagccgatagcggtcgggatgtcgcagttaagatcttgaaggtgtcagagggtaatggagaagagttcattaatgaagtagcaagcatgagtagaacatctcatgtcaatattgtttctctgcttggattctgttatgaaaagaacaagagagctataatctacgagttcatgccgaatgggtccctcgacaagtatatttctgcgaatatgtcaacaaagatggaatgggaaagattatacgacgttgcggtaggtatctctcgcggcctagagtatttacacaatcggtgtgtcacgaggattgtccatttcgacataaagccgcagaacatactgatggacgaaaatctttgtcctaagatttcagattttggtcttgctaaactctgcaaaaataaggagagcatcatatcaatgctacacatgagagggacctttggatacattgcccctgaaatgttttccaagaattttggagcagtttcgcataagtcagatgtttatagttatgggatggtagttcttgagatgattggagcaaagaatatagaaaaggttgaatattctggatctaacaatggttcaatgtactttccagaatgggtctataaagattttgagaagggagaaatcacaaggatttttggagatagtataactgatgaagaagagaaaattgcaaagaaattggtattggttgctctatggtgtatacagatgaatccatcagaccgtccaccaatgatcaaagtcattgagatgttagaggggaatctagaggctcttcaagtaccacctaatcctctcttgttttcacccgaggaaacggttccagacactcttgaagatagtgatgacacttcaaccttctttaatccaagtcattttgaaagaggtactctcttagatagtgaagatgttttacaacatgggtcaaggtcctcctaaactaaagtcaacccgagagcggatctatttaaacttgtcaagatctttagctatttctcgattagtttttaataacttctgacttaatagtgtgtttctatgcttattagatgatgtttactgacgcaggcactcaatattgttggttaatgaagactattttctgttgtttttctcttggaaagagagaaacgttaatat

SEQ ID NO: 100550 - protein, 665 aa, Arabidopsis thaliana
  peptide (1)..(665): Ceres Seq. ID no. 13605438
  misc_feature (31)..(250): Pfam Name: Thaumatin family Pfam Description: Thaumatin family
  misc_feature (8)..(665): Homolog of NCBI NO: 15223105 NR Description: receptor serine/threonine kinase PR5 -related
  misc_feature (28)..(650): Homolog of NCBI NO: 30684346 NR Description: receptor serine/threonine kinase-related protein
  misc_feature (136)..(650): Homolog of NCBI NO: 7488208 NR Description: probable serine/threonine-specific protein kinase
  misc_feature (261)..(640): Homolog of NCBI NO: 15219781 NR Description: protein kinase, putative [Arabidopsis thaliana]
  misc_feature (277)..(642): Homolog of NCBI NO: 10177799 NR Description: receptor serine/threonine kinase-like protein
  misc_feature (239)..(640): Homolog of NCBI NO: 15219803 NR Description: kinase -related [Arabidopsis thaliana]
  misc_feature (239)..(640): Homolog of NCBI NO: 25404657 NR Description: hypothetical protein F1O19.6 [imported] - thaliana >gi|9755449|gb|AAF98210.1|AC007152_6 Unknown protein
  misc_feature (280)..(640): Homolog of NCBI NO: 15240865 NR Description: serine/threonine protein kinase, putative thaliana] >gi|10177801|dbj|BAB11292.1| receptor serine/threonine
  misc_feature (225)..(635): Homolog of NCBI NO: 15241612 NR Description: protein kinase family [Arabidopsis thaliana]
  misc_feature (278)..(620): Homolog of NCBI NO: 15219783 NR Description: serine/threonine protein kinase, putative thaliana] >gi|25404651|pir||A96693 probable receptor
MVEGFSLSLMFLLVSHFFVSGVMSRNFTIENKCDYTVWPGFLTMTTAVSLPTNGFSLKKGESRVINVPPSWSGRLWGRSFCSTSSTGNFSCATGDCGSGKIECSDSGARPPTTLIDFTLDATDGQDFYDVSVVDGYNLPLVVVPQRLGSGRTCSNVGCVVNLNKTCPSELKVMGSSNKEHPIACMNACQKFGLPEFCCYGEYGKPAKCQPTLYSTNFKNECPLAYSYAYDNENNTFRCSNSPNYVITFCPNDISSMSQPSKETNGGTKQKSSWKLKLIVGVSAALTLMILIVVVIIVRTKNMRNSEWNDQNVEAVAMLKRYSYTRVKKMTNSFAHVLGKGGFGTVYKGKLADSGRDVAVKILKVSEGNGEEFINEVASMSRTSHVNIVSLLGFCYEKNKRAIIYEFMPNGSLDKYISANMSTKMEWERLYDVAVGISRGLEYLHNRCVTRIVHFDIKPQNILMDENLCPKISDFGLAKLCKNKESIISMLHMRGTFGYIAPEMFSKNFGAVSHKSDVYSYGMVVLEMIGAKNIEKVEYSGSNNGSMYFPEWVYKDFEKGEITRIFGDSITDEEEKIAKKLVLVALWCIQMNPSDRPPMIKVIEMLEGNLEALQVPPNPLLFSPEETVPDTLEDSDDTSTFFNPSHFERGTLLDSEDVLQHGSRSS

SEQ ID NO: 100551 - protein, 656 aa, Arabidopsis thaliana
  peptide (1)..(656): Ceres Seq. ID no. 13605439
  misc_feature (22)..(241): Pfam Name: Thaumatin family Pfam Description: Thaumatin family
  misc_feature (1)..(656): Homolog of NCBI NO: 15223105 NR Description: receptor serine/threonine kinase PR5 -related
  misc_feature (19)..(641): Homolog of NCBI NO: 30684346 NR Description: receptor serine/threonine kinase-related protein
  misc_feature (127)..(641): Homolog of NCBI NO: 7488208 NR Description: probable serine/threonine-specific protein kinase
  misc_feature (252)..(631): Homolog of NCBI NO: 15219781 NR Description: protein kinase, putative [Arabidopsis thaliana]
  misc_feature (268)..(633): Homolog of NCBI NO: 10177799 NR Description: receptor serine/threonine kinase-like protein
  misc_feature (230)..(631): Homolog of NCBI NO: 15219803 NR Description: kinase -related [Arabidopsis thaliana]
  misc_feature (230)..(631): Homolog of NCBI NO: 25404657 NR Description: hypothetical protein F1O19.6 [imported] - thaliana >gi|9755449|gb|AAF98210.1|AC007152_6 Unknown protein
  misc_feature (271)..(631): Homolog of NCBI NO: 15240865 NR Description: serine/threonine protein kinase, putative thaliana] >gi|10177801|dbj|BAB11292.1| receptor serine/threonine
  misc_feature (216)..(626): Homolog of NCBI NO: 15241612 NR Description: protein kinase family [Arabidopsis thaliana]
  misc_feature (269)..(611): Homolog of NCBI NO: 15219783 NR Description: serine/threonine protein kinase, putative thaliana] >gi|25404651|pir||A96693 probable receptor
MFLLVSHFFVSGVMSRNFTIENKCDYTVWPGFLTMTTAVSLPTNGFSLKKGESRVINVPPSWSGRLWGRSFCSTSSTGNFSCATGDCGSGKIECSDSGARPPTTLIDFTLDATDGQDFYDVSVVDGYNLPLVVVPQRLGSGRTCSNVGCVVNLNKTCPSELKVMGSSNKEHPIACMNACQKFGLPEFCCYGEYGKPAKCQPTLYSTNFKNECPLAYSYAYDNENNTFRCSNSPNYVITFCPNDISSMSQPSKETNGGTKQKSSWKLKLIVGVSAALTLMILIVVVIIVRTKNMRNSEWNDQNVEAVAMLKRYSYTRVKKMTNSFAHVLGKGGFGTVYKGKLADSGRDVAVKILKVSEGNGEEFINEVASMSRTSHVNIVSLLGFCYEKNKRAIIYEFMPNGSLDKYISANMSTKMEWERLYDVAVGISRGLEYLHNRCVTRIVHFDIKPQNILMDENLCPKISDFGLAKLCKNKESIISMLHMRGTFGYIAPEMFSKNFGAVSHKSDVYSYGMVVLEMIGAKNIEKVEYSGSNNGSMYFPEWVYKDFEKGEITRIFGDSITDEEEKIAKKLVLVALWCIQMNPSDRPPMIKVIEMLEGNLEALQVPPNPLLFSPEETVPDTLEDSDDTSTFFNPSHFERGTLLDSEDVLQHGSRSS

SEQ ID NO: 100552 - protein, 643 aa, Arabidopsis thaliana
  peptide (1)..(643): Ceres Seq. ID no. 13605440
  misc_feature (9)..(228): Pfam Name: Thaumatin family Pfam Description: Thaumatin family
  misc_feature (1)..(643): Homolog of NCBI NO: 15223105 NR Description: receptor serine/threonine kinase PR5 -related
  misc_feature (6)..(628): Homolog of NCBI NO: 30684346 NR Description: receptor serine/threonine kinase-related protein
  misc_feature (114)..(628): Homolog of NCBI NO: 7488208 NR Description: probable serine/threonine-specific protein kinase
  misc_feature (239)..(618): Homolog of NCBI NO: 15219781 NR Description: protein kinase, putative [Arabidopsis thaliana]
  misc_feature (255)..(620): Homolog of NCBI NO: 10177799 NR Description: receptor serine/threonine kinase-like protein
  misc_feature (217)..(618): Homolog of NCBI NO: 15219803 NR Description: kinase -related [Arabidopsis thaliana]
  misc_feature (217)..(618): Homolog of NCBI NO: 25404657 NR Description: hypothetical protein F1O19.6 [imported] - thaliana >gi|9755449|gb|AAF98210.1|AC007152_6 Unknown protein
  misc_feature (258)..(618): Homolog of NCBI NO: 15240865 NR Description: serine/threonine protein kinase, putative thaliana] >gi|10177801|dbj|BAB11292.1| receptor serine/threonine
  misc_feature (203)..(613): Homolog of NCBI NO: 15241612 NR Description: protein kinase family [Arabidopsis thaliana]
  misc_feature (256)..(598): Homolog of NCBI NO: 15219783 NR Description: serine/threonine protein kinase, putative thaliana] >gi|25404651|pir||A96693 probable receptor
MSRNFTIENKCDYTVWPGFLTMTTAVSLPTNGFSLKKGESRVINVPPSWSGRLWGRSFCSTSSTGNFSCATGDCGSGKIECSDSGARPPTTLIDFTLDATDGQDFYDVSVVDGYNLPLVVVPQRLGSGRTCSNVGCVVNLNKTCPSELKVMGSSNKEHPIACMNACQKFGLPEFCCYGEYGKPAKCQPTLYSTNFKNECPLAYSYAYDNENNTFRCSNSPNYVITFCPNDISSMSQPSKETNGGTKQKSSWKLKLIVGVSAALTLMILIVVVIIVRTKNMRNSEWNDQNVEAVAMLKRYSYTRVKKMTNSFAHVLGKGGFGTVYKGKLADSGRDVAVKILKVSEGNGEEFINEVASMSRTSHVNIVSLLGFCYEKNKRAIIYEFMPNGSLDKYISANMSTKMEWERLYDVAVGISRGLEYLHNRCVTRIVHFDIKPQNILMDENLCPKISDFGLAKLCKNKESIISMLHMRGTFGYIAPEMFSKNFGAVSHKSDVYSYGMVVLEMIGAKNIEKVEYSGSNNGSMYFPEWVYKDFEKGEITRIFGDSITDEEEKIAKKLVLVALWCIQMNPSDRPPMIKVIEMLEGNLEALQVPPNPLLFSPEETVPDTLEDSDDTSTFFNPSHFERGTLLDSEDVLQHGSRSS

SEQ ID NO: 100553 - DNA, 932 bp, Arabidopsis thaliana
  misc_feature (1)..(932): Ceres Seq. ID no. 13605445
  misc_feature: MA Experiment ID: 20000314 Result: Down-regulated in Transcription
  misc_feature: MA Experiment 20000314 PARAMETER Experiment Name: At_14day_Shoots-Roots_Sub_P Parameter: Age (day) Value: 14
  misc_feature: MA Experiment 20000314 PARAMETER Experiment Name: At_14day_Shoots-Roots_Sub_P Parameter: Organism Value: A. thaliana
  misc_feature: MA Experiment 20000314 PARAMETER Experiment Name: At_14day_Shoots-Roots_Sub_P Parameter: Plant Line Value: WS
  misc_feature: MA Experiment 20000314 PARAMETER Experiment Name: At_14day_Shoots-Roots_Sub_P Parameter: Tissue Value: Roots vs. Whole Plant
  misc_feature: MA Experiment ID: 20000315 Result: Down-regulated in Transcription
  misc_feature: MA Experiment 20000315 PARAMETER Experiment Name: At_14day_Shoots-Roots_Sub_P Parameter: Age (day) Value: 14
  misc_feature: MA Experiment 20000315 PARAMETER Experiment Name: At_14day_Shoots-Roots_Sub_P Parameter: Organism Value: A. thaliana
  misc_feature: MA Experiment 20000315 PARAMETER Experiment Name: At_14day_Shoots-Roots_Sub_P Parameter: Plant Line Value: WS
  misc_feature: MA Experiment 20000315 PARAMETER Experiment Name: At_14day_Shoots-Roots_Sub_P Parameter: Tissue Value: Shoots vs. Whole Plant
  misc_feature: MA Experiment ID: 20000355 Result: Up-regulated in Transcription
  misc_feature: MA Experiment 20000355 PARAMETER Experiment Name: At_Siliques_Sub_P Parameter: Age (day) Value: 21
  misc_feature: MA Experiment 20000355 PARAMETER Experiment Name: At_Siliques_Sub_P Parameter: Organism Value: A. thaliana
  misc_feature: MA Experiment 20000355 PARAMETER Experiment Name: At_Siliques_Sub_P Parameter: Plant Line Value: WS
  misc_feature: MA Experiment 20000355 PARAMETER Experiment Name: At_Siliques_Sub_P Parameter: Tissue Value: Less Than 5mm Siliques vs. Whole Plant
  misc_feature: MA Experiment ID: 20000440 Result: Down-regulated in Transcription
  misc_feature: MA Experiment 20000440 PARAMETER Experiment Name: At_Closed-Flower__Sub_P Parameter: Tissue Value: Closed Flower vs. Whole Plant
ggaagctaaaagtaaaacaaaatcatcaaagagggataataatcatgaaattgctagaaaaaatgacatatgtagaatgttttatgataataatggcgacatggttcatgttcataagttacagtcatggagccaatgtagctgcagcacctggaaccaacggacttgatactgcttggtatgatgcgcgagccgcatattatggtgatatccatggtggaggcactgaactagaaggagcttgtggatacggtgatctaaacaaacatggatatggtctagccacagcagcattgagcacggcgctcttcaacagcggggcctcatgtggggcttgttacgagatcatgtgctctcctaatccacaaggatgtttgtccggatctatcaagatcacagcaacagatttatgtccaccaggatccgcttggtgctacctaccaaataaacactttgatctctccttaccaatgttcatcaagatcgctcaggtcaaagccaagatggtcccggttagatacagacgtgttccctgtgcgaaaaccggtggtgtcaagtttgaagttaaaggaaaccctaatatcttaacgatcttgccgtacaatgtaggaggagcaggagatattatagccgtgtctgctaagggaagcaaaaccgcgtgggtagtaatgagcagatattggggacaaaattggactactaatgttaatctaaccggtcaaagtgtatcattaagggttacaacgagtgatgggattacaaaggattttactgatgtgatgccagcaagttggggatttgggcagacttttgatggaaagactaacttttaagaaaaatgatatgaattttttttagttttggcttacaagttacaactaagagagatgtattggttgcaataattaaaaataaatgaaatattgtttatg

SEQ ID NO: 100554 - protein, 276 aa, Arabidopsis thaliana
  peptide (1)..(276): Ceres Seq. ID no. 13605446
  misc_feature (184)..(261): Pfam Name: Pollen allergen Pfam Description: Pollen allergen
  misc_feature (15)..(276): Homolog of NCBI NO: 30693373 NR Description: expansin, putative (EXP21) [Arabidopsis thaliana]
  misc_feature (21)..(276): Homolog of NCBI NO: 22095680 NR Description: Putative alpha-expansin 21 precursor (At-EXP21)
  misc_feature (28)..(276): Homolog of NCBI NO: 9758855 NR Description: expansin-like protein [Arabidopsis thaliana]
  misc_feature (15)..(276): Homolog of NCBI NO: 20137955 NR Description: Putative alpha-expansin 25 precursor (At-EXP25)
  misc_feature (21)..(276): Homolog of NCBI NO: 20137957 NR Description: Putative alpha-expansin 23 precursor (At-EXP23)
  misc_feature (31)..(276): Homolog of NCBI NO: 15241684 NR Description: expansin, putative (EXP25) [Arabidopsis thaliana]
  misc_feature (31)..(276): Homolog of NCBI NO: 15241680 NR Description: expansin, putative (EXP23) [Arabidopsis thaliana]
  misc_feature (38)..(276): Homolog of NCBI NO: 9758859 NR Description: expansin-like protein [Arabidopsis thaliana]
  misc_feature (38)..(276): Homolog of NCBI NO: 9758857 NR Description: expansin-like protein [Arabidopsis thaliana]
  misc_feature (45)..(276): Homolog of NCBI NO: 20137958 NR Description: Putative alpha-expansin 22 precursor (At-EXP22)
KLKVKQNHQRGIIIMKLLEKMTYVECFMIIMATWFMFISYSHGANVAAAPGTNGLDTAWYDARAAYYGDIHGGGTELEGACGYGDLNKHGYGLATAALSTALFNSGASCGACYEIMCSPNPQGCLSGSIKITATDLCPPGSAWCYLPNKHFDLSLPMFIKIAQVKAKMVPVRYRRVPCAKTGGVKFEVKGNPNILTILPYNVGGAGDIIAVSAKGSKTAWVVMSRYWGQNWTTNVNLTGQSVSLRVTTSDGITKDFTDVMPASWGFGQTFDGKTNF

SEQ ID NO: 100555 - protein, 262 aa, Arabidopsis thaliana
  peptide (1)..(262): Ceres Seq. ID no. 13605447
  misc_feature (170)..(247): Pfam Name: Pollen allergen Pfam Description: Pollen allergen
  misc_feature (1)..(262): Homolog of NCBI NO: 30693373 NR Description: expansin, putative (EXP21) [Arabidopsis thaliana]
  misc_feature (7)..(262): Homolog of NCBI NO: 22095680 NR Description: Putative alpha-expansin 21 precursor (At-EXP21)
  misc_feature (14)..(262): Homolog of NCBI NO: 9758855 NR Description: expansin-like protein [Arabidopsis thaliana]
  misc_feature (1)..(262): Homolog of NCBI NO: 20137955 NR Description: Putative alpha-expansin 25 precursor (At-EXP25)
  misc_feature (7)..(262): Homolog of NCBI NO: 20137957 NR Description: Putative alpha-expansin 23 precursor (At-EXP23)
  misc_feature (17)..(262): Homolog of NCBI NO: 15241684 NR Description: expansin, putative (EXP25) [Arabidopsis thaliana]
  misc_feature (17)..(262): Homolog of NCBI NO: 15241680 NR Description: expansin, putative (EXP23) [Arabidopsis thaliana]
  misc_feature (24)..(262): Homolog of NCBI NO: 9758859 NR Description: expansin-like protein [Arabidopsis thaliana]
  misc_feature (24)..(262): Homolog of NCBI NO: 9758857 NR Description: expansin-like protein [Arabidopsis thaliana]
  misc_feature (31)..(262): Homolog of NCBI NO: 20137958 NR Description: Putative alpha-expansin 22 precursor (At-EXP22)
MKLLEKMTYVECFMIIMATWFMFISYSHGANVAAAPGTNGLDTAWYDARAAYYGDIHGGGTELEGACGYGDLNKHGYGLATAALSTALFNSGASCGACYEIMCSPNPQGCLSGSIKITATDLCPPGSAWCYLPNKHFDLSLPMFIKIAQVKAKMVPVRYRRVPCAKTGGVKFEVKGNPNILTILPYNVGGAGDIIAVSAKGSKTAWVVMSRYWGQNWTTNVNLTGQSVSLRVTTSDGITKDFTDVMPASWGFGQTFDGKTNF

SEQ ID NO: 100556 - protein, 256 aa, Arabidopsis thaliana
  peptide (1)..(256): Ceres Seq. ID no. 13605448
  misc_feature (164)..(241): Pfam Name: Pollen allergen Pfam Description: Pollen allergen
  misc_feature (1)..(256): Homolog of NCBI NO: 30693373 NR Description: expansin, putative (EXP21) [Arabidopsis thaliana]
  misc_feature (1)..(256): Homolog of NCBI NO: 22095680 NR Description: Putative alpha-expansin 21 precursor (At-EXP21)
  misc_feature (8)..(256): Homolog of NCBI NO: 9758855 NR Description: expansin-like protein [Arabidopsis thaliana]
  misc_feature (1)..(256): Homolog of NCBI NO: 20137955 NR Description: Putative alpha-expansin 25 precursor (At-EXP25)
  misc_feature (1)..(256): Homolog of NCBI NO: 20137957 NR Description: Putative alpha-expansin 23 precursor (At-EXP23)
  misc_feature (11)..(256): Homolog of NCBI NO: 15241684 NR Description: expansin, putative (EXP25) [Arabidopsis thaliana]
  misc_feature (11)..(256): Homolog of NCBI NO: 15241680 NR Description: expansin, putative (EXP23) [Arabidopsis thaliana]
  misc_feature (18)..(256): Homolog of NCBI NO: 9758859 NR Description: expansin-like protein [Arabidopsis thaliana]
  misc_feature (18)..(256): Homolog of NCBI NO: 9758857 NR Description: expansin-like protein [Arabidopsis thaliana]
  misc_feature (25)..(256): Homolog of NCBI NO: 20137958 NR Description: Putative alpha-expansin 22 precursor (At-EXP22)
MTYVECFMIIMATWFMFISYSHGANVAAAPGTNGLDTAWYDARAAYYGDIHGGGTELEGACGYGDLNKHGYGLATAALSTALFNSGASCGACYEIMCSPNPQGCLSGSIKITATDLCPPGSAWCYLPNKHFDLSLPMFIKIAQVKAKMVPVRYRRVPCAKTGGVKFEVKGNPNILTILPYNVGGAGDIIAVSAKGSKTAWVVMSRYWGQNWTTNVNLTGQSVSLRVTTSDGITKDFTDVMPASWGFGQTFDGKTNF

SEQ ID NO: 100557 - DNA, 1302 bp, Arabidopsis thaliana
  misc_feature (1)..(1302): Ceres Seq. ID no. 13605449
  misc_feature: MA Experiment ID: 20001247 Result: Up-regulated in Transcription
  misc_feature: MA Experiment 20001247 PARAMETER Experiment Name: At_Far-red-induction_P Parameter: Age (day) Value: 7
  misc_feature: MA Experiment 20001247 PARAMETER Experiment Name: At_Far-red-induction_P Parameter: Light Value: Far-red vs. White
  misc_feature: MA Experiment 20001247 PARAMETER Experiment Name: At_Far-red-induction_P Parameter: Organism Value: A. thaliana
  misc_feature: MA Experiment 20001247 PARAMETER Experiment Name: At_Far-red-induction_P Parameter: Plant Line Value: Columbia
  misc_feature: MA Experiment 20001247 PARAMETER Experiment Name: At_Far-red-induction_P Parameter: Timepoint (hr) Value: 1
  misc_feature: MA Experiment 20001247 PARAMETER Experiment Name: At_Far-red-induction_P Parameter: Tissue Value: Whole Plant
  misc_feature: MA Experiment ID: 20001911 Result: Down-regulated in Transcription
  misc_feature: MA Experiment 20001911 PARAMETER Experiment Name: At_Drought_Reproduction_P Parameter: Age (day) Value: 40
  misc_feature: MA Experiment 20001911 PARAMETER Experiment Name: At_Drought_Reproduction_P Parameter: Organism Value: A. thaliana
  misc_feature: MA Experiment 20001911 PARAMETER Experiment Name: At_Drought_Reproduction_P Parameter: Plant Line Value: WS
  misc_feature: MA Experiment 20001911 PARAMETER Experiment Name: At_Drought_Reproduction_P Parameter: Timepoint (day) Value: 10
  misc_feature: MA Experiment 20001911 PARAMETER Experiment Name: At_Drought_Reproduction_P Parameter: Tissue Value: Flowers
  misc_feature: MA Experiment 20001911 PARAMETER Experiment Name: At_Drought_Reproduction_P Parameter: Treatment Value: Drought vs. No Drought
tagacaagcagatttgcttcttctcgattctttgcaatttgcatgcattgctcatcaaaaaaattcctttctggcttttgttggaaaatagctgtataacttcaaatgttgaaactttgcttttcttcttcttctcttttggtcaaattttgtgttctctctagagcaaaaccctaattctctcaattctactcaaaattaatatctcttgcttccttgagaaagataaagatttgtgtttactaaggttgaggaaatgataatagcaaagcaatatcgttgcattcactcggcgacttgtcattgcacgaaaggacatcttagcgaagaagtattgtttcttatggttcagcatctaaactggaaccctaatgtgattgccactctatcttgtgtttgtaaatggtttgatgatctcgctaagcggttattgtggaaagaattctgtagagctagagcgcctaagatgatgagtgaccttcaatctagtggtagccatagtgttgatgggagttggagagcactagggaaacttttgatttactgctctggttcaagcaaaggtggactctttaatgatgttcaaatctctggtcattttgttcacagaacccgcttctctagaacatcgggaaggagctttcttcctccacaatgtcgaactgatgatattctctatgtttctgatccttgtgaacatttggatcaaggagaagatggtgatttgggattcttccgtgggattttcaaatcgttttctatgtcaaaggtgaggaagttgcttattaagaaagggacaccatttcatcctacggaagtttgtccgtattgcaaagcgaagctgtggagtatgcttcaggcgaaaatgataccacagagtgctagctgtagattgggggcttatgaagatagcattgagtattatgtttgtctcaatgggcatatgcttggagtttgtacactcttacctttgtctgattctgaaggggcctccgagtttcagtgactataaattgccgaccttgcgttttccgttgcagaaaatgcttgaagcttggtcagaggttatgatgtcgtctctctgtttcttatgtactggtgaattgttgctgctaaactttgggaatcatcactttgcaaagagttgatgttaagtgtatcataagctcaagttgtgcaaggtttgacgatttcagattctcaatttaccattggtgtgcatctacaaaccatttgttgattctgtgcatgtatatgtattaacaacacttgcaaattgtaatagacgcatatatttctgct

SEQ ID NO: 100558 - protein, 249 aa, Arabidopsis thaliana
  peptide (1)..(249): Ceres Seq. ID no. 13605450
  misc_feature (1)..(249): Homolog of NCBI NO: 15241717 NR Description: expressed protein [Arabidopsis thaliana] emb|CAB87751.1~gene_id:MUL8.4~similar to unknown protein thaliana] >gi|18700137|gb|AAL77680.1| AT5g39360/MUL8_40
  misc_feature (1)..(245): Homolog of NCBI NO: 15242296 NR Description: expressed protein [Arabidopsis thaliana]
  misc_feature (1)..(247): Homolog of NCBI NO: 34393587 NR Description: unknown protein [Oryza sativa (japonica
  misc_feature (20)..(244): Homolog of NCBI NO: 14210079 NR Description: circadian clock coupling factor ZGT [Nicotiana
  misc_feature (23)..(243): Homolog of NCBI NO: 11281127 NR Description: hypothetical protein T20O10.160 - Arabidopsis >gi|7573435|emb|CAB87751.1| putative protein [Arabidopsis
  misc_feature (23)..(243): Homolog of NCBI NO: 18412596 NR Description: expressed protein [Arabidopsis thaliana]
  misc_feature (20)..(244): Homolog of NCBI NO: 34908976 NR Description: putative circadian clock coupling factor ZGT
MIIAKQYRCIHSATCHCTKGHLSEEVLFLMVQHLNWNPNVIATLSCVCKWFDDLAKRLLWKEFCRARAPKMMSDLQSSGSHSVDGSWRALGKLLIYCSGSSKGGLFNDVQISGHFVHRTRFSRTSGRSFLPPQCRTDDILYVSDPCEHLDQGEDGDLGFFRGIFKSFSMSKVRKLLIKKGTPFHPTEVCPYCKAKLWSMLQAKMIPQSASCRLGAYEDSIEYYVCLNGHMLGVCTLLPLSDSEGASEFQ

SEQ ID NO: 100559 - protein, 220 aa, Arabidopsis thaliana
  peptide (1)..(220): Ceres Seq. ID no. 13605451
  misc_feature (1)..(220): Homolog of NCBI NO: 15241717 NR Description: expressed protein [Arabidopsis thaliana] emb|CAB87751.1~gene_id:MUL8.4~similar to unknown protein thaliana] >gi|18700137|gb|AAL77680.1| AT5g39360/MUL8_40
  misc_feature (1)..(216): Homolog of NCBI NO: 15242296 NR Description: expressed protein [Arabidopsis thaliana]
  misc_feature (1)..(218): Homolog of NCBI NO: 34393587 NR Description: unknown protein [Oryza sativa (japonica
  misc_feature (1)..(215): Homolog of NCBI NO: 14210079 NR Description: circadian clock coupling factor ZGT [Nicotiana
  misc_feature (1)..(214): Homolog of NCBI NO: 11281127 NR Description: hypothetical protein T20O10.160 - Arabidopsis >gi|7573435|emb|CAB87751.1| putative protein [Arabidopsis
  misc_feature (1)..(214): Homolog of NCBI NO: 18412596 NR Description: expressed protein [Arabidopsis thaliana]
  misc_feature (1)..(215): Homolog of NCBI NO: 34908976 NR Description: putative circadian clock coupling factor ZGT
MVQHLNWNPNVIATLSCVCKWFDDLAKRLLWKEFCRARAPKMMSDLQSSGSHSVDGSWRALGKLLIYCSGSSKGGLFNDVQISGHFVHRTRFSRTSGRSFLPPQCRTDDILYVSDPCEHLDQGEDGDLGFFRGIFKSFSMSKVRKLLIKKGTPFHPTEVCPYCKAKLWSMLQAKMIPQSASCRLGAYEDSIEYYVCLNGHMLGVCTLLPLSDSEGASEFQ

SEQ ID NO: 100560 - protein, 179 aa, Arabidopsis thaliana
  peptide (1)..(179): Ceres Seq. ID no. 13605452
  misc_feature (1)..(179): Homolog of NCBI NO: 15241717 NR Description: expressed protein [Arabidopsis thaliana] emb|CAB87751.1~gene_id:MUL8.4~similar to unknown protein thaliana] >gi|18700137|gb|AAL77680.1| AT5g39360/MUL8_40
  misc_feature (1)..(175): Homolog of NCBI NO: 15242296 NR Description: expressed protein [Arabidopsis thaliana]
  misc_feature (1)..(177): Homolog of NCBI NO: 34393587 NR Description: unknown protein [Oryza sativa (japonica
  misc_feature (1)..(174): Homolog of NCBI NO: 14210079 NR Description: circadian clock coupling factor ZGT [Nicotiana
  misc_feature (1)..(173): Homolog of NCBI NO: 11281127 NR Description: hypothetical protein T20O10.160 - Arabidopsis >gi|7573435|emb|CAB87751.1| putative protein [Arabidopsis
  misc_feature (1)..(173): Homolog of NCBI NO: 18412596 NR Description: expressed protein [Arabidopsis thaliana]
  misc_feature (1)..(174): Homolog of NCBI NO: 34908976 NR Description: putative circadian clock coupling factor ZGT
MMSDLQSSGSHSVDGSWRALGKLLIYCSGSSKGGLFNDVQISGHFVHRTRFSRTSGRSFLPPQCRTDDILYVSDPCEHLDQGEDGDLGFFRGIFKSFSMSKVRKLLIKKGTPFHPTEVCPYCKAKLWSMLQAKMIPQSASCRLGAYEDSIEYYVCLNGHMLGVCTLLPLSDSEGASEFQ

SEQ ID NO: 100561 - DNA, 1471 bp, Arabidopsis thaliana
  misc_feature (1)..(1471): Ceres Seq. ID no. 13605464
  misc_feature: MA Experiment ID: 20000180 Result: Down-regulated in Transcription
  misc_feature: MA Experiment 20000180 PARAMETER Experiment Name: At_Germinating_Seeds_P Parameter: Age (hr) Value: 24 vs. 0
  misc_feature: MA Experiment 20000180 PARAMETER Experiment Name: At_Germinating_Seeds_P Parameter: Tissue Value: Germinating Seeds
  misc_feature: MA Experiment ID: 20000264 Result: Down-regulated in Transcription
  misc_feature: MA Experiment 20000264 PARAMETER Experiment Name: At_Open_Flower_P Parameter: Age (day) Value: 21
  misc_feature: MA Experiment 20000264 PARAMETER Experiment Name: At_Open_Flower_P Parameter: Plant Line Value: WS
  misc_feature: MA Experiment 20000264 PARAMETER Experiment Name: At_Open_Flower_P Parameter: Tissue Value: Open Flower vs. Whole Plant
tgattcctgcgagaggagctaattctctctccttgggaagaagacgacgagcttaatacattcgacagtggagaatatcagattctttttggcgagggttggttgattccttcttattcatcagattaaggatcgtttccggtggctgaagagtaatagaaggaggaagaagaggagaggagaggtaaaaatgtcagacctagatcggcaaatagggcagcttaagcgatgcgaaccattgagcgaatcggaggtgaaggctctttgcctcaaagccatggaaattcttgttgaagagagtaatgttcagagagttgatgcccctgtcactttatgtggtgacatccatgggcagttctatgatatgatggagcttttcaaagttgggggtgattgtcctaagaccaactatttgtttatgggagattttgttgatcgtggatattattcggttgagacatttctacttctactcgcactcaaggttagatatccagaccgcataactctcatcagaggaaaccatgaaagcaggcaaatcacacaggtttatggattttatgatgagtgtttgcgtaaatatggctcttcaaatgtctggagatactgcaccgacatttttgactacatgagtctttcagctgttgtggagaacaagatattctgtgttcatggtggtctttctccagctattatgactcttgatcagattaggacaattgaccggaagcaagaagtaccacatgatggtgccatgtgtgatctcctatggtctgatcctgaagatattgttgatggctggggattgagccctcgtggtgccggattcctttttggtggcagtgttgtcacgtcttttaaccactcaaacaacatagactacatagcccgtgcccatcaactagttatggagggttacaaatggatgtttgatagccagattgtgacagtgtggtcagccccaaattactgttacagatgcggtaatgtggcttcaattctagagcttgacgagaatctaaataaagaattccgtgtgtttgatgcagcccagcaggactcgagagggcctcccgccaaaaagccggcccctgattacttcctataatgggcaaaacttcgaaaaccttattcccaaagtcgaactagcgtcaatattcaactccgttgaagaggaagagaattactattcgttcagtgtttaggttgcagtgcagaagaatatacaatagagttgtttcaggcgagctctacctaggccacaaagactgatcgaactggggttgtctaaaaaagatattgttgttgttgtttccggttttggtgtaactgtagtcaaaagagtgtttgtgtattggtagttaaagagtgattttgtcctgattcaagtttgtactttcttaggaggataagacctcaaacagttttggagctcacagttatatcaatagaattcacagggaagcattag

SEQ ID NO: 100562 - protein, 305 aa, Arabidopsis thaliana
  peptide (1)..(305): Ceres Seq. ID no. 13605465
  misc_feature (44)..(240): Pfam Name: Calcineurin-like phosphoesterase Pfam Description: Calcineurin-like phosphoesterase
  misc_feature (1)..(305): Homolog of NCBI NO: 15236841 NR Description: phosphoprotein phosphatase (PPX-1) [Arabidopsis
  misc_feature (1)..(305): Homolog of NCBI NO: 15240488 NR Description: serine/threonine protein phosphatase [Arabidopsis
  misc_feature (1)..(305): Homolog of NCBI NO: 629550 NR Description: phosphoprotein phosphatase (EC 3.1.3.16) X-2 EP128) - Arabidopsis thaliana >gi|397590|emb|CAA80312.1| protein
  misc_feature (1)..(305): Homolog of NCBI NO: 4506027 NR Description: protein phosphatase 4 (formerly X), catalytic Protein phosphatase 4, catalytic subunit [Homo sapiens] protein phosphatase 4, catalytic subunit; protein phosphatase X
  misc_feature (2)..(305): Homolog of NCBI NO: 5410609 NR Description: protein phosphatase 4 catalytic subunit discoideum] >gi|28829486|gb|AAO52019.1| similar to Dictyostelium (Slime mold). Protein phosphatase 4 catalytic subunit (EC
  misc_feature (1)..(305): Homolog of NCBI NO: 130788 NR Description: SERINE/THREONINE PROTEIN PHOSPHATASE 4 (PP4)
  misc_feature (1)..(305): Homolog of NCBI NO: 346323 NR Description: phosphoprotein phosphatase (EC 3.1.3.16) X
  misc_feature (1)..(305): Homolog of NCBI NO: 4101701 NR Description: serine/threonine phosphatase [Takifugu rubripes]
  misc_feature (2)..(305): Homolog of NCBI NO: 17864424 NR Description: Protein phosphatase 19C CG32505-PA [Drosophila
  misc_feature (1)..(153): Homolog of NCBI NO: 40746125 NR Description: hypothetical protein AN0103.2 [Aspergillus
MSDLDRQIGQLKRCEPLSESEVKALCLKAMEILVEESNVQRVDAPVTLCGDIHGQFYDMMELFKVGGDCPKTNYLFMGDFVDRGYYSVETFLLLLALKVRYPDRITLIRGNHESRQITQVYGFYDECLRKYGSSNVWRYCTDIFDYMSLSAVVENKIFCVHGGLSPAIMTLDQIRTIDRKQEVPHDGAMCDLLWSDPEDIVDGWGLSPRGAGFLFGGSVVTSFNHSNNIDYIARAHQLVMEGYKWMFDSQIVTVWSAPNYCYRCGNVASILELDENLNKEFRVFDAAQQDSRGPPAKKPAPDYFL

SEQ ID NO: 100563 - protein, 276 aa, Arabidopsis thaliana
  peptide (1)..(276): Ceres Seq. ID no. 13605466
  misc_feature (15)..(211): Pfam Name: Calcineurin-like phosphoesterase Pfam Description: Calcineurin-like phosphoesterase
  misc_feature (1)..(276): Homolog of NCBI NO: 15236841 NR Description: phosphoprotein phosphatase (PPX-1) [Arabidopsis
  misc_feature (1)..(276): Homolog of NCBI NO: 15240488 NR Description: serine/threonine protein phosphatase [Arabidopsis
  misc_feature (1)..(276): Homolog of NCBI NO: 629550 NR Description: phosphoprotein phosphatase (EC 3.1.3.16) X-2 EP128) - Arabidopsis thaliana >gi|397590|emb|CAA80312.1| protein
  misc_feature (1)..(276): Homolog of NCBI NO: 4506027 NR Description: protein phosphatase 4 (formerly X), catalytic Protein phosphatase 4, catalytic subunit [Homo sapiens] protein phosphatase 4, catalytic subunit; protein phosphatase X
  misc_feature (1)..(276): Homolog of NCBI NO: 5410609 NR Description: protein phosphatase 4 catalytic subunit discoideum] >gi|28829486|gb|AAO52019.1| similar to Dictyostelium (Slime mold). Protein phosphatase 4 catalytic subunit (EC
  misc_feature (1)..(276): Homolog of NCBI NO: 130788 NR Description: SERINE/THREONINE PROTEIN PHOSPHATASE 4 (PP4)
  misc_feature (1)..(276): Homolog of NCBI NO: 346323 NR Description: phosphoprotein phosphatase (EC 3.1.3.16) X
  misc_feature (1)..(276): Homolog of NCBI NO: 4101701 NR Description: serine/threonine phosphatase [Takifugu rubripes]
  misc_feature (1)..(276): Homolog of NCBI NO: 17864424 NR Description: Protein phosphatase 19C CG32505-PA [Drosophila
  misc_feature (1)..(124): Homolog of NCBI NO: 40746125 NR Description: hypothetical protein AN0103.2 [Aspergillus
MEILVEESNVQRVDAPVTLCGDIHGQFYDMMELFKVGGDCPKTNYLFMGDFVDRGYYSVETFLLLLALKVRYPDRITLIRGNHESRQITQVYGFYDECLRKYGSSNVWRYCTDIFDYMSLSAVVENKIFCVHGGLSPAIMTLDQIRTIDRKQEVPHDGAMCDLLWSDPEDIVDGWGLSPRGAGFLFGGSVVTSFNHSNNIDYIARAHQLVMEGYKWMFDSQIVTVWSAPNYCYRCGNVASILELDENLNKEFRVFDAAQQDSRGPPAKKPAPDYFL

SEQ ID NO: 100564 - protein, 247 aa, Arabidopsis thaliana
  peptide (1)..(247): Ceres Seq. ID no. 13605467
  misc_feature (1)..(182): Pfam Name: Calcineurin-like phosphoesterase Pfam Description: Calcineurin-like phosphoesterase
  misc_feature (1)..(247): Homolog of NCBI NO: 15236841 NR Description: phosphoprotein phosphatase (PPX-1) [Arabidopsis
  misc_feature (1)..(247): Homolog of NCBI NO: 15240488 NR Description: serine/threonine protein phosphatase [Arabidopsis
  misc_feature (1)..(247): Homolog of NCBI NO: 629550 NR Description: phosphoprotein phosphatase (EC 3.1.3.16) X-2 EP128) - Arabidopsis thaliana >gi|397590|emb|CAA80312.1| protein
  misc_feature (1)..(247): Homolog of NCBI NO: 4506027 NR Description: protein phosphatase 4 (formerly X), catalytic Protein phosphatase 4, catalytic subunit [Homo sapiens] protein phosphatase 4, catalytic subunit; protein phosphatase X
  misc_feature (1)..(247): Homolog of NCBI NO: 5410609 NR Description: protein phosphatase 4 catalytic subunit discoideum] >gi|28829486|gb|AAO52019.1| similar to Dictyostelium (Slime mold). Protein phosphatase 4 catalytic subunit (EC
  misc_feature (1)..(247): Homolog of NCBI NO: 130788 NR Description: SERINE/THREONINE PROTEIN PHOSPHATASE 4 (PP4)
  misc_feature (1)..(247): Homolog of NCBI NO: 346323 NR Description: phosphoprotein phosphatase (EC 3.1.3.16) X
  misc_feature (1)..(247): Homolog of NCBI NO: 4101701 NR Description: serine/threonine phosphatase [Takifugu rubripes]
  misc_feature (1)..(247): Homolog of NCBI NO: 17864424 NR Description: Protein phosphatase 19C CG32505-PA [Drosophila
  misc_feature (1)..(95): Homolog of NCBI NO: 40746125 NR Description: hypothetical protein AN0103.2 [Aspergillus
MMELFKVGGDCPKTNYLFMGDFVDRGYYSVETFLLLLALKVRYPDRITLIRGNHESRQITQVYGFYDECLRKYGSSNVWRYCTDIFDYMSLSAVVENKIFCVHGGLSPAIMTLDQIRTIDRKQEVPHDGAMCDLLWSDPEDIVDGWGLSPRGAGFLFGGSVVTSFNHSNNIDYIARAHQLVMEGYKWMFDSQIVTVWSAPNYCYRCGNVASILELDENLNKEFRVFDAAQQDSRGPPAKKPAPDYFL

SEQ ID NO: 100565 - DNA, 1008 bp, Arabidopsis thaliana
  misc_feature (1)..(1008): Ceres Seq. ID no. 13605487
  misc_feature: MA Experiment ID: 20000184 Result: Down-regulated in Transcription
  misc_feature: MA Experiment 20000184 PARAMETER Experiment Name: At_Shoots__P Parameter: Age (day) Value: 7
  misc_feature: MA Experiment 20000184 PARAMETER Experiment Name: At_Shoots__P Parameter: Tissue Value: Shoots vs. Whole Plant
  misc_feature: MA Experiment ID: 20000234 Result: Up-regulated in Transcription
  misc_feature: MA Experiment 20000234 PARAMETER Experiment Name: At_Siliques_P Parameter: Age (day) Value: 21
  misc_feature: MA Experiment 20000234 PARAMETER Experiment Name: At_Siliques_P Parameter: Organism Value: A. thaliana
  misc_feature: MA Experiment 20000234 PARAMETER Experiment Name: At_Siliques_P Parameter: Plant Line Value: WS
  misc_feature: MA Experiment 20000234 PARAMETER Experiment Name: At_Siliques_P Parameter: Tissue Value: Less Than 5mm Siliques vs. Whole Plant
  misc_feature: MA Experiment ID: 20000573 Result: Down-regulated in Transcription
  misc_feature: MA Experiment 20000573 PARAMETER Experiment Name: At_100uM_ABA_Mutants__P Parameter: Organism Value: A. thaliana
  misc_feature: MA Experiment 20000573 PARAMETER Experiment Name: At_100uM_ABA_Mutants__P Parameter: Plant Line Value: CS22 vs. Ler wt
  misc_feature: MA Experiment 20000573 PARAMETER Experiment Name: At_100uM_ABA_Mutants__P Parameter: Timepoint (hr) Value: N/A
  misc_feature: MA Experiment 20000573 PARAMETER Experiment Name: At_100uM_ABA_Mutants__P Parameter: Tissue Value: Whole Plant
  misc_feature: MA Experiment 20000573 PARAMETER Experiment Name: At_100uM_ABA_Mutants__P Parameter: Treatment Value: None
  misc_feature: MA Experiment ID: 20001451 Result: Down-regulated in Transcription
  misc_feature: MA Experiment 20001451 PARAMETER Experiment Name: At_Far-red-induction_P Parameter: Age (day) Value: 7
  misc_feature: MA Experiment 20001451 PARAMETER Experiment Name: At_Far-red-induction_P Parameter: Light Value: Far-red vs. White
  misc_feature: MA Experiment 20001451 PARAMETER Experiment Name: At_Far-red-induction_P Parameter: Organism Value: A. thaliana
  misc_feature: MA Experiment 20001451 PARAMETER Experiment Name: At_Far-red-induction_P Parameter: Plant Line Value: Columbia
  misc_feature: MA Experiment 20001451 PARAMETER Experiment Name: At_Far-red-induction_P Parameter: Timepoint (hr) Value: 24
  misc_feature: MA Experiment 20001451 PARAMETER Experiment Name: At_Far-red-induction_P Parameter: Tissue Value: Whole Plant
  misc_feature: MA Experiment ID: 20001556 Result: Up-regulated in Transcription
  misc_feature: MA Experiment 20001556 PARAMETER Experiment Name: At_Drought_Soil_Dry_P Parameter: Age (day) Value: 26
  misc_feature: MA Experiment 20001556 PARAMETER Experiment Name: At_Drought_Soil_Dry_P Parameter: Organism Value: A. thaliana
  misc_feature: MA Experiment 20001556 PARAMETER Experiment Name: At_Drought_Soil_Dry_P Parameter: Plant Line Value: WS
  misc_feature: MA Experiment 20001556 PARAMETER Experiment Name: At_Drought_Soil_Dry_P Parameter: Post Timepoint (hr) Value: None
  misc_feature: MA Experiment 20001556 PARAMETER Experiment Name: At_Drought_Soil_Dry_P Parameter: Post-Treatment Value: None
  misc_feature: MA Experiment 20001556 PARAMETER Experiment Name: At_Drought_Soil_Dry_P Parameter: Timepoint (day) Value: 12
  misc_feature: MA Experiment 20001556 PARAMETER Experiment Name: At_Drought_Soil_Dry_P Parameter: Treatment Value: Drought vs. No Drought
  misc_feature: MA Experiment ID: 20001558 Result: Up-regulated in Transcription
  misc_feature: MA Experiment 20001558 PARAMETER Experiment Name: At_Drought_Soil_Dry_P Parameter: Age (day) Value: 27
  misc_feature: MA Experiment 20001558 PARAMETER Experiment Name: At_Drought_Soil_Dry_P Parameter: Organism Value: A. thaliana
  misc_feature: MA Experiment 20001558 PARAMETER Experiment Name: At_Drought_Soil_Dry_P Parameter: Plant Line Value: WS
  misc_feature: MA Experiment 20001558 PARAMETER Experiment Name: At_Drought_Soil_Dry_P Parameter: Post Timepoint (hr) Value: 6
  misc_feature: MA Experiment 20001558 PARAMETER Experiment Name: At_Drought_Soil_Dry_P Parameter: Post-Treatment Value: Re-Water vs. No Drought
  misc_feature: MA Experiment 20001558 PARAMETER Experiment Name: At_Drought_Soil_Dry_P Parameter: Timepoint (day) Value: 13
  misc_feature: MA Experiment 20001558 PARAMETER Experiment Name: At_Drought_Soil_Dry_P Parameter: Treatment Value: Drought vs. No Drought
  misc_feature: MA Experiment ID: 20001911 Result: Up-regulated in Transcription
  misc_feature: MA Experiment 20001911 PARAMETER Experiment Name: At_Drought_Reproduction_P Parameter: Age (day) Value: 40
  misc_feature: MA Experiment 20001911 PARAMETER Experiment Name: At_Drought_Reproduction_P Parameter: Organism Value: A. thaliana
  misc_feature: MA Experiment 20001911 PARAMETER Experiment Name: At_Drought_Reproduction_P Parameter: Plant Line Value: WS
  misc_feature: MA Experiment 20001911 PARAMETER Experiment Name: At_Drought_Reproduction_P Parameter: Timepoint (day) Value: 10
  misc_feature: MA Experiment 20001911 PARAMETER Experiment Name: At_Drought_Reproduction_P Parameter: Tissue Value: Flowers
  misc_feature: MA Experiment 20001911 PARAMETER Experiment Name: At_Drought_Reproduction_P Parameter: Treatment Value: Drought vs. No Drought
atgatgtcatgtggtgggaagaagccagtgtctaagaaaacaacgccgtgttgcacgaagatggggatgaagagaggaccatggacggtggaggaagacgagattcttgtgagcttcattaagaaagaaggtgaaggacggtggcgatcgcttcctaagagagctggtttactcagatgtggaaagagctgtcgtctacggtggatgaactatctccgaccctcggttaaacgtggaggaattacgtcggacgaggaagatctcatcctccgtcttcaccgcctcctcggcaacaggtggtcattgatcgcgggaaggataccgggaaggactgataatgaaattaagaactattggaacactcatcttcgtaagaaacttttaaggcaaggaattgatcctcaaacccacaagcctcttgatgcaaacaacatccataaaccagaagaagaagtttccggtggacaaaagtaccctctagagcctatttctagttctcatactgatgataccactgttaatggcggggatggagatagcaagaacagtatcaatgtctttggtggtgaacacggctacgaagactttggtttctgctacgacgacaagttctcatcgtttcttaattcgctcatcaacgatgttggtgatccttttggtaatattatcccaatatctcaacctttgcagatggatgattgtaaggatgggattgttggagcgtcgtcttctagcttaggacatgactagatacaggaagatatatagttgatcgaatcttgatgtcttctatatctaccatgcttcaagaaggggtcacagatgcgatctagaaggttggcatatatgtgtactaagttgttttgtggtgatttgtgtgattattataaaaccataaattgtgagtgtaactgagtacacaaacctctatttatatatatggatatatctattgcgaataaatgaatcatcactatcgttaaataagactcgtggtaagcttttgtc

SEQ ID NO: 100566 - protein, 249 aa, Arabidopsis thaliana
  peptide (1)..(249): Ceres Seq. ID no. 13605488
  misc_feature (25)..(72): Pfam Name: Myb-like DNA-binding domain Pfam Description: Myb-like DNA-binding domain
  misc_feature (1)..(249): Homolog of NCBI NO: 15231271 NR Description: myb-related protein 5 [Arabidopsis thaliana]
  misc_feature (7)..(227): Homolog of NCBI NO: 13346178 NR Description: BNLGHi233 [Gossypium hirsutum]
  misc_feature (7)..(202): Homolog of NCBI NO: 7438353 NR Description: myb-related protein 4 - rice
  misc_feature (7)..(146): Homolog of NCBI NO: 19072770 NR Description: typical P-type R2R3 Myb protein [Oryza sativa]
  misc_feature (16)..(158): Homolog of NCBI NO: 1101770 NR Description: MYB-like transcriptional factor MBF1
  misc_feature (15)..(147): Homolog of NCBI NO: 15233066 NR Description: myb DNA-binding protein (MYB17) [Arabidopsis
  misc_feature (15)..(140): Homolog of NCBI NO: 7438344 NR Description: myb-related protein 1 - rice
  misc_feature (15)..(174): Homolog of NCBI NO: 28628961 NR Description: MYB8 [Dendrobium sp. XMW-2002-8]
  misc_feature (15)..(144): Homolog of NCBI NO: 34907282 NR Description: putative myb-related protein [Oryza sativa
  misc_feature (15)..(166): Homolog of NCBI NO: 11273985 NR Description: myb-related transcription factor MYB4 [imported] Arabidopsis thaliana >gi|3941412|gb|AAC83582.1| putative
MMSCGGKKPVSKKTTPCCTKMGMKRGPWTVEEDEILVSFIKKEGEGRWRSLPKRAGLLRCGKSCRLRWMNYLRPSVKRGGITSDEEDLILRLHRLLGNRWSLIAGRIPGRTDNEIKNYWNTHLRKKLLRQGIDPQTHKPLDANNIHKPEEEVSGGQKYPLEPISSSHTDDTTVNGGDGDSKNSINVFGGEHGYEDFGFCYDDKFSSFLNSLINDVGDPFGNIIPISQPLQMDDCKDGIVGASSSSLGHD

SEQ ID NO: 100567 - protein, 248 aa, Arabidopsis thaliana
  peptide (1)..(248): Ceres Seq. ID no. 13605489
  misc_feature (24)..(71): Pfam Name: Myb-like DNA-binding domain Pfam Description: Myb-like DNA-binding domain
  misc_feature (1)..(248): Homolog of NCBI NO: 15231271 NR Description: myb-related protein 5 [Arabidopsis thaliana]
  misc_feature (6)..(226): Homolog of NCBI NO: 13346178 NR Description: BNLGHi233 [Gossypium hirsutum]
  misc_feature (6)..(201): Homolog of NCBI NO: 7438353 NR Description: myb-related protein 4 - rice
  misc_feature (6)..(145): Homolog of NCBI NO: 19072770 NR Description: typical P-type R2R3 Myb protein [Oryza sativa]
  misc_feature (15)..(157): Homolog of NCBI NO: 1101770 NR Description: MYB-like transcriptional factor MBF1
  misc_feature (14)..(146): Homolog of NCBI NO: 15233066 NR Description: myb DNA-binding protein (MYB17) [Arabidopsis
  misc_feature (14)..(139): Homolog of NCBI NO: 7438344 NR Description: myb-related protein 1 - rice
  misc_feature (14)..(173): Homolog of NCBI NO: 28628961 NR Description: MYB8 [Dendrobium sp. XMW-2002-8]
  misc_feature (14)..(143): Homolog of NCBI NO: 34907282 NR Description: putative myb-related protein [Oryza sativa
  misc_feature (14)..(165): Homolog of NCBI NO: 11273985 NR Description: myb-related transcription factor MYB4 [imported] Arabidopsis thaliana >gi|3941412|gb|AAC83582.1| putative
MSCGGKKPVSKKTTPCCTKMGMKRGPWTVEEDEILVSFIKKEGEGRWRSLPKRAGLLRCGKSCRLRWMNYLRPSVKRGGITSDEEDLILRLHRLLGNRWSLIAGRIPGRTDNEIKNYWNTHLRKKLLRQGIDPQTHKPLDANNIHKPEEEVSGGQKYPLEPISSSHTDDTTVNGGDGDSKNSINVFGGEHGYEDFGFCYDDKFSSFLNSLINDVGDPFGNIIPISQPLQMDDCKDGIVGASSSSLGHD

SEQ ID NO: 100568 - protein, 229 aa, Arabidopsis thaliana
  peptide (1)..(229): Ceres Seq. ID no. 13605490
  misc_feature (5)..(52): Pfam Name: Myb-like DNA-binding domain Pfam Description: Myb-like DNA-binding domain
  misc_feature (1)..(229): Homolog of NCBI NO: 15231271 NR Description: myb-related protein 5 [Arabidopsis thaliana]
  misc_feature (1)..(207): Homolog of NCBI NO: 13346178 NR Description: BNLGHi233 [Gossypium hirsutum]
  misc_feature (1)..(182): Homolog of NCBI NO: 7438353 NR Description: myb-related protein 4 - rice
  misc_feature (1)..(126): Homolog of NCBI NO: 19072770 NR Description: typical P-type R2R3 Myb protein [Oryza sativa]
  misc_feature (1)..(138): Homolog of NCBI NO: 1101770 NR Description: MYB-like transcriptional factor MBF1
  misc_feature (1)..(127): Homolog of NCBI NO: 15233066 NR Description: myb DNA-binding protein (MYB17) [Arabidopsis
  misc_feature (1)..(120): Homolog of NCBI NO: 7438344 NR Description: myb-related protein 1 - rice
  misc_feature (1)..(154): Homolog of NCBI NO: 28628961 NR Description: MYB8 [Dendrobium sp. XMW-2002-8]
  misc_feature (1)..(124): Homolog of NCBI NO: 34907282 NR Description: putative myb-related protein [Oryza sativa
  misc_feature (1)..(146): Homolog of NCBI NO: 11273985 NR Description: myb-related transcription factor MYB4 [imported] Arabidopsis thaliana >gi|3941412|gb|AAC83582.1| putative
MGMKRGPWTVEEDEILVSFIKKEGEGRWRSLPKRAGLLRCGKSCRLRWMNYLRPSVKRGGITSDEEDLILRLHRLLGNRWSLIAGRIPGRTDNEIKNYWNTHLRKKLLRQGIDPQTHKPLDANNIHKPEEEVSGGQKYPLEPISSSHTDDTTVNGGDGDSKNSINVFGGEHGYEDFGFCYDDKFSSFLNSLINDVGDPFGNIIPISQPLQMDDCKDGIVGASSSSLGHD

SEQ ID NO: 100569 - DNA, 1911 bp, Arabidopsis thaliana
  misc_feature (1)..(1911): Ceres Seq. ID no. 13605495
  misc_feature: MA Experiment ID: 20000166 Result: Down-regulated in Transcription
  misc_feature: MA Experiment 20000166 PARAMETER Experiment Name: At_100uM_ABA_P Parameter: Age (day) Value: 14
  misc_feature: MA Experiment 20000166 PARAMETER Experiment Name: At_100uM_ABA_P Parameter: Organism Value: A. thaliana
  misc_feature: MA Experiment 20000166 PARAMETER Experiment Name: At_100uM_ABA_P Parameter: Plant Line Value: WS
  misc_feature: MA Experiment 20000166 PARAMETER Experiment Name: At_100uM_ABA_P Parameter: Timepoint (hr) Value: 1
  misc_feature: MA Experiment 20000166 PARAMETER Experiment Name: At_100uM_ABA_P Parameter: Tissue Value: Aerial
  misc_feature: MA Experiment 20000166 PARAMETER Experiment Name: At_100uM_ABA_P Parameter: Treatment Value: 100uM ABA vs. No Treatment
  misc_feature: MA Experiment ID: 20000234 Result: Down-regulated in Transcription
  misc_feature: MA Experiment 20000234 PARAMETER Experiment Name: At_Siliques_P Parameter: Age (day) Value: 21
  misc_feature: MA Experiment 20000234 PARAMETER Experiment Name: At_Siliques_P Parameter: Organism Value: A. thaliana
  misc_feature: MA Experiment 20000234 PARAMETER Experiment Name: At_Siliques_P Parameter: Plant Line Value: WS
  misc_feature: MA Experiment 20000234 PARAMETER Experiment Name: At_Siliques_P Parameter: Tissue Value: Less Than 5mm Siliques vs. Whole Plant
  misc_feature: MA Experiment ID: 20000438 Result: Down-regulated in Transcription
  misc_feature: MA Experiment 20000438 PARAMETER Experiment Name: At_Shoots__P Parameter: Age (day) Value: 14
  misc_feature: MA Experiment 20000438 PARAMETER Experiment Name: At_Shoots__P Parameter: Tissue Value: Shoots vs. Whole Plant
  misc_feature: MA Experiment ID: 20000453 Result: Down-regulated in Transcription
  misc_feature: MA Experiment 20000453 PARAMETER Experiment Name: At_100uM_ABA_P Parameter: Age (day) Value: 15
  misc_feature: MA Experiment 20000453 PARAMETER Experiment Name: At_100uM_ABA_P Parameter: Organism Value: A. thaliana
  misc_feature: MA Experiment 20000453 PARAMETER Experiment Name: At_100uM_ABA_P Parameter: Plant Line Value: WS
  misc_feature: MA Experiment 20000453 PARAMETER Experiment Name: At_100uM_ABA_P Parameter: Timepoint (hr) Value: 24
  misc_feature: MA Experiment 20000453 PARAMETER Experiment Name: At_100uM_ABA_P Parameter: Tissue Value: Aerial
  misc_feature: MA Experiment 20000453 PARAMETER Experiment Name: At_100uM_ABA_P Parameter: Treatment Value: 100uM ABA vs. No Treatment
  misc_feature: MA Experiment ID: 20000496 Result: Down-regulated in Transcription
  misc_feature: MA Experiment 20000496 PARAMETER Experiment Name: At_Guard_Cells_P Parameter: Harvest Date Value: 7/19/2002
  misc_feature: MA Experiment 20000496 PARAMETER Experiment Name: At_Guard_Cells_P Parameter: Organism Value: Canola
  misc_feature: MA Experiment 20000496 PARAMETER Experiment Name: At_Guard_Cells_P Parameter: Tissue Value: Guard Cells vs. Leaves
  misc_feature: MA Experiment ID: 20000794 Result: Down-regulated in Transcription
  misc_feature: MA Experiment 20000794 PARAMETER Experiment Name: At_Petals_P Parameter: Age (day) Value: 23-25 days
  misc_feature: MA Experiment 20000794 PARAMETER Experiment Name: At_Petals_P Parameter: Plant Line Value: WS
  misc_feature: MA Experiment 20000794 PARAMETER Experiment Name: At_Petals_P Parameter: Tissue Value: Petals vs. Whole plant
  misc_feature: MA Experiment ID: 20001451 Result: Down-regulated in Transcription
  misc_feature: MA Experiment 20001451 PARAMETER Experiment Name: At_Far-red-induction_P Parameter: Age (day) Value: 7
  misc_feature: MA Experiment 20001451 PARAMETER Experiment Name: At_Far-red-induction_P Parameter: Light Value: Far-red vs. White
  misc_feature: MA Experiment 20001451 PARAMETER Experiment Name: At_Far-red-induction_P Parameter: Organism Value: A. thaliana
  misc_feature: MA Experiment 20001451 PARAMETER Experiment Name: At_Far-red-induction_P Parameter: Plant Line Value: Columbia
  misc_feature: MA Experiment 20001451 PARAMETER Experiment Name: At_Far-red-induction_P Parameter: Timepoint (hr) Value: 24
  misc_feature: MA Experiment 20001451 PARAMETER Experiment Name: At_Far-red-induction_P Parameter: Tissue Value: Whole Plant
  misc_feature: MA Experiment ID: 20001560 Result: Down-regulated in Transcription
  misc_feature: MA Experiment 20001560 PARAMETER Experiment Name: At_Drought_Soil_Dry_P Parameter: Age (day) Value: 28
  misc_feature: MA Experiment 20001560 PARAMETER Experiment Name: At_Drought_Soil_Dry_P Parameter: Organism Value: A. thaliana
  misc_feature: MA Experiment 20001560 PARAMETER Experiment Name: At_Drought_Soil_Dry_P Parameter: Plant Line Value: WS
  misc_feature: MA Experiment 20001560 PARAMETER Experiment Name: At_Drought_Soil_Dry_P Parameter: Post Timepoint (hr) Value: None
  misc_feature: MA Experiment 20001560 PARAMETER Experiment Name: At_Drought_Soil_Dry_P Parameter: Post-Treatment Value: None
  misc_feature: MA Experiment 20001560 PARAMETER Experiment Name: At_Drought_Soil_Dry_P Parameter: Timepoint (day) Value: 14
  misc_feature: MA Experiment 20001560 PARAMETER Experiment Name: At_Drought_Soil_Dry_P Parameter: Treatment Value: Drought vs. No Drought
  misc_feature: MA Experiment ID: 20001904 Result: Down-regulated in Transcription
  misc_feature: MA Experiment 20001904 PARAMETER Experiment Name: At_Drought_Reproduction_P Parameter: Age (day) Value: 37
  misc_feature: MA Experiment 20001904 PARAMETER Experiment Name: At_Drought_Reproduction_P Parameter: Organism Value: A. thaliana
  misc_feature: MA Experiment 20001904 PARAMETER Experiment Name: At_Drought_Reproduction_P Parameter: Plant Line Value: WS
  misc_feature: MA Experiment 20001904 PARAMETER Experiment Name: At_Drought_Reproduction_P Parameter: Timepoint (day) Value: 7
  misc_feature: MA Experiment 20001904 PARAMETER Experiment Name: At_Drought_Reproduction_P Parameter: Tissue Value: Rosettes
  misc_feature: MA Experiment 20001904 PARAMETER Experiment Name: At_Drought_Reproduction_P Parameter: Treatment Value: Drought vs. No Drought
  misc_feature: MA Experiment ID: 20001906 Result: Down-regulated in Transcription
  misc_feature: MA Experiment 20001906 PARAMETER Experiment Name: At_Drought_Reproduction_P Parameter: Age (day) Value: 35
  misc_feature: MA Experiment 20001906 PARAMETER Experiment Name: At_Drought_Reproduction_P Parameter: Organism Value: A. thaliana
  misc_feature: MA Experiment 20001906 PARAMETER Experiment Name: At_Drought_Reproduction_P Parameter: Plant Line Value: WS
  misc_feature: MA Experiment 20001906 PARAMETER Experiment Name: At_Drought_Reproduction_P Parameter: Timepoint (day) Value: 5
  misc_feature: MA Experiment 20001906 PARAMETER Experiment Name: At_Drought_Reproduction_P Parameter: Tissue Value: Siliques
  misc_feature: MA Experiment 20001906 PARAMETER Experiment Name: At_Drought_Reproduction_P Parameter: Treatment Value: Drought vs. No Drought
gaaagaaagtcccaaaaacaaaaaaccaattttaaaaaacacaaacccattcgtgcgtctctggctaattaagttaaaacactaatggacacttcttcttcacttttgttcttctccttcttcttctttatcatcatcgtcatcttcaacaagatcaacggtctcagatcatccccagcttcaaagaaaaaacttaatgatcatcatgttacatcccagagtcacggaccaaagtttccacacggaagcttgggatggcccgtcatcggtgaaaccatcgagttcgtctcttctgcttactcagaccgtcctgagagtttcatggacaagcgtcgtctcatgtatgggagagtgtttaagtcgcatatttttggaacggcgacgatcgtgtcgacggatgctgaagtgaacagagccgttttacagagcgactcgacagctttcgtgccgttttacccaaaaacggtaagggagctaatgggaaaatcgtcgatacttcttatcaacgggagtttacatagacggttccatggattagtcggttctttcttaaagtcgccacttctcaaagctcaaatcgttagagacatgcacaagtttttgtcggaatccatggatctatggtccgaggaccaacctgtgctcctccaagacgtctccaagactgttgcattcaaagtacttgccaaggcattgataagtgtagagaaaggagaagatttagaagagctaaagagagagtttgaaaatttcatatcaggactcatgtcattaccaattaacttccctggaacgcaactccatagatctctccaagctaagaagaatatggtgaagcaagttgaaagaatcatagaaggcaaaattaggaaaacaaagaacaaggaggaagatgatgttattgcaaaggatgttgtggatgtgttgcttaaggactcaagtgaacatttaactcacaatttgattgctaacaatatgatcgacatgatgatccctggccacgattctgtccctgtcctcattacccttgccgtcaaattcctctctgattctcctgctgccctcaatctcctaacggaagaaaacatgaagctgaaaagtttgaaggaattgacaggagagccactatattggaatgactacttgtcgttaccttttacacaaaaggtgattacagagacactgagaatgggaaatgttataattggagtgatgagaaaggcgatgaaagatgttgaaataaaaggatatgtgataccaaaaggatggtgtttcttggcctatctcagatcagttcatcttgataagctttattatgagtctccctacaaatttaatccctggagatggcaagaaagggacatgaacacgagtagtttcagtccttttggaggtggtcagagattgtgccctggtctcgatttggctcgtcttgaaacttcagtttttcttcaccatcttgtcactcgcttcagatggatagcagaagaagacacaatcataaacttcccaacggtgcatatgaagaacaaattacccatttggatcaaaagaatataaatcatttttcttaagtgaaaaatggagaatcagttttgcattatcaaactctaaaaggttaaagaagtcacacgagtgttttgtaagtgggaagtgaaaaagatagtgagacagcaaaaggtaagaaaaaaagagaacatgatggagtttggagacaaaaaatgattcacacgtgtggaagacgatagcacacatgccaactattttgtcgtattccttcacaaggcaaataaggacagaatcacaaaacctttttgttgaccgtatatatatatatatatatattttttttttttgaagtacaaaggtgtatgataattatgcatatgatatagaatcctaattttcatg

SEQ ID NO: 100570 - protein, 491 aa, Arabidopsis thaliana
  peptide (1)..(491): Ceres Seq. ID no. 13605496
  misc_feature (1)..(491): Homolog of NCBI NO: 18400142 NR Description: cytochrome P450, putative (CYP90D) [Arabidopsis >gi|14971017|dbj|BAB62109.1| CYP90D [Arabidopsis thaliana]
  misc_feature (1)..(464): Homolog of NCBI NO: 9294019 NR Description: cytochrome P450-like protein [Arabidopsis
  misc_feature (50)..(486): Homolog of NCBI NO: 34903584 NR Description: cytochrome P450-like protein [Oryza sativa
  misc_feature (33)..(491): Homolog of NCBI NO: 13878393 NR Description: Cytochrome P450 90C1 (ROTUNDIFOLIA3)
  misc_feature (33)..(491): Homolog of NCBI NO: 18419825 NR Description: rotundifolia3 (rot3) [Arabidopsis thaliana]
  misc_feature (52)..(491): Homolog of NCBI NO: 25282635 NR Description: cytochrome P450 like protein [imported] - thaliana >gi|4006922|emb|CAB16850.1| cytochrome P450 like protein thaliana] >gi|7270586|emb|CAB80304.1| cytochrome P450 like
  misc_feature (52)..(490): Homolog of NCBI NO: 15239203 NR Description: cytochrome p450 90A1 [Arabidopsis thaliana]
  misc_feature (50)..(490): Homolog of NCBI NO: 9587211 NR Description: cytochrome P450 [Vigna radiata]
  misc_feature (239)..(491): Homolog of NCBI NO: 2935342 NR Description: steroid 22-alpha-hydroxylase; DWF4; CYP90B1
  misc_feature (239)..(491): Homolog of NCBI NO: 15229822 NR Description: steroid 22-alpha-hydroxylase (CYP90B1) (DWF4)
MDTSSSLLFFSFFFFIIIVIFNKINGLRSSPASKKKLNDHHVTSQSHGPKFPHGSLGWPVIGETIEFVSSAYSDRPESFMDKRRLMYGRVFKSHIFGTATIVSTDAEVNRAVLQSDSTAFVPFYPKTVRELMGKSSILLINGSLHRRFHGLVGSFLKSPLLKAQIVRDMHKFLSESMDLWSEDQPVLLQDVSKTVAFKVLAKALISVEKGEDLEELKREFENFISGLMSLPINFPGTQLHRSLQAKKNMVKQVERIIEGKIRKTKNKEEDDVIAKDVVDVLLKDSSEHLTHNLIANNMIDMMIPGHDSVPVLITLAVKFLSDSPAALNLLTEENMKLKSLKELTGEPLYWNDYLSLPFTQKVITETLRMGNVIIGVMRKAMKDVEIKGYVIPKGWCFLAYLRSVHLDKLYYESPYKFNPWRWQERDMNTSSFSPFGGGQRLCPGLDLARLETSVFLHHLVTRFRWIAEEDTIINFPTVHMKNKLPIWIKRI

SEQ ID NO: 100571 - protein, 412 aa, Arabidopsis thaliana
  peptide (1)..(412): Ceres Seq. ID no. 13605497
  misc_feature (1)..(412): Homolog of NCBI NO: 18400142 NR Description: cytochrome P450, putative (CYP90D) [Arabidopsis >gi|14971017|dbj|BAB62109.1| CYP90D [Arabidopsis thaliana]
  misc_feature (1)..(385): Homolog of NCBI NO: 9294019 NR Description: cytochrome P450-like protein [Arabidopsis
  misc_feature (1)..(407): Homolog of NCBI NO: 34903584 NR Description: cytochrome P450-like protein [Oryza sativa
  misc_feature (1)..(412): Homolog of NCBI NO: 13878393 NR Description: Cytochrome P450 90C1 (ROTUNDIFOLIA3)
  misc_feature (1)..(412): Homolog of NCBI NO: 18419825 NR Description: rotundifolia3 (rot3) [Arabidopsis thaliana]
  misc_feature (1)..(412): Homolog of NCBI NO: 25282635 NR Description: cytochrome P450 like protein [imported] - thaliana >gi|4006922|emb|CAB16850.1| cytochrome P450 like protein thaliana] >gi|7270586|emb|CAB80304.1| cytochrome P450 like
  misc_feature (1)..(411): Homolog of NCBI NO: 15239203 NR Description: cytochrome p450 90A1 [Arabidopsis thaliana]
  misc_feature (1)..(411): Homolog of NCBI NO: 9587211 NR Description: cytochrome P450 [Vigna radiata]
  misc_feature (160)..(412): Homolog of NCBI NO: 2935342 NR Description: steroid 22-alpha-hydroxylase; DWF4; CYP90B1
  misc_feature (160)..(412): Homolog of NCBI NO: 15229822 NR Description: steroid 22-alpha-hydroxylase (CYP90B1) (DWF4)
MDKRRLMYGRVFKSHIFGTATIVSTDAEVNRAVLQSDSTAFVPFYPKTVRELMGKSSILLINGSLHRRFHGLVGSFLKSPLLKAQIVRDMHKFLSESMDLWSEDQPVLLQDVSKTVAFKVLAKALISVEKGEDLEELKREFENFISGLMSLPINFPGTQLHRSLQAKKNMVKQVERIIEGKIRKTKNKEEDDVIAKDVVDVLLKDSSEHLTHNLIANNMIDMMIPGHDSVPVLITLAVKFLSDSPAALNLLTEENMKLKSLKELTGEPLYWNDYLSLPFTQKVITETLRMGNVIIGVMRKAMKDVEIKGYVIPKGWCFLAYLRSVHLDKLYYESPYKFNPWRWQERDMNTSSFSPFGGGQRLCPGLDLARLETSVFLHHLVTRFRWIAEEDTIINFPTVHMKNKLPIWIKRI

SEQ ID NO: 100572 - protein, 406 aa, Arabidopsis thaliana
  peptide (1)..(406): Ceres Seq. ID no. 13605498
  misc_feature (1)..(406): Homolog of NCBI NO: 18400142 NR Description: cytochrome P450, putative (CYP90D) [Arabidopsis >gi|14971017|dbj|BAB62109.1| CYP90D [Arabidopsis thaliana]
  misc_feature (1)..(379): Homolog of NCBI NO: 9294019 NR Description: cytochrome P450-like protein [Arabidopsis
  misc_feature (1)..(401): Homolog of NCBI NO: 34903584 NR Description: cytochrome P450-like protein [Oryza sativa
  misc_feature (1)..(406): Homolog of NCBI NO: 13878393 NR Description: Cytochrome P450 90C1 (ROTUNDIFOLIA3)
  misc_feature (1)..(406): Homolog of NCBI NO: 18419825 NR Description: rotundifolia3 (rot3) [Arabidopsis thaliana]
  misc_feature (1)..(406): Homolog of NCBI NO: 25282635 NR Description: cytochrome P450 like protein [imported] - thaliana >gi|4006922|emb|CAB16850.1| cytochrome P450 like protein thaliana] >gi|7270586|emb|CAB80304.1| cytochrome P450 like
  misc_feature (1)..(405): Homolog of NCBI NO: 15239203 NR Description: cytochrome p450 90A1 [Arabidopsis thaliana]
  misc_feature (1)..(405): Homolog of NCBI NO: 9587211 NR Description: cytochrome P450 [Vigna radiata]
  misc_feature (154)..(406): Homolog of NCBI NO: 2935342 NR Description: steroid 22-alpha-hydroxylase; DWF4; CYP90B1
  misc_feature (154)..(406): Homolog of NCBI NO: 15229822 NR Description: steroid 22-alpha-hydroxylase (CYP90B1) (DWF4)
MYGRVFKSHIFGTATIVSTDAEVNRAVLQSDSTAFVPFYPKTVRELMGKSSILLINGSLHRRFHGLVGSFLKSPLLKAQIVRDMHKFLSESMDLWSEDQPVLLQDVSKTVAFKVLAKALISVEKGEDLEELKREFENFISGLMSLPINFPGTQLHRSLQAKKNMVKQVERIIEGKIRKTKNKEEDDVIAKDVVDVLLKDSSEHLTHNLIANNMIDMMIPGHDSVPVLITLAVKFLSDSPAALNLLTEENMKLKSLKELTGEPLYWNDYLSLPFTQKVITETLRMGNVIIGVMRKAMKDVEIKGYVIPKGWCFLAYLRSVHLDKLYYESPYKFNPWRWQERDMNTSSFSPFGGGQRLCPGLDLARLETSVFLHHLVTRFRWIAEEDTIINFPTVHMKNKLPIWIKRI

SEQ ID NO: 100573 - DNA, 1428 bp, Arabidopsis thaliana
  misc_feature (1)..(1428): Ceres Seq. ID no. 13605509
  misc_feature: MA Experiment ID: 20000264 Result: Up-regulated in Transcription
  misc_feature: MA Experiment 20000264 PARAMETER Experiment Name: At_Open_Flower_P Parameter: Age (day) Value: 21
  misc_feature: MA Experiment 20000264 PARAMETER Experiment Name: At_Open_Flower_P Parameter: Plant Line Value: WS
  misc_feature: MA Experiment 20000264 PARAMETER Experiment Name: At_Open_Flower_P Parameter: Tissue Value: Open Flower vs. Whole Plant
  misc_feature: MA Experiment ID: 20000265 Result: Up-regulated in Transcription
  misc_feature: MA Experiment 20000265 PARAMETER Experiment Name: At_Open_Flower_P Parameter: Age (day) Value: 21
  misc_feature: MA Experiment 20000265 PARAMETER Experiment Name: At_Open_Flower_P Parameter: Plant Line Value: WS
  misc_feature: MA Experiment 20000265 PARAMETER Experiment Name: At_Open_Flower_P Parameter: Tissue Value: Closed Flower vs. Whole Plant
  misc_feature: MA Experiment ID: 20000286 Result: Up-regulated in Transcription
  misc_feature: MA Experiment 20000286 PARAMETER Experiment Name: At_Open_Flower_P Parameter: Age (day) Value: 21
  misc_feature: MA Experiment 20000286 PARAMETER Experiment Name: At_Open_Flower_P Parameter: Plant Line Value: WS
  misc_feature: MA Experiment 20000286 PARAMETER Experiment Name: At_Open_Flower_P Parameter: Tissue Value: Half Open vs. Whole Plant
  misc_feature: MA Experiment ID: 20000794 Result: Up-regulated in Transcription
  misc_feature: MA Experiment 20000794 PARAMETER Experiment Name: At_Petals_P Parameter: Age (day) Value: 23-25 days
  misc_feature: MA Experiment 20000794 PARAMETER Experiment Name: At_Petals_P Parameter: Plant Line Value: WS
  misc_feature: MA Experiment 20000794 PARAMETER Experiment Name: At_Petals_P Parameter: Tissue Value: Petals vs. Whole plant
  misc_feature: MA Experiment ID: 20001909 Result: Up-regulated in Transcription
  misc_feature: MA Experiment 20001909 PARAMETER Experiment Name: At_Drought_Reproduction_P Parameter: Age (day) Value: 35
  misc_feature: MA Experiment 20001909 PARAMETER Experiment Name: At_Drought_Reproduction_P Parameter: Organism Value: A. thaliana
  misc_feature: MA Experiment 20001909 PARAMETER Experiment Name: At_Drought_Reproduction_P Parameter: Plant Line Value: WS
  misc_feature: MA Experiment 20001909 PARAMETER Experiment Name: At_Drought_Reproduction_P Parameter: Timepoint (day) Value: 5
  misc_feature: MA Experiment 20001909 PARAMETER Experiment Name: At_Drought_Reproduction_P Parameter: Tissue Value: Flowers
  misc_feature: MA Experiment 20001909 PARAMETER Experiment Name: At_Drought_Reproduction_P Parameter: Treatment Value: Drought vs. No Drought
  misc_feature: MA Experiment ID: 20001910 Result: Up-regulated in Transcription
  misc_feature: MA Experiment 20001910 PARAMETER Experiment Name: At_Drought_Reproduction_P Parameter: Age (day) Value: 37
  misc_feature: MA Experiment 20001910 PARAMETER Experiment Name: At_Drought_Reproduction_P Parameter: Organism Value: A. thaliana
  misc_feature: MA Experiment 20001910 PARAMETER Experiment Name: At_Drought_Reproduction_P Parameter: Plant Line Value: WS
  misc_feature: MA Experiment 20001910 PARAMETER Experiment Name: At_Drought_Reproduction_P Parameter: Timepoint (day) Value: 7
  misc_feature: MA Experiment 20001910 PARAMETER Experiment Name: At_Drought_Reproduction_P Parameter: Tissue Value: Flowers
  misc_feature: MA Experiment 20001910 PARAMETER Experiment Name: At_Drought_Reproduction_P Parameter: Treatment Value: Drought vs. No Drought
  misc_feature: MA Experiment ID: 20001911 Result: Up-regulated in Transcription
  misc_feature: MA Experiment 20001911 PARAMETER Experiment Name: At_Drought_Reproduction_P Parameter: Age (day) Value: 40
  misc_feature: MA Experiment 20001911 PARAMETER Experiment Name: At_Drought_Reproduction_P Parameter: Organism Value: A. thaliana
  misc_feature: MA Experiment 20001911 PARAMETER Experiment Name: At_Drought_Reproduction_P Parameter: Plant Line Value: WS
  misc_feature: MA Experiment 20001911 PARAMETER Experiment Name: At_Drought_Reproduction_P Parameter: Timepoint (day) Value: 10
  misc_feature: MA Experiment 20001911 PARAMETER Experiment Name: At_Drought_Reproduction_P Parameter: Tissue Value: Flowers
  misc_feature: MA Experiment 20001911 PARAMETER Experiment Name: At_Drought_Reproduction_P Parameter: Treatment Value: Drought vs. No Drought
atcaataaacacaaaaacaaaagaagaagagaataaacaaaagaagaaaaaaaaagtattaaaacaaaatcaataaaaagagaataaaaaatggtgggttctcacaaagcaagcggagtgcttcttgtgctactagtggttatggccaccacaatagcaaacgggacacctgttgtcgatacagcaaaaaatgcagctacagcagttgaagatacagcaaaaaatgcagctacagcagttggcggtgcagctgcatcagttggtgctaaagtaacaggtgccaaaccaggcggtgcatcacttgatgttaaagcatcaggagccaaaggagacggcaaaactgatgatagtgcggcatttgcggctgcatggaaagaagcttgtgcagcagggagcacgattacagtgccaaaaggtgagtatttggtagagagcctagagttcaaaggtccatgcaaaggtccagtcactttggaattgaatggcaattttaaggctccggctacggtcaagaccactaagcctcatgccggatggattgatttcgaaaatctcgctgatttcactttgaatggaaacaaagctatttttgacggtcaagggtccctcgcttggaaggccaatgactgcgccaaaaccggcaaatgcaactctctccctatcaacatccgattcactggtctaacaaactcaaagattaacagtattacatcaacaaacagcaagcttttccacatgaacatccttaactgcaagaacataactcttacggatatcggtattgatgcacctccggagagtctcaacaccgatggtatccacatcggaaggtccaatggagtcaacttaattggggcaaagattaaaaccggagatgactgcgtttccattggagatggtaccgaaaatctcattgttgagaacgtagaatgtggaccaggacacggaatttccattggaagtcttggaagataccctaatgaacaaccagtaaaaggagtcaccgtgaggaaatgcctcatcaagaacactgacaatggtgttcgcatcaagacatggccaggatctccccccggtatcgcctccaacattcttttcgaagatatcacaatggacaatgttagccttcccgttctcatcgaccaagagtactgtccttatggccactgcaaagctggggtaccatcgaaagtgaagttgtcagacgtgactatcaagaacattaagggaacatcagcaacaaaggtagcagtgaagctaatgtgcagcaaaggcgttccttgcaccaatattgctctctctgacatcaacttggtccacaacggcaaagagggaccagctgtctcagcatgttctaacatcaagcctattctcagcggaaagttggttccagcggcttgcactgaagtcgctaaaccgggtccttaa

SEQ ID NO: 100574 - protein, 445 aa, Arabidopsis thaliana; identical to SEQ ID NO: 84205
  peptide (1)..(445): Ceres Seq. ID no. 13605510
  misc_feature (98)..(437): Pfam Name: Glycosyl hydrolases family 28 Pfam Description: Glycosyl hydrolases family 28
  misc_feature (1)..(445): Homolog of NCBI NO: 15231771 NR Description: exopolygalacturonase [Arabidopsis thaliana]
  misc_feature (1)..(445): Homolog of NCBI NO: 3004442 NR Description: polygalacturonase [Arabidopsis thaliana]
  misc_feature (1)..(445): Homolog of NCBI NO: 421833 NR Description: polygalacturonase (EC 3.2.1.15) [imported] - thaliana >gi|311962|emb|CAA51692.1| exopolygalacturonase
  misc_feature (1)..(445): Homolog of NCBI NO: 17064742 NR Description: polygalacturonase; pectinase [Arabidopsis >gi|21387101|gb|AAM47954.1| polygalacturonase; pectinase
  misc_feature (1)..(445): Homolog of NCBI NO: 421832 NR Description: polygalacturonase (EC 3.2.1.15) [imported] - thaliana >gi|313684|emb|CAA51033.1| exopolygalacturonase
  misc_feature (1)..(445): Homolog of NCBI NO: 15231880 NR Description: exopolygalacturonase [Arabidopsis thaliana]
  misc_feature (61)..(438): Homolog of NCBI NO: 3024386 NR Description: POLYGALACTURONASE PRECURSOR (PG) (PECTINASE)
  misc_feature (61)..(438): Homolog of NCBI NO: 3024385 NR Description: POLYGALACTURONASE PRECURSOR (PG) (PECTINASE)
  misc_feature (79)..(437): Homolog of NCBI NO: 6714530 NR Description: polygalacturonase [Salix gilgiana]
  misc_feature (79)..(437): Homolog of NCBI NO: 6714524 NR Description: polygalacturonase [Salix gilgiana]

SEQ ID NO: 100575 - protein, 428 aa, Arabidopsis thaliana; identical to SEQ ID NO: 84206
  peptide (1)..(428): Ceres Seq. ID no. 13605511
  misc_feature (81)..(420): Pfam Name: Glycosyl hydrolases family 28 Pfam Description: Glycosyl hydrolases family 28
  misc_feature (1)..(428): Homolog of NCBI NO: 15231771 NR Description: exopolygalacturonase [Arabidopsis thaliana]
  misc_feature (1)..(428): Homolog of NCBI NO: 3004442 NR Description: polygalacturonase [Arabidopsis thaliana]
  misc_feature (1)..(428): Homolog of NCBI NO: 421833 NR Description: polygalacturonase (EC 3.2.1.15) [imported] - thaliana >gi|311962|emb|CAA51692.1| exopolygalacturonase
  misc_feature (1)..(428): Homolog of NCBI NO: 17064742 NR Description: polygalacturonase; pectinase [Arabidopsis >gi|21387101|gb|AAM47954.1| polygalacturonase; pectinase
  misc_feature (1)..(428): Homolog of NCBI NO: 421832 NR Description: polygalacturonase (EC 3.2.1.15) [imported] - thaliana >gi|313684|emb|CAA51033.1| exopolygalacturonase
  misc_feature (1)..(428): Homolog of NCBI NO: 15231880 NR Description: exopolygalacturonase [Arabidopsis thaliana]
  misc_feature (44)..(421): Homolog of NCBI NO: 3024386 NR Description: POLYGALACTURONASE PRECURSOR (PG) (PECTINASE)
  misc_feature (44)..(421): Homolog of NCBI NO: 3024385 NR Description: POLYGALACTURONASE PRECURSOR (PG) (PECTINASE)
  misc_feature (62)..(420): Homolog of NCBI NO: 6714530 NR Description: polygalacturonase [Salix gilgiana]
  misc_feature (62)..(420): Homolog of NCBI NO: 6714524 NR Description: polygalacturonase [Salix gilgiana]

SEQ ID NO: 100576 - protein, 230 aa, Arabidopsis thaliana; identical to SEQ ID NO: 84207
  peptide (1)..(230): Ceres Seq. ID no. 13605512
  misc_feature (1)..(222): Pfam Name: Glycosyl hydrolases family 28 Pfam Description: Glycosyl hydrolases family 28
  misc_feature (1)..(230): Homolog of NCBI NO: 15231771 NR Description: exopolygalacturonase [Arabidopsis thaliana]
  misc_feature (1)..(230): Homolog of NCBI NO: 3004442 NR Description: polygalacturonase [Arabidopsis thaliana]
  misc_feature (1)..(230): Homolog of NCBI NO: 421833 NR Description: polygalacturonase (EC 3.2.1.15) [imported] - thaliana >gi|311962|emb|CAA51692.1| exopolygalacturonase
  misc_feature (1)..(230): Homolog of NCBI NO: 17064742 NR Description: polygalacturonase; pectinase [Arabidopsis >gi|21387101|gb|AAM47954.1| polygalacturonase; pectinase
  misc_feature (1)..(230): Homolog of NCBI NO: 421832 NR Description: polygalacturonase (EC 3.2.1.15) [imported] - thaliana >gi|313684|emb|CAA51033.1| exopolygalacturonase
  misc_feature (1)..(230): Homolog of NCBI NO: 15231880 NR Description: exopolygalacturonase [Arabidopsis thaliana]
  misc_feature (1)..(223): Homolog of NCBI NO: 3024386 NR Description: POLYGALACTURONASE PRECURSOR (PG) (PECTINASE)
  misc_feature (1)..(223): Homolog of NCBI NO: 3024385 NR Description: POLYGALACTURONASE PRECURSOR (PG) (PECTINASE)
  misc_feature (1)..(222): Homolog of NCBI NO: 6714530 NR Description: polygalacturonase [Salix gilgiana]
  misc_feature (1)..(222): Homolog of NCBI NO: 6714524 NR Description: polygalacturonase [Salix gilgiana]

SEQ ID NO: 100577 - DNA, 1340 bp, Arabidopsis thaliana
  misc_feature (1)..(1340): Ceres Seq. ID no. 13605513
  misc_feature: MA Experiment ID: 108577 Result: Down-regulated in Transcription
  misc_feature: MA Experiment 108577 PARAMETER Experiment Name: At_42deg_Heat_cDNA_P Parameter: Temperature (deg C) Value: 42 vs. 22
  misc_feature: MA Experiment 108577 PARAMETER Experiment Name: At_42deg_Heat_cDNA_P Parameter: Timepoint (hr) Value: 6
  misc_feature: MA Experiment 108577 PARAMETER Experiment Name: At_42deg_Heat_cDNA_P Parameter: Tissue Value: Aerial
  misc_feature: MA Experiment ID: 20000069 Result: Up-regulated in Transcription
  misc_feature: MA Experiment 20000069 PARAMETER Experiment Name: At_100uM_ABA_Mutants_cDNA_P Parameter: Plant Line Value: CS23
  misc_feature: MA Experiment 20000069 PARAMETER Experiment Name: At_100uM_ABA_Mutants_cDNA_P Parameter: Timepoint (hr) Value: 6
  misc_feature: MA Experiment 20000069 PARAMETER Experiment Name: At_100uM_ABA_Mutants_cDNA_P Parameter: Tissue Value: Aerial
  misc_feature: MA Experiment 20000069 PARAMETER Experiment Name: At_100uM_ABA_Mutants_cDNA_P Parameter: Treatment Value: 100uM ABA vs. No Treatment
  misc_feature: MA Experiment ID: 20000070 Result: Up-regulated in Transcription
  misc_feature: MA Experiment 20000070 PARAMETER Experiment Name: At_100uM_ABA_Mutants_cDNA_P Parameter: Plant Line Value: CS24
  misc_feature: MA Experiment 20000070 PARAMETER Experiment Name: At_100uM_ABA_Mutants_cDNA_P Parameter: Timepoint (hr) Value: 6
  misc_feature: MA Experiment 20000070 PARAMETER Experiment Name: At_100uM_ABA_Mutants_cDNA_P Parameter: Tissue Value: Aerial
  misc_feature: MA Experiment 20000070 PARAMETER Experiment Name: At_100uM_ABA_Mutants_cDNA_P Parameter: Treatment Value: 100uM ABA vs. No Treatment
  misc_feature: MA Experiment ID: 20000071 Result: Up-regulated in Transcription
  misc_feature: MA Experiment 20000071 PARAMETER Experiment Name: At_100uM_ABA_Mutants_cDNA_P Parameter: Plant Line Value: CS8104
  misc_feature: MA Experiment 20000071 PARAMETER Experiment Name: At_100uM_ABA_Mutants_cDNA_P Parameter: Timepoint (hr) Value: 6
  misc_feature: MA Experiment 20000071 PARAMETER Experiment Name: At_100uM_ABA_Mutants_cDNA_P Parameter: Tissue Value: Aerial
  misc_feature: MA Experiment 20000071 PARAMETER Experiment Name: At_100uM_ABA_Mutants_cDNA_P Parameter: Treatment Value: 100uM ABA vs. No Treatment
  misc_feature: MA Experiment ID: 20000111 Result: Down-regulated in Transcription
  misc_feature: MA Experiment 20000111 PARAMETER Experiment Name: At_42deg_Heat_cDNA_P Parameter: Temperature (deg C) Value: 42 vs. 22
  misc_feature: MA Experiment 20000111 PARAMETER Experiment Name: At_42deg_Heat_cDNA_P Parameter: Timepoint (hr) Value: 6
  misc_feature: MA Experiment 20000111 PARAMETER Experiment Name: At_42deg_Heat_cDNA_P Parameter: Tissue Value: Aerial
  misc_feature: MA Experiment ID: 20000113 Result: Down-regulated in Transcription
  misc_feature: MA Experiment 20000113 PARAMETER Experiment Name: At_42deg_Heat_cDNA_P Parameter: Temperature (deg C) Value: 42 vs. 22
  misc_feature: MA Experiment 20000113 PARAMETER Experiment Name: At_42deg_Heat_cDNA_P Parameter: Timepoint (hr) Value: 8
  misc_feature: MA Experiment 20000113 PARAMETER Experiment Name: At_42deg_Heat_cDNA_P Parameter: Tissue Value: Aerial
  misc_feature: MA Experiment ID: 20000117 Result: Up-regulated in Transcription
  misc_feature: MA Experiment 20000117 PARAMETER Experiment Name: At_100uM_ABA_Mutants_cDNA_P Parameter: Plant Line Value: Columbia
  misc_feature: MA Experiment 20000117 PARAMETER Experiment Name: At_100uM_ABA_Mutants_cDNA_P Parameter: Timepoint (hr) Value: 6
  misc_feature: MA Experiment 20000117 PARAMETER Experiment Name: At_100uM_ABA_Mutants_cDNA_P Parameter: Tissue Value: Aerial
  misc_feature: MA Experiment 20000117 PARAMETER Experiment Name: At_100uM_ABA_Mutants_cDNA_P Parameter: Treatment Value: 100uM ABA vs. No Treatment
  misc_feature: MA Experiment ID: 20000182 Result: Up-regulated in Transcription
  misc_feature: MA Experiment 20000182 PARAMETER Experiment Name: At_2mM_SA_P Parameter: Age (day) Value: 14
  misc_feature: MA Experiment 20000182 PARAMETER Experiment Name: At_2mM_SA_P Parameter: Organism Value: A. thaliana
  misc_feature: MA Experiment 20000182 PARAMETER Experiment Name: At_2mM_SA_P Parameter: Plant Line Value: WS
  misc_feature: MA Experiment 20000182 PARAMETER Experiment Name: At_2mM_SA_P Parameter: Timepoint (hr) Value: 6
  misc_feature: MA Experiment 20000182 PARAMETER Experiment Name: At_2mM_SA_P Parameter: Tissue Value: Aerial
  misc_feature: MA Experiment 20000182 PARAMETER Experiment Name: At_2mM_SA_P Parameter: Treatment Value: 2mM SA vs. No Treatment
  misc_feature: MA Experiment ID: 20000437 Result: Up-regulated in Transcription
  misc_feature: MA Experiment 20000437 PARAMETER Experiment Name: At_Drought_P Parameter: Age (day) Value: 8
  misc_feature: MA Experiment 20000437 PARAMETER Experiment Name: At_Drought_P Parameter: Organism Value: A. thaliana
  misc_feature: MA Experiment 20000437 PARAMETER Experiment Name: At_Drought_P Parameter: Plant Line Value: WS
  misc_feature: MA Experiment 20000437 PARAMETER Experiment Name: At_Drought_P Parameter: Timepoint (hr) Value: 24
  misc_feature: MA Experiment 20000437 PARAMETER Experiment Name: At_Drought_P Parameter: Tissue Value: Whole Plant
  misc_feature: MA Experiment 20000437 PARAMETER Experiment Name: At_Drought_P Parameter: Treatment Value: Drought vs. No Drought
  misc_feature: MA Experiment ID: 20000438 Result: Down-regulated in Transcription
  misc_feature: MA Experiment 20000438 PARAMETER Experiment Name: At_Shoots__P Parameter: Age (day) Value: 14
  misc_feature: MA Experiment 20000438 PARAMETER Experiment Name: At_Shoots__P Parameter: Tissue Value: Shoots vs. Whole Plant
  misc_feature: MA Experiment ID: 20000794 Result: Up-regulated in Transcription
  misc_feature: MA Experiment 20000794 PARAMETER Experiment Name: At_Petals_P Parameter: Age (day) Value: 23-25 days
  misc_feature: MA Experiment 20000794 PARAMETER Experiment Name: At_Petals_P Parameter: Plant Line Value: WS
  misc_feature: MA Experiment 20000794 PARAMETER Experiment Name: At_Petals_P Parameter: Tissue Value: Petals vs. Whole plant
  misc_feature: MA Experiment ID: 20001558 Result: Down-regulated in Transcription
  misc_feature: MA Experiment 20001558 PARAMETER Experiment Name: At_Drought_Soil_Dry_P Parameter: Age (day) Value: 27
  misc_feature: MA Experiment 20001558 PARAMETER Experiment Name: At_Drought_Soil_Dry_P Parameter: Organism Value: A. thaliana
  misc_feature: MA Experiment 20001558 PARAMETER Experiment Name: At_Drought_Soil_Dry_P Parameter: Plant Line Value: WS
  misc_feature: MA Experiment 20001558 PARAMETER Experiment Name: At_Drought_Soil_Dry_P Parameter: Post Timepoint (hr) Value: 6
  misc_feature: MA Experiment 20001558 PARAMETER Experiment Name: At_Drought_Soil_Dry_P Parameter: Post-Treatment Value: Re-Water vs. No Drought
  misc_feature: MA Experiment 20001558 PARAMETER Experiment Name: At_Drought_Soil_Dry_P Parameter: Timepoint (day) Value: 13
  misc_feature: MA Experiment 20001558 PARAMETER Experiment Name: At_Drought_Soil_Dry_P Parameter: Treatment Value: Drought vs. No Drought
  misc_feature: MA Experiment ID: 20001757 Result: Down-regulated in Transcription
  misc_feature: MA Experiment 20001757 PARAMETER Experiment Name: At_50mM_NH4NO3_L-to-H_P Parameter: Timepoint (hr) Value: 6
  misc_feature: MA Experiment 20001757 PARAMETER Experiment Name: At_50mM_NH4NO3_L-to-H_P Parameter: Tissue Value: Leaf
  misc_feature: MA Experiment 20001757 PARAMETER Experiment Name: At_50mM_NH4NO3_L-to-H_P Parameter: Treatment Value: 50mM NH4NO3 vs 100mM Mannitol
  misc_feature: MA Experiment ID: 20001905 Result: Up-regulated in Transcription
  misc_feature: MA Experiment 20001905 PARAMETER Experiment Name: At_Drought_Reproduction_P Parameter: Age (day) Value: 40
  misc_feature: MA Experiment 20001905 PARAMETER Experiment Name: At_Drought_Reproduction_P Parameter: Organism Value: A. thaliana
  misc_feature: MA Experiment 20001905 PARAMETER Experiment Name: At_Drought_Reproduction_P Parameter: Plant Line Value: WS
  misc_feature: MA Experiment 20001905 PARAMETER Experiment Name: At_Drought_Reproduction_P Parameter: Timepoint (day) Value: 10
  misc_feature: MA Experiment 20001905 PARAMETER Experiment Name: At_Drought_Reproduction_P Parameter: Tissue Value: Rosettes
  misc_feature: MA Experiment 20001905 PARAMETER Experiment Name: At_Drought_Reproduction_P Parameter: Treatment Value: Drought vs. No Drought
gtcttggtctccgacaggaccgactctgttctcgtgttcttttttccctgtcatttccagatttcataaagctaaaagatatctaatttctttgtttaccagagacttaaactggtttctgtatcttttactgggttctttcagatatataaatggatcaaatcgttaacgtggatgagtttcaagagctggccaaacaggccctccctaagatgtactatgatttctacaatggaggagcagaggatcaacacactctcaatgaaaatgtccaagctttccgtagaatcatgtttaggcctagggttcttgttgatgtgagcaacatagatatgtctacaagtatgttgggttacccaatctcagctcccatcatgattgctccaacagcaatgcataagttggctcatcctaaaggagaaatcgccacagcgaaagctgcagctgcgtgtaacactatcatgatagtatcattcatgtctacttgcactattgaggaggttgcttccagttgtaacgctgttcggtttcttcaaatatatgtgtacaagagacgtgatgtaacagctcagattgtgaaaagagctgaaaaagctggattcaaggctatagttctaactgttgatgttcccagacttggtagaagggaagcagatataaagaacaaaatgatatccccacagctgaagaattttgaaggcttagtttcaaccgaagtccgacctaatgaaggttcaggggttgaagcctttgcctctagtgcatttgatgcttcgttaagctggaaggatatcgaatggttaagatctattacaaagttgccaattctggtcaaagggttactcacacgtgaagacgctcttaaggctgttgaagccggtgtagatggaatagtggtatccaaccacggggctcgccagctcgactattccccggctacgataactgttttagaagaggttgttcatgctgtgaaaggtaggattccggttttgcttgatggaggagtaagacgaggaacagatgttttcaaagcgctggcgctcggagcacaagctgttcttatagggaggcctatagtctatgggcttgcagctaagggtgaagatggagtgaaaaaagtgattgatatgctgaaaaatgagtttgagattactatggccctttctggctgtccaaccattgatgacgtaaccagaaaccatgttaggacagagaatgagagaattaaatctatgctctgatcctaaaaccaacagatctagtctcagagacttaatcagacagttggacaacagtatgaaatactgtcaatgcacataaataaaaagctctatttc

SEQ ID NO: 100578 - protein, 363 aa, Arabidopsis thaliana; identical to SEQ ID NO: 41959
  peptide (1)..(363): Ceres Seq. ID no. 13605514
  misc_feature (14)..(354): Pfam Name: FMN-dependent dehydrogenase Pfam Description: FMN-dependent dehydrogenase
  misc_feature (1)..(363): Homolog of NCBI NO: 15231789 NR Description: glycolate oxidase -related [Arabidopsis thaliana] glycolate oxidase [Arabidopsis thaliana]
  misc_feature (1)..(363): Homolog of NCBI NO: 21537253 NR Description: glycolate oxidase, putative [Arabidopsis thaliana]
  misc_feature (1)..(363): Homolog of NCBI NO: 15231792 NR Description: glycolate oxidase -related [Arabidopsis thaliana]
  misc_feature (1)..(363): Homolog of NCBI NO: 9294640 NR Description: glycolate oxidase [Arabidopsis thaliana]
  misc_feature (1)..(363): Homolog of NCBI NO: 21618144 NR Description: glycolate oxidase, putative [Arabidopsis thaliana]
  misc_feature (5)..(363): Homolog of NCBI NO: 33146942 NR Description: putative (S)-2-hydroxy-acid oxidase [Oryza sativa
  misc_feature (3)..(355): Homolog of NCBI NO: 15231850 NR Description: glycolate oxidase -related [Arabidopsis thaliana]
  misc_feature (3)..(355): Homolog of NCBI NO: 999542 NR Description: Chain A, Glycolate Oxidase (E.C.1.1.3.15) Mutant Tyr 24 Replaced By Phe (Y24f) >gi|999543|pdb|1GYL|B Chain B,
  misc_feature (3)..(355): Homolog of NCBI NO: 16226772 NR Description: AT3g14420/MOA2_2 [Arabidopsis thaliana]
  misc_feature (1)..(362): Homolog of NCBI NO: 34395056 NR Description: putative glycolate oxidase [Oryza sativa

SEQ ID NO: 100579 - protein, 343 aa, Arabidopsis thaliana; identical to SEQ ID NO: 41960
  peptide (1)..(343): Ceres Seq. ID no. 13605515
  misc_feature (1)..(334): Pfam Name: FMN-dependent dehydrogenase Pfam Description: FMN-dependent dehydrogenase
  misc_feature (1)..(343): Homolog of NCBI NO: 15231789 NR Description: glycolate oxidase -related [Arabidopsis thaliana] glycolate oxidase [Arabidopsis thaliana]
  misc_feature (1)..(343): Homolog of NCBI NO: 21537253 NR Description: glycolate oxidase, putative [Arabidopsis thaliana]
  misc_feature (1)..(343): Homolog of NCBI NO: 15231792 NR Description: glycolate oxidase -related [Arabidopsis thaliana]
  misc_feature (1)..(343): Homolog of NCBI NO: 9294640 NR Description: glycolate oxidase [Arabidopsis thaliana]
  misc_feature (1)..(343): Homolog of NCBI NO: 21618144 NR Description: glycolate oxidase, putative [Arabidopsis thaliana]
  misc_feature (1)..(343): Homolog of NCBI NO: 33146942 NR Description: putative (S)-2-hydroxy-acid oxidase [Oryza sativa
  misc_feature (1)..(335): Homolog of NCBI NO: 15231850 NR Description: glycolate oxidase -related [Arabidopsis thaliana]
  misc_feature (1)..(335): Homolog of NCBI NO: 999542 NR Description: Chain A, Glycolate Oxidase (E.C.1.1.3.15) Mutant Tyr 24 Replaced By Phe (Y24f) >gi|999543|pdb|1GYL|B Chain B,
  misc_feature (1)..(335): Homolog of NCBI NO: 16226772 NR Description: AT3g14420/MOA2_2 [Arabidopsis thaliana]
  misc_feature (1)..(342): Homolog of NCBI NO: 34395056 NR Description: putative glycolate oxidase [Oryza sativa

SEQ ID NO: 100580 - protein, 317 aa, Arabidopsis thaliana; identical to SEQ ID NO: 41961
  peptide (1)..(317): Ceres Seq. ID no. 13605516
  misc_feature (1)..(308): Pfam Name: FMN-dependent dehydrogenase Pfam Description: FMN-dependent dehydrogenase
  misc_feature (1)..(317): Homolog of NCBI NO: 15231789 NR Description: glycolate oxidase -related [Arabidopsis thaliana] glycolate oxidase [Arabidopsis thaliana]
  misc_feature (1)..(317): Homolog of NCBI NO: 21537253 NR Description: glycolate oxidase, putative [Arabidopsis thaliana]
  misc_feature (1)..(317): Homolog of NCBI NO: 15231792 NR Description: glycolate oxidase -related [Arabidopsis thaliana]
  misc_feature (1)..(317): Homolog of NCBI NO: 9294640 NR Description: glycolate oxidase [Arabidopsis thaliana]
  misc_feature (1)..(317): Homolog of NCBI NO: 21618144 NR Description: glycolate oxidase, putative [Arabidopsis thaliana]
  misc_feature (1)..(317): Homolog of NCBI NO: 33146942 NR Description: putative (S)-2-hydroxy-acid oxidase [Oryza sativa
  misc_feature (1)..(309): Homolog of NCBI NO: 15231850 NR Description: glycolate oxidase -related [Arabidopsis thaliana]
  misc_feature (1)..(309): Homolog of NCBI NO: 999542 NR Description: Chain A, Glycolate Oxidase (E.C.1.1.3.15) Mutant Tyr 24 Replaced By Phe (Y24f) >gi|999543|pdb|1GYL|B Chain B,
  misc_feature (1)..(309): Homolog of NCBI NO: 16226772 NR Description: AT3g14420/MOA2_2 [Arabidopsis thaliana]
  misc_feature (1)..(316): Homolog of NCBI NO: 34395056 NR Description: putative glycolate oxidase [Oryza sativa

SEQ ID NO: 100581 - DNA, 1854 bp, Arabidopsis thaliana
  misc_feature (1)..(1854): Ceres Seq. ID no. 13605517
  misc_feature: MA Experiment ID: 20000184 Result: Down-regulated in Transcription
  misc_feature: MA Experiment 20000184 PARAMETER Experiment Name: At_Shoots__P Parameter: Age (day) Value: 7
  misc_feature: MA Experiment 20000184 PARAMETER Experiment Name: At_Shoots__P Parameter: Tissue Value: Shoots vs. Whole Plant
  misc_feature: MA Experiment ID: 20000185 Result: Down-regulated in Transcription
  misc_feature: MA Experiment 20000185 PARAMETER Experiment Name: At_Roots__P Parameter: Age (day) Value: 7 vs. 21
  misc_feature: MA Experiment 20000185 PARAMETER Experiment Name: At_Roots__P Parameter: Organism Value: A. thaliana
  misc_feature: MA Experiment 20000185 PARAMETER Experiment Name: At_Roots__P Parameter: Tissue Value: Roots vs. Whole Plant
  misc_feature: MA Experiment ID: 20000438 Result: Down-regulated in Transcription
  misc_feature: MA Experiment 20000438 PARAMETER Experiment Name: At_Shoots__P Parameter: Age (day) Value: 14
  misc_feature: MA Experiment 20000438 PARAMETER Experiment Name: At_Shoots__P Parameter: Tissue Value: Shoots vs. Whole Plant
  misc_feature: MA Experiment ID: 20000441 Result: Up-regulated in Transcription
  misc_feature: MA Experiment 20000441 PARAMETER Experiment Name: At_1uM_BR-BRZ__P Parameter: Tissue Value: Shoot Apices
  misc_feature: MA Experiment 20000441 PARAMETER Experiment Name: At_1uM_BR-BRZ__P Parameter: Treatment Value: 1uM BR vs. No Treatment
  misc_feature: MA Experiment ID: 20000443 Result: Up-regulated in Transcription
  misc_feature: MA Experiment 20000443 PARAMETER Experiment Name: At_1uM_BR-BRZ__P Parameter: Tissue Value: Shoot Apices
  misc_feature: MA Experiment 20000443 PARAMETER Experiment Name: At_1uM_BR-BRZ__P Parameter: Treatment Value: 1uM BRZ vs. No Treatment
  misc_feature: MA Experiment ID: 20000495 Result: Down-regulated in Transcription
  misc_feature: MA Experiment 20000495 PARAMETER Experiment Name: At_Guard_Cells_P Parameter: Harvest Date Value: 8/2/2002
  misc_feature: MA Experiment 20000495 PARAMETER Experiment Name: At_Guard_Cells_P Parameter: Organism Value: A. thaliana
  misc_feature: MA Experiment 20000495 PARAMETER Experiment Name: At_Guard_Cells_P Parameter: Tissue Value: Guard Cells vs. Leaves
  misc_feature: MA Experiment ID: 20001247 Result: Up-regulated in Transcription
  misc_feature: MA Experiment 20001247 PARAMETER Experiment Name: At_Far-red-induction_P Parameter: Age (day) Value: 7
  misc_feature: MA Experiment 20001247 PARAMETER Experiment Name: At_Far-red-induction_P Parameter: Light Value: Far-red vs. White
  misc_feature: MA Experiment 20001247 PARAMETER Experiment Name: At_Far-red-induction_P Parameter: Organism Value: A. thaliana
  misc_feature: MA Experiment 20001247 PARAMETER Experiment Name: At_Far-red-induction_P Parameter: Plant Line Value: Columbia
  misc_feature: MA Experiment 20001247 PARAMETER Experiment Name: At_Far-red-induction_P Parameter: Timepoint (hr) Value: 1
  misc_feature: MA Experiment 20001247 PARAMETER Experiment Name: At_Far-red-induction_P Parameter: Tissue Value: Whole Plant
  misc_feature: MA Experiment ID: 20001451 Result: Down-regulated in Transcription
  misc_feature: MA Experiment 20001451 PARAMETER Experiment Name: At_Far-red-induction_P Parameter: Age (day) Value: 7
  misc_feature: MA Experiment 20001451 PARAMETER Experiment Name: At_Far-red-induction_P Parameter: Light Value: Far-red vs. White
  misc_feature: MA Experiment 20001451 PARAMETER Experiment Name: At_Far-red-induction_P Parameter: Organism Value: A. thaliana
  misc_feature: MA Experiment 20001451 PARAMETER Experiment Name: At_Far-red-induction_P Parameter: Plant Line Value: Columbia
  misc_feature: MA Experiment 20001451 PARAMETER Experiment Name: At_Far-red-induction_P Parameter: Timepoint (hr) Value: 24
  misc_feature: MA Experiment 20001451 PARAMETER Experiment Name: At_Far-red-induction_P Parameter: Tissue Value: Whole Plant
  misc_feature: MA Experiment ID: 20001558 Result: Up-regulated in Transcription
  misc_feature: MA Experiment 20001558 PARAMETER Experiment Name: At_Drought_Soil_Dry_P Parameter: Age (day) Value: 27
  misc_feature: MA Experiment 20001558 PARAMETER Experiment Name: At_Drought_Soil_Dry_P Parameter: Organism Value: A. thaliana
  misc_feature: MA Experiment 20001558 PARAMETER Experiment Name: At_Drought_Soil_Dry_P Parameter: Plant Line Value: WS
  misc_feature: MA Experiment 20001558 PARAMETER Experiment Name: At_Drought_Soil_Dry_P Parameter: Post Timepoint (hr) Value: 6
  misc_feature: MA Experiment 20001558 PARAMETER Experiment Name: At_Drought_Soil_Dry_P Parameter: Post-Treatment Value: Re-Water vs. No Drought
  misc_feature: MA Experiment 20001558 PARAMETER Experiment Name: At_Drought_Soil_Dry_P Parameter: Timepoint (day) Value: 13
  misc_feature: MA Experiment 20001558 PARAMETER Experiment Name: At_Drought_Soil_Dry_P Parameter: Treatment Value: Drought vs. No Drought
actctaaagcctttttcccctcttctcattctcgagctccggacttgtcttgaaaccgtgaaggaatctgtatcttttgtatgttacccattttattgtcgttaagaatcaatttagaggcaaaacgccgagaggtttgcccgggagagtgtttttacatcgatcagggtttaagcagaggttggtttgtcatttcgccagtttgcttcttcaaattcactctacgatgaagtgagaacaacaaacaaaacatagataagatagagaccttgggactgttggaagatggagtctgtgaaaccattggatgttgtttcttcaggaaaaggaaaactcagacgcacatttgctaaagtcatcaacatgaaaaagctaaccggtgttgttccagaaggtaacaacaaggttgaaagagtgaagaagagccaagaaaaggtgaagttggataaagatttagcaaagaatgctgcaaatctgtctgagtcctttgacaagctggaggaagagtatgagaaaagactggccatggaggctcttcttgcaaagctgtttgctacgatttcttcgataaaatctggttatgcgcagttgcagtatgctcagtctccttatgatccaaatgggattcagaaagcagataacttggtagtagcagagctgaagacattatcagagctgaaacagagtttcttgaagaaacagcttgatcctaatcctgatagaactcttgttcttgcggagattcaagagctaagaagcgtcttaaagacttatgagatcatggggaagaagctggagtgtcagttaaagctcaaagactctgagatcatatttctcaaagaaaagtttcaagaatccatgactcagaacaagttgatggagaagagattaaaccaaagtggccaactttgcaatccattggatcataatcttcatctatcggcggtaagttcgacccatttcgttacttatctgcaccacactgtcaaatccatccgaggattcgtcaagttgatggttgagcagatgaaactcgctgcttgggacatcgatatggctgctgagttaattcagcctgatgtactctattacaagcaagaccacaagtgttttgccttggagcattatgtctgcaagataatgcttgaagcttttcaactaccttacttctcaaacgaatcatcgaagaagacgagcagagaagacaaagcaatgttctttgagagattcacagagcttagatcgatgaaaccaagagagtatttagcatctcggcctaaatcaagattggctaagttttgcagaactaagtatttgcagctcatacatccaaagatggagcaggcattcttcggacatttgcatcaaagaaaccaagtcactgcaggggagtttccagagacgagcttgtgcactgcgtttctcgaaatggcgaaaagggtttggcttttacattgccttgctttctccttcgatcctgaagcttcaatctttcaagtatctagaggttgcagattctccgaagtgtacatgaagagcgtgtcggaggaagcgtttttctcaccggagcaagaagaaagctcgtcggaaactgaaccgggggttgcgtttacggttgttcctgggtttagaattgggaaaacgacgatacaatgtgaggtctacctctcgcgttcatgtcaacgccgtcagagcagatagattccggtgatgacgtcacaggggtattagggtaatttatcttggggaactttttgggggtaggaaaatatatgagagaaaatttgttgaccgttggattaagagaagaggcaagtatgtatgttgcttgttgagatttatggtttttatttt

SEQ ID NO: 100582 - protein, 471 aa, Arabidopsis thaliana
  peptide (1)..(471): Ceres Seq. ID no. 13605518
  misc_feature (70)..(202): Pfam Name: Plant protein of unknown function (DUF641) Pfam Description: Plant protein of unknown function (DUF641)
  misc_feature (1)..(471): Homolog of NCBI NO: 8777470 NR Description: gb|AAB82637.1~gene_id:K15M2.1~similar to unknown
  misc_feature (1)..(471): Homolog of NCBI NO: 15231944 NR Description: expressed protein [Arabidopsis thaliana] unknown protein [Arabidopsis thaliana]
  misc_feature (1)..(464): Homolog of NCBI NO: 15219282 NR Description: expressed protein [Arabidopsis thaliana]
  misc_feature (1)..(462): Homolog of NCBI NO: 20466324 NR Description: unknown protein [Arabidopsis thaliana]
  misc_feature (1)..(462): Homolog of NCBI NO: 22329840 NR Description: expressed protein [Arabidopsis thaliana]
  misc_feature (80)..(462): Homolog of NCBI NO: 15225441 NR Description: expressed protein [Arabidopsis thaliana]
  misc_feature (79)..(467): Homolog of NCBI NO: 34903732 NR Description: unnamed protein product [Oryza sativa (japonica group)] >gi|7340858|dbj|BAA92948.1| unnamed protein product
  misc_feature (80)..(330): Homolog of NCBI NO: 15235221 NR Description: expressed protein [Arabidopsis thaliana]
  misc_feature (359)..(419): Homolog of NCBI NO: 15235221 NR Description: expressed protein [Arabidopsis thaliana]
  misc_feature (83)..(462): Homolog of NCBI NO: 15232398 NR Description: expressed protein [Arabidopsis thaliana]
MESVKPLDVVSSGKGKLRRTFAKVINMKKLTGVVPEGNNKVERVKKSQEKVKLDKDLAKNAANLSESFDKLEEEYEKRLAMEALLAKLFATISSIKSGYAQLQYAQSPYDPNGIQKADNLVVAELKTLSELKQSFLKKQLDPNPDRTLVLAEIQELRSVLKTYEIMGKKLECQLKLKDSEIIFLKEKFQESMTQNKLMEKRLNQSGQLCNPLDHNLHLSAVSSTHFVTYLHHTVKSIRGFVKLMVEQMKLAAWDIDMAAELIQPDVLYYKQDHKCFALEHYVCKIMLEAFQLPYFSNESSKKTSREDKAMFFERFTELRSMKPREYLASRPKSRLAKFCRTKYLQLIHPKMEQAFFGHLHQRNQVTAGEFPETSLCTAFLEMAKRVWLLHCLAFSFDPEASIFQVSRGCRFSEVYMKSVSEEAFFSPEQEESSSETEPGVAFTVVPGFRIGKTTIQCEVYLSRSCQRRQSR

SEQ ID NO: 100583 - protein, 445 aa, Arabidopsis thaliana
  peptide (1)..(445): Ceres Seq. ID no. 13605519
  misc_feature (44)..(176): Pfam Name: Plant protein of unknown function (DUF641) Pfam Description: Plant protein of unknown function (DUF641)
  misc_feature (1)..(445): Homolog of NCBI NO: 8777470 NR Description: gb|AAB82637.1~gene_id:K15M2.1~similar to unknown
  misc_feature (1)..(445): Homolog of NCBI NO: 15231944 NR Description: expressed protein [Arabidopsis thaliana] unknown protein [Arabidopsis thaliana]
  misc_feature (1)..(438): Homolog of NCBI NO: 15219282 NR Description: expressed protein [Arabidopsis thaliana]
  misc_feature (1)..(436): Homolog of NCBI NO: 20466324 NR Description: unknown protein [Arabidopsis thaliana]
  misc_feature (1)..(436): Homolog of NCBI NO: 22329840 NR Description: expressed protein [Arabidopsis thaliana]
  misc_feature (54)..(436): Homolog of NCBI NO: 15225441 NR Description: expressed protein [Arabidopsis thaliana]
  misc_feature (53)..(441): Homolog of NCBI NO: 34903732 NR Description: unnamed protein product [Oryza sativa (japonica group)] >gi|7340858|dbj|BAA92948.1| unnamed protein product
  misc_feature (54)..(304): Homolog of NCBI NO: 15235221 NR Description: expressed protein [Arabidopsis thaliana]
  misc_feature (333)..(393): Homolog of NCBI NO: 15235221 NR Description: expressed protein [Arabidopsis thaliana]
  misc_feature (57)..(436): Homolog of NCBI NO: 15232398 NR Description: expressed protein [Arabidopsis thaliana]
MKKLTGVVPEGNNKVERVKKSQEKVKLDKDLAKNAANLSESFDKLEEEYEKRLAMEALLAKLFATISSIKSGYAQLQYAQSPYDPNGIQKADNLVVAELKTLSELKQSFLKKQLDPNPDRTLVLAEIQELRSVLKTYEIMGKKLECQLKLKDSEIIFLKEKFQESMTQNKLMEKRLNQSGQLCNPLDHNLHLSAVSSTHFVTYLHHTVKSIRGFVKLMVEQMKLAAWDIDMAAELIQPDVLYYKQDHKCFALEHYVCKIMLEAFQLPYFSNESSKKTSREDKAMFFERFTELRSMKPREYLASRPKSRLAKFCRTKYLQLIHPKMEQAFFGHLHQRNQVTAGEFPETSLCTAFLEMAKRVWLLHCLAFSFDPEASIFQVSRGCRFSEVYMKSVSEEAFFSPEQEESSSETEPGVAFTVVPGFRIGKTTIQCEVYLSRSCQRRQSR

SEQ ID NO: 100584 - protein, 391 aa, Arabidopsis thaliana
  peptide (1)..(391): Ceres Seq. ID no. 13605520
  misc_feature (1)..(122): Pfam Name: Plant protein of unknown function (DUF641) Pfam Description: Plant protein of unknown function (DUF641)
  misc_feature (1)..(391): Homolog of NCBI NO: 8777470 NR Description: gb|AAB82637.1~gene_id:K15M2.1~similar to unknown
  misc_feature (1)..(391): Homolog of NCBI NO: 15231944 NR Description: expressed protein [Arabidopsis thaliana] unknown protein [Arabidopsis thaliana]
  misc_feature (1)..(384): Homolog of NCBI NO: 15219282 NR Description: expressed protein [Arabidopsis thaliana]
  misc_feature (1)..(382): Homolog of NCBI NO: 20466324 NR Description: unknown protein [Arabidopsis thaliana]
  misc_feature (1)..(382): Homolog of NCBI NO: 22329840 NR Description: expressed protein [Arabidopsis thaliana]
  misc_feature (1)..(382): Homolog of NCBI NO: 15225441 NR Description: expressed protein [Arabidopsis thaliana]
  misc_feature (1)..(387): Homolog of NCBI NO: 34903732 NR Description: unnamed protein product [Oryza sativa (japonica group)] >gi|7340858|dbj|BAA92948.1| unnamed protein product
  misc_feature (1)..(250): Homolog of NCBI NO: 15235221 NR Description: expressed protein [Arabidopsis thaliana]
  misc_feature (279)..(339): Homolog of NCBI NO: 15235221 NR Description: expressed protein [Arabidopsis thaliana]
  misc_feature (3)..(382): Homolog of NCBI NO: 15232398 NR Description: expressed protein [Arabidopsis thaliana]
MEALLAKLFATISSIKSGYAQLQYAQSPYDPNGIQKADNLVVAELKTLSELKQSFLKKQLDPNPDRTLVLAEIQELRSVLKTYEIMGKKLECQLKLKDSEIIFLKEKFQESMTQNKLMEKRLNQSGQLCNPLDHNLHLSAVSSTHFVTYLHHTVKSIRGFVKLMVEQMKLAAWDIDMAAELIQPDVLYYKQDHKCFALEHYVCKIMLEAFQLPYFSNESSKKTSREDKAMFFERFTELRSMKPREYLASRPKSRLAKFCRTKYLQLIHPKMEQAFFGHLHQRNQVTAGEFPETSLCTAFLEMAKRVWLLHCLAFSFDPEASIFQVSRGCRFSEVYMKSVSEEAFFSPEQEESSSETEPGVAFTVVPGFRIGKTTIQCEVYLSRSCQRRQSR

SEQ ID NO: 100585 - DNA, 867 bp, Arabidopsis thaliana
  misc_feature (1)..(867): Ceres Seq. ID no. 13605521
  misc_feature: MA Experiment ID: 20000180 Result: Down-regulated in Transcription
  misc_feature: MA Experiment 20000180 PARAMETER Experiment Name: At_Germinating_Seeds_P Parameter: Age (hr) Value: 24 vs. 0
  misc_feature: MA Experiment 20000180 PARAMETER Experiment Name: At_Germinating_Seeds_P Parameter: Tissue Value: Germinating Seeds
  misc_feature: MA Experiment ID: 20000234 Result: Down-regulated in Transcription
  misc_feature: MA Experiment 20000234 PARAMETER Experiment Name: At_Siliques_P Parameter: Age (day) Value: 21
  misc_feature: MA Experiment 20000234 PARAMETER Experiment Name: At_Siliques_P Parameter: Organism Value: A. thaliana
  misc_feature: MA Experiment 20000234 PARAMETER Experiment Name: At_Siliques_P Parameter: Plant Line Value: WS
  misc_feature: MA Experiment 20000234 PARAMETER Experiment Name: At_Siliques_P Parameter: Tissue Value: Less Than 5mm Siliques vs. Whole Plant
  misc_feature: MA Experiment ID: 20000235 Result: Down-regulated in Transcription
  misc_feature: MA Experiment 20000235 PARAMETER Experiment Name: At_Siliques_P Parameter: Age (day) Value: 21
  misc_feature: MA Experiment 20000235 PARAMETER Experiment Name: At_Siliques_P Parameter: Organism Value: A. thaliana
  misc_feature: MA Experiment 20000235 PARAMETER Experiment Name: At_Siliques_P Parameter: Plant Line Value: WS
  misc_feature: MA Experiment 20000235 PARAMETER Experiment Name: At_Siliques_P Parameter: Tissue Value: 5-10mm Siliques vs. Whole Plant
  misc_feature: MA Experiment ID: 20000264 Result: Down-regulated in Transcription
  misc_feature: MA Experiment 20000264 PARAMETER Experiment Name: At_Open_Flower_P Parameter: Age (day) Value: 21
  misc_feature: MA Experiment 20000264 PARAMETER Experiment Name: At_Open_Flower_P Parameter: Plant Line Value: WS
  misc_feature: MA Experiment 20000264 PARAMETER Experiment Name: At_Open_Flower_P Parameter: Tissue Value: Open Flower vs. Whole Plant
  misc_feature: MA Experiment ID: 20000265 Result: Down-regulated in Transcription
  misc_feature: MA Experiment 20000265 PARAMETER Experiment Name: At_Open_Flower_P Parameter: Age (day) Value: 21
  misc_feature: MA Experiment 20000265 PARAMETER Experiment Name: At_Open_Flower_P Parameter: Plant Line Value: WS
  misc_feature: MA Experiment 20000265 PARAMETER Experiment Name: At_Open_Flower_P Parameter: Tissue Value: Closed Flower vs. Whole Plant
  misc_feature: MA Experiment ID: 20000286 Result: Down-regulated in Transcription
  misc_feature: MA Experiment 20000286 PARAMETER Experiment Name: At_Open_Flower_P Parameter: Age (day) Value: 21
  misc_feature: MA Experiment 20000286 PARAMETER Experiment Name: At_Open_Flower_P Parameter: Plant Line Value: WS
  misc_feature: MA Experiment 20000286 PARAMETER Experiment Name: At_Open_Flower_P Parameter: Tissue Value: Half Open vs. Whole Plant
  misc_feature: MA Experiment ID: 20000794 Result: Down-regulated in Transcription
  misc_feature: MA Experiment 20000794 PARAMETER Experiment Name: At_Petals_P Parameter: Age (day) Value: 23-25 days
  misc_feature: MA Experiment 20000794 PARAMETER Experiment Name: At_Petals_P Parameter: Plant Line Value: WS
  misc_feature: MA Experiment 20000794 PARAMETER Experiment Name: At_Petals_P Parameter: Tissue Value: Petals vs. Whole plant
  misc_feature: MA Experiment ID: 20001247 Result: Up-regulated in Transcription
  misc_feature: MA Experiment 20001247 PARAMETER Experiment Name: At_Far-red-induction_P Parameter: Age (day) Value: 7
  misc_feature: MA Experiment 20001247 PARAMETER Experiment Name: At_Far-red-induction_P Parameter: Light Value: Far-red vs. White
  misc_feature: MA Experiment 20001247 PARAMETER Experiment Name: At_Far-red-induction_P Parameter: Organism Value: A. thaliana
  misc_feature: MA Experiment 20001247 PARAMETER Experiment Name: At_Far-red-induction_P Parameter: Plant Line Value: Columbia
  misc_feature: MA Experiment 20001247 PARAMETER Experiment Name: At_Far-red-induction_P Parameter: Timepoint (hr) Value: 1
  misc_feature: MA Experiment 20001247 PARAMETER Experiment Name: At_Far-red-induction_P Parameter: Tissue Value: Whole Plant
  misc_feature: MA Experiment ID: 20001248 Result: Up-regulated in Transcription
  misc_feature: MA Experiment 20001248 PARAMETER Experiment Name: At_Far-red-induction_P Parameter: Age (day) Value: 7
  misc_feature: MA Experiment 20001248 PARAMETER Experiment Name: At_Far-red-induction_P Parameter: Light Value: Far-red vs. White
  misc_feature: MA Experiment 20001248 PARAMETER Experiment Name: At_Far-red-induction_P Parameter: Organism Value: A. thaliana
  misc_feature: MA Experiment 20001248 PARAMETER Experiment Name: At_Far-red-induction_P Parameter: Plant Line Value: Columbia
  misc_feature: MA Experiment 20001248 PARAMETER Experiment Name: At_Far-red-induction_P Parameter: Timepoint (hr) Value: 4
  misc_feature: MA Experiment 20001248 PARAMETER Experiment Name: At_Far-red-induction_P Parameter: Tissue Value: Whole Plant
  misc_feature: MA Experiment ID: 20001557 Result: Up-regulated in Transcription
  misc_feature: MA Experiment 20001557 PARAMETER Experiment Name: At_Drought_Soil_Dry_P Parameter: Age (day) Value: 27
  misc_feature: MA Experiment 20001557 PARAMETER Experiment Name: At_Drought_Soil_Dry_P Parameter: Organism Value: A. thaliana
  misc_feature: MA Experiment 20001557 PARAMETER Experiment Name: At_Drought_Soil_Dry_P Parameter: Plant Line Value: WS
  misc_feature: MA Experiment 20001557 PARAMETER Experiment Name: At_Drought_Soil_Dry_P Parameter: Post Timepoint (hr) Value: 3
  misc_feature: MA Experiment 20001557 PARAMETER Experiment Name: At_Drought_Soil_Dry_P Parameter: Post-Treatment Value: Re-Water vs. No Drought
  misc_feature: MA Experiment 20001557 PARAMETER Experiment Name: At_Drought_Soil_Dry_P Parameter: Timepoint (day) Value: 13
  misc_feature: MA Experiment 20001557 PARAMETER Experiment Name: At_Drought_Soil_Dry_P Parameter: Treatment Value: Drought vs. No Drought
  misc_feature: MA Experiment ID: 20001558 Result: Up-regulated in Transcription
  misc_feature: MA Experiment 20001558 PARAMETER Experiment Name: At_Drought_Soil_Dry_P Parameter: Age (day) Value: 27
  misc_feature: MA Experiment 20001558 PARAMETER Experiment Name: At_Drought_Soil_Dry_P Parameter: Organism Value: A. thaliana
  misc_feature: MA Experiment 20001558 PARAMETER Experiment Name: At_Drought_Soil_Dry_P Parameter: Plant Line Value: WS
  misc_feature: MA Experiment 20001558 PARAMETER Experiment Name: At_Drought_Soil_Dry_P Parameter: Post Timepoint (hr) Value: 6
  misc_feature: MA Experiment 20001558 PARAMETER Experiment Name: At_Drought_Soil_Dry_P Parameter: Post-Treatment Value: Re-Water vs. No Drought
  misc_feature: MA Experiment 20001558 PARAMETER Experiment Name: At_Drought_Soil_Dry_P Parameter: Timepoint (day) Value: 13
  misc_feature: MA Experiment 20001558 PARAMETER Experiment Name: At_Drought_Soil_Dry_P Parameter: Treatment Value: Drought vs. No Drought
ctttttctccttttgtccgtacgcgttttcttaccggtgacctgaaagtctcaaaaaatggcggcgtatagagctgacgatgattacgatttcctctacaaggtggtattaatcggtgattccggcgtcggtaaatccaatctgctttctcgattcacgcgcaacgagttcagcctcgagtctaaatccaccatcggtgtcgaattcgccacccgaagcattcatgtcgatgaaaaaatcgtcaaggctcagatttgggacaccgccggccaagagagataccgagcaatcacaagcgcatactatcgaggagctgttggggctttgcttgtttatgatgttacacggcatgtgacatttgagaacgttgagagatggttgaaggagcttagagaccacacagaggccaacattgtgatcatgcttgttgggaataaagcggatctacgtcacctaagagctgtttcaactgaagatgctaaagcctttgcagagagagagaacacattctttatggagacatctgcacttgaagctttgaacgttgagaatgctttcactgaagtgctttctcaaatataccgtgttgcaagcaagaaggcgttggatattggtgatgatcacactactcttcctaaaggacaaagtattaatgttgggtctaaggatgatgtttctgaggttaagaaggttggatgctgctcaagttgatcttgatcaagccattttgtctgtttcttaggcaagaatatagtttgattatctatggaagacatgcagatgattctttcttgtgtttttcctttagttgcttcttttggtgtaagtttctcagatcctgttttaaatattattttttacacaatc

SEQ ID NO: 100586 - protein, 217 aa, Arabidopsis thaliana
  peptide (1)..(217): Ceres Seq. ID no. 13605522
  misc_feature (15)..(176): Pfam Name: Ras family Pfam Description: Ras family
  misc_feature (1)..(217): Homolog of NCBI NO: 15232477 NR Description: Ras family GTP-binding protein, putative
  misc_feature (1)..(217): Homolog of NCBI NO: 15239462 NR Description: GTP-binding protein, putative [Arabidopsis
  misc_feature (1)..(217): Homolog of NCBI NO: 7438432 NR Description: GTP-binding protein - garden pea
  misc_feature (4)..(217): Homolog of NCBI NO: 3024504 NR Description: RAS-RELATED PROTEIN RAB11B
  misc_feature (1)..(217): Homolog of NCBI NO: 1370156 NR Description: RAB11H [Lotus japonicus]
  misc_feature (1)..(217): Homolog of NCBI NO: 15218719 NR Description: GTP-binding protein, putative [Arabidopsis >gi|6560749|gb|AAF16749.1|AC010155_2 F3M18.2 [Arabidopsis
  misc_feature (11)..(217): Homolog of NCBI NO: 7438389 NR Description: GTP-binding protein, ras-like (clone vfa-ypt3a) - bean (fragment) >gi|452357|emb|CAA82708.1| guanine nucleotide
  misc_feature (1)..(217): Homolog of NCBI NO: 15226182 NR Description: GTP-binding protein, putative [Arabidopsis
  misc_feature (1)..(216): Homolog of NCBI NO: 15233873 NR Description: GTP-binding protein, putative [Arabidopsis
  misc_feature (1)..(217): Homolog of NCBI NO: 10764861 NR Description: F1K23.21 [Arabidopsis thaliana]
MAAYRADDDYDFLYKVVLIGDSGVGKSNLLSRFTRNEFSLESKSTIGVEFATRSIHVDEKIVKAQIWDTAGQERYRAITSAYYRGAVGALLVYDVTRHVTFENVERWLKELRDHTEANIVIMLVGNKADLRHLRAVSTEDAKAFAERENTFFMETSALEALNVENAFTEVLSQIYRVASKKALDIGDDHTTLPKGQSINVGSKDDVSEVKKVGCCSS

SEQ ID NO: 100587 - DNA, 693 bp, Arabidopsis thaliana
  misc_feature (1)..(693): Ceres Seq. ID no. 13605535
  misc_feature: MA Experiment ID: 20000180 Result: Down-regulated in Transcription
  misc_feature: MA Experiment 20000180 PARAMETER Experiment Name: At_Germinating_Seeds_P Parameter: Age (hr) Value: 24 vs. 0
  misc_feature: MA Experiment 20000180 PARAMETER Experiment Name: At_Germinating_Seeds_P Parameter: Tissue Value: Germinating Seeds
  misc_feature: MA Experiment ID: 20000495 Result: Up-regulated in Transcription
  misc_feature: MA Experiment 20000495 PARAMETER Experiment Name: At_Guard_Cells_P Parameter: Harvest Date Value: 8/2/2002
  misc_feature: MA Experiment 20000495 PARAMETER Experiment Name: At_Guard_Cells_P Parameter: Organism Value: A. thaliana
  misc_feature: MA Experiment 20000495 PARAMETER Experiment Name: At_Guard_Cells_P Parameter: Tissue Value: Guard Cells vs. Leaves
  misc_feature: MA Experiment ID: 20001557 Result: Up-regulated in Transcription
  misc_feature: MA Experiment 20001557 PARAMETER Experiment Name: At_Drought_Soil_Dry_P Parameter: Age (day) Value: 27
  misc_feature: MA Experiment 20001557 PARAMETER Experiment Name: At_Drought_Soil_Dry_P Parameter: Organism Value: A. thaliana
  misc_feature: MA Experiment 20001557 PARAMETER Experiment Name: At_Drought_Soil_Dry_P Parameter: Plant Line Value: WS
  misc_feature: MA Experiment 20001557 PARAMETER Experiment Name: At_Drought_Soil_Dry_P Parameter: Post Timepoint (hr) Value: 3
  misc_feature: MA Experiment 20001557 PARAMETER Experiment Name: At_Drought_Soil_Dry_P Parameter: Post-Treatment Value: Re-Water vs. No Drought
  misc_feature: MA Experiment 20001557 PARAMETER Experiment Name: At_Drought_Soil_Dry_P Parameter: Timepoint (day) Value: 13
  misc_feature: MA Experiment 20001557 PARAMETER Experiment Name: At_Drought_Soil_Dry_P Parameter: Treatment Value: Drought vs. No Drought
  misc_feature: MA Experiment ID: 20001558 Result: Up-regulated in Transcription
  misc_feature: MA Experiment 20001558 PARAMETER Experiment Name: At_Drought_Soil_Dry_P Parameter: Age (day) Value: 27
  misc_feature: MA Experiment 20001558 PARAMETER Experiment Name: At_Drought_Soil_Dry_P Parameter: Organism Value: A. thaliana
  misc_feature: MA Experiment 20001558 PARAMETER Experiment Name: At_Drought_Soil_Dry_P Parameter: Plant Line Value: WS
  misc_feature: MA Experiment 20001558 PARAMETER Experiment Name: At_Drought_Soil_Dry_P Parameter: Post Timepoint (hr) Value: 6
  misc_feature: MA Experiment 20001558 PARAMETER Experiment Name: At_Drought_Soil_Dry_P Parameter: Post-Treatment Value: Re-Water vs. No Drought
  misc_feature: MA Experiment 20001558 PARAMETER Experiment Name: At_Drought_Soil_Dry_P Parameter: Timepoint (day) Value: 13
  misc_feature: MA Experiment 20001558 PARAMETER Experiment Name: At_Drought_Soil_Dry_P Parameter: Treatment Value: Drought vs. No Drought
  misc_feature: MA Experiment ID: 20001560 Result: Up-regulated in Transcription
  misc_feature: MA Experiment 20001560 PARAMETER Experiment Name: At_Drought_Soil_Dry_P Parameter: Age (day) Value: 28
  misc_feature: MA Experiment 20001560 PARAMETER Experiment Name: At_Drought_Soil_Dry_P Parameter: Organism Value: A. thaliana
  misc_feature: MA Experiment 20001560 PARAMETER Experiment Name: At_Drought_Soil_Dry_P Parameter: Plant Line Value: WS
  misc_feature: MA Experiment 20001560 PARAMETER Experiment Name: At_Drought_Soil_Dry_P Parameter: Post Timepoint (hr) Value: None
  misc_feature: MA Experiment 20001560 PARAMETER Experiment Name: At_Drought_Soil_Dry_P Parameter: Post-Treatment Value: None
  misc_feature: MA Experiment 20001560 PARAMETER Experiment Name: At_Drought_Soil_Dry_P Parameter: Timepoint (day) Value: 14
  misc_feature: MA Experiment 20001560 PARAMETER Experiment Name: At_Drought_Soil_Dry_P Parameter: Treatment Value: Drought vs. No Drought
atctttagccgccgacttggtatcatcaaatcgaggagattcgaagaagcatggtgggatttaagaacagatacatgttaatggaagtttttctggatccggacaaggatcttctcggagaaggaacaccgatcattcttacacaattcaatctctcgaaagcaatcaaagacagtatcctcgtcaatttcggcgagtgtggtctaggttcgtctctcggttccttccaagtgaaatatgtgaatccaatcacgaagctatgcattgtaagatcatcaagagaagaacacagacaagtttggttagcaatcacattggtcaaaagcatcggaaactgtccggtgatcttaaacttgctcgatattagcggttgcatcagagcgtgtagagacacagccttgaagtgcgacaaggagaagtttgagcagtgtagcaaaagcttgtctgaagaggagattaggcagatgaatacttctcttgagaagatcaaactattggaaaactgaaacttttctagaccttttttccttcgaatttgacccctaagttttgaaattgtacaatctttgtatttttcttaattctgaaatacaaagggataagaaacagcatcattccctgaaaagattgtttgcgatttgaatcactgggtttttatatgttggaattaaaataagagggtgtgaattgttg

SEQ ID NO: 100588 - protein, 151 aa, Arabidopsis thaliana
  peptide (1)..(151): Ceres Seq. ID no. 13605536
  misc_feature (7)..(97): Pfam Name: Rpp14 family Pfam Description: Rpp14 family
  misc_feature (1)..(151): Homolog of NCBI NO: 22329330 NR Description: Probable lipoate-protein ligase B -related
  misc_feature (1)..(97): Homolog of NCBI NO: 3122357 NR Description: Probable lipoate-protein ligase (Lipoate protein) (Lipoyl ligase) >gi|25406801|pir||B86179 hypothetical
  misc_feature (1)..(151): Homolog of NCBI NO: 38343977 NR Description: OSJNBa0041M21.1 [Oryza sativa (japonica
  misc_feature (1)..(151): Homolog of NCBI NO: 38568007 NR Description: OSJNBb0068N06.26 [Oryza sativa (japonica
  misc_feature (1)..(136): Homolog of NCBI NO: 19075979 NR Description: putative pre-tRNA/pre-rRNA processing protein
  misc_feature (1)..(150): Homolog of NCBI NO: 20270249 NR Description: RNase MRP/RNase P protein-like [Homo sapiens] Unknown (protein for MGC:21100) [Homo sapiens]
MVGFKNRYMLMEVFLDPDKDLLGEGTPIILTQFNLSKAIKDSILVNFGECGLGSSLGSFQVKYVNPITKLCIVRSSREEHRQVWLAITLVKSIGNCPVILNLLDISGCIRACRDTALKCDKEKFEQCSKSLSEEEIRQMNTSLEKIKLLEN

SEQ ID NO: 100589 - protein, 143 aa, Arabidopsis thaliana
  peptide (1)..(143): Ceres Seq. ID no. 13605537
  misc_feature (1)..(89): Pfam Name: Rpp14 family Pfam Description: Rpp14 family
  misc_feature (1)..(143): Homolog of NCBI NO: 22329330 NR Description: Probable lipoate-protein ligase B -related
  misc_feature (1)..(89): Homolog of NCBI NO: 3122357 NR Description: Probable lipoate-protein ligase (Lipoate protein) (Lipoyl ligase) >gi|25406801|pir||B86179 hypothetical
  misc_feature (1)..(143): Homolog of NCBI NO: 38343977 NR Description: OSJNBa0041M21.1 [Oryza sativa (japonica
  misc_feature (1)..(143): Homolog of NCBI NO: 38568007 NR Description: OSJNBb0068N06.26 [Oryza sativa (japonica
  misc_feature (1)..(128): Homolog of NCBI NO: 19075979 NR Description: putative pre-tRNA/pre-rRNA processing protein
  misc_feature (1)..(142): Homolog of NCBI NO: 20270249 NR Description: RNase MRP/RNase P protein-like [Homo sapiens] Unknown (protein for MGC:21100) [Homo sapiens]
MLMEVFLDPDKDLLGEGTPIILTQFNLSKAIKDSILVNFGECGLGSSLGSFQVKYVNPITKLCIVRSSREEHRQVWLAITLVKSIGNCPVILNLLDISGCIRACRDTALKCDKEKFEQCSKSLSEEEIRQMNTSLEKIKLLEN

SEQ ID NO: 100590 - protein, 141 aa, Arabidopsis thaliana
  peptide (1)..(141): Ceres Seq. ID no. 13605538
  misc_feature (1)..(87): Pfam Name: Rpp14 family Pfam Description: Rpp14 family
  misc_feature (1)..(141): Homolog of NCBI NO: 22329330 NR Description: Probable lipoate-protein ligase B -related
  misc_feature (1)..(87): Homolog of NCBI NO: 3122357 NR Description: Probable lipoate-protein ligase (Lipoate protein) (Lipoyl ligase) >gi|25406801|pir||B86179 hypothetical
  misc_feature (1)..(141): Homolog of NCBI NO: 38343977 NR Description: OSJNBa0041M21.1 [Oryza sativa (japonica
  misc_feature (1)..(141): Homolog of NCBI NO: 38568007 NR Description: OSJNBb0068N06.26 [Oryza sativa (japonica
  misc_feature (1)..(126): Homolog of NCBI NO: 19075979 NR Description: putative pre-tRNA/pre-rRNA processing protein
  misc_feature (1)..(140): Homolog of NCBI NO: 20270249 NR Description: RNase MRP/RNase P protein-like [Homo sapiens] Unknown (protein for MGC:21100) [Homo sapiens]
MEVFLDPDKDLLGEGTPIILTQFNLSKAIKDSILVNFGECGLGSSLGSFQVKYVNPITKLCIVRSSREEHRQVWLAITLVKSIGNCPVILNLLDISGCIRACRDTALKCDKEKFEQCSKSLSEEEIRQMNTSLEKIKLLEN

SEQ ID NO: 100591 - DNA, 1097 bp, Arabidopsis thaliana
  misc_feature (1)..(1097): Ceres Seq. ID no. 13605565
  misc_feature: MA Experiment ID: 20000227 Result: Down-regulated in Transcription
  misc_feature: MA Experiment 20000227 PARAMETER Experiment Name: At_Root-Tips-vs-Tops_P Parameter: Tissue Value: Root Tips vs. Root Tops
  misc_feature: MA Experiment ID: 20000495 Result: Down-regulated in Transcription
  misc_feature: MA Experiment 20000495 PARAMETER Experiment Name: At_Guard_Cells_P Parameter: Harvest Date Value: 8/2/2002
  misc_feature: MA Experiment 20000495 PARAMETER Experiment Name: At_Guard_Cells_P Parameter: Organism Value: A. thaliana
  misc_feature: MA Experiment 20000495 PARAMETER Experiment Name: At_Guard_Cells_P Parameter: Tissue Value: Guard Cells vs. Leaves
  misc_feature: MA Experiment ID: 20000496 Result: Down-regulated in Transcription
  misc_feature: MA Experiment 20000496 PARAMETER Experiment Name: At_Guard_Cells_P Parameter: Harvest Date Value: 7/19/2002
  misc_feature: MA Experiment 20000496 PARAMETER Experiment Name: At_Guard_Cells_P Parameter: Organism Value: Canola
  misc_feature: MA Experiment 20000496 PARAMETER Experiment Name: At_Guard_Cells_P Parameter: Tissue Value: Guard Cells vs. Leaves
attttcagctaaaagcaatggagtcatcacttccccaagttgctgcacttgatcgttcaactctactcaaagctttcgacgagactaaaaccggcgtgaaaggccttatcgacgccggaatcacagagattccttcgatatttcgtgcacctccggctactttaacaagtccaaaaccaccttcctcctctgatttctccatccccacaatcgatctcaaaggaggtggcacggactcgatcacgcggcggagcttggtggagaagatcggagacgcggcagagaaatggggatttttccaggtgatcaaccacgggatcccgatggatgtgttggagaagatgatagatgggattcgtgagtttcacgagcaagacactgaagtgaagaaagggttttactctcgagatccagctagtaagatggtatacagcagcaacttcgatctgtttagctcaccggcggcgaattggagagatacacttggttgttatacagcaccagatcccccgagaccggaggacttacccgccacttgtggggagatgatgattgagtactcaaaggaagtgatgaaattgggtaaattactcttcgagcttctctcggaagctctagggttaaacactaatcacctcaaggacatggattgcactaactccttgctgttgctcggccattattacccgccatgtccccaacccgaccttactctaggcttaacgaaacactccgacaactcttttctcactattcttcttcaagaccatatcggagggcttcaagttcttcatgaccaatattgggttgatgttcctcctgtccctggagctcttgttgttaaccttataacaaacgacaagttcataagcgtggagcatagggttttggccaatgtagctggaccgagaatttcagtggcatgtttcttcagctcgtatttgatggcgaatcctcgagtttatggacccatcaaagagattttgtctgaagaaaaccctcctaattatagagacactactattacagagtatgcaaagttctacagatccaaaggattcgatggtacctctggattactctatctcaagatctga

SEQ ID NO: 100592 - protein, 364 aa, Arabidopsis thaliana
  peptide (1)..(364): Ceres Seq. ID no. 13605566
  misc_feature (219)..(312): Pfam Name: 2OG-Fe(II) oxygenase superfamily Pfam Description: 2OG-Fe(II) oxygenase superfamily
  misc_feature (6)..(364): Homolog of NCBI NO: 30679748 NR Description: 2-oxoglutarate-dependent dioxygenase, putative thaliana] >gi|30102640|gb|AAP21238.1| At1g06620 [Arabidopsis
  misc_feature (6)..(203): Homolog of NCBI NO: 25406927 NR Description: protein F12K11.6 [imported] - Arabidopsis >gi|6692693|gb|AAF24827.1|AC007592_20 F12K11.6 [Arabidopsis
  misc_feature (181)..(354): Homolog of NCBI NO: 25406927 NR Description: protein F12K11.6 [imported] - Arabidopsis >gi|6692693|gb|AAF24827.1|AC007592_20 F12K11.6 [Arabidopsis
  misc_feature (15)..(364): Homolog of NCBI NO: 15233096 NR Description: 2-oxoglutarate-dependent dioxygenase, putative
  misc_feature (17)..(351): Homolog of NCBI NO: 9280671 NR Description: F21B7.3 [Arabidopsis thaliana]
  misc_feature (17)..(351): Homolog of NCBI NO: 15218795 NR Description: 2-oxoglutarate-dependent dioxygenase, putative
  misc_feature (278)..(364): Homolog of NCBI NO: 25406927 NR Description: protein F12K11.6 [imported] - Arabidopsis >gi|6692693|gb|AAF24827.1|AC007592_20 F12K11.6 [Arabidopsis
  misc_feature (17)..(364): Homolog of NCBI NO: 13878119 NR Description: putative oxidoreductase [Arabidopsis thaliana]
  misc_feature (17)..(364): Homolog of NCBI NO: 15221545 NR Description: 2-oxoglutarate-dependent dioxygenase, putative thaliana] >gi|23296334|gb|AAN13044.1| putative oxidoreductase
  misc_feature (17)..(364): Homolog of NCBI NO: 15218794 NR Description: 2-oxoglutarate-dependent dioxygenase, putative
FQLKAMESSLPQVAALDRSTLLKAFDETKTGVKGLIDAGITEIPSIFRAPPATLTSPKPPSSSDFSIPTIDLKGGGTDSITRRSLVEKIGDAAEKWGFFQVINHGIPMDVLEKMIDGIREFHEQDTEVKKGFYSRDPASKMVYSSNFDLFSSPAANWRDTLGCYTAPDPPRPEDLPATCGEMMIEYSKEVMKLGKLLFELLSEALGLNTNHLKDMDCTNSLLLLGHYYPPCPQPDLTLGLTKHSDNSFLTILLQDHIGGLQVLHDQYWVDVPPVPGALVVNLITNDKFISVEHRVLANVAGPRISVACFFSSYLMANPRVYGPIKEILSEENPPNYRDTTITEYAKFYRSKGFDGTSGLLYLKI

SEQ ID NO: 100593 - protein, 359 aa, Arabidopsis thaliana
  peptide (1)..(359): Ceres Seq. ID no. 13605567
  misc_feature (214)..(307): Pfam Name: 2OG-Fe(II) oxygenase superfamily Pfam Description: 2OG-Fe(II) oxygenase superfamily
  misc_feature (1)..(359): Homolog of NCBI NO: 30679748 NR Description: 2-oxoglutarate-dependent dioxygenase, putative thaliana] >gi|30102640|gb|AAP21238.1| At1g06620 [Arabidopsis
  misc_feature (1)..(198): Homolog of NCBI NO: 25406927 NR Description: protein F12K11.6 [imported] - Arabidopsis >gi|6692693|gb|AAF24827.1|AC007592_20 F12K11.6 [Arabidopsis
  misc_feature (176)..(349): Homolog of NCBI NO: 25406927 NR Description: protein F12K11.6 [imported] - Arabidopsis >gi|6692693|gb|AAF24827.1|AC007592_20 F12K11.6 [Arabidopsis
  misc_feature (10)..(359): Homolog of NCBI NO: 15233096 NR Description: 2-oxoglutarate-dependent dioxygenase, putative
  misc_feature (12)..(346): Homolog of NCBI NO: 9280671 NR Description: F21B7.3 [Arabidopsis thaliana]
  misc_feature (12)..(346): Homolog of NCBI NO: 15218795 NR Description: 2-oxoglutarate-dependent dioxygenase, putative
  misc_feature (273)..(359): Homolog of NCBI NO: 25406927 NR Description: protein F12K11.6 [imported] - Arabidopsis >gi|6692693|gb|AAF24827.1|AC007592_20 F12K11.6 [Arabidopsis
  misc_feature (12)..(359): Homolog of NCBI NO: 13878119 NR Description: putative oxidoreductase [Arabidopsis thaliana]
  misc_feature (12)..(359): Homolog of NCBI NO: 15221545 NR Description: 2-oxoglutarate-dependent dioxygenase, putative thaliana] >gi|23296334|gb|AAN13044.1| putative oxidoreductase
  misc_feature (12)..(359): Homolog of NCBI NO: 15218794 NR Description: 2-oxoglutarate-dependent dioxygenase, putative
MESSLPQVAALDRSTLLKAFDETKTGVKGLIDAGITEIPSIFRAPPATLTSPKPPSSSDFSIPTIDLKGGGTDSITRRSLVEKIGDAAEKWGFFQVINHGIPMDVLEKMIDGIREFHEQDTEVKKGFYSRDPASKMVYSSNFDLFSSPAANWRDTLGCYTAPDPPRPEDLPATCGEMMIEYSKEVMKLGKLLFELLSEALGLNTNHLKDMDCTNSLLLLGHYYPPCPQPDLTLGLTKHSDNSFLTILLQDHIGGLQVLHDQYWVDVPPVPGALVVNLITNDKFISVEHRVLANVAGPRISVACFFSSYLMANPRVYGPIKEILSEENPPNYRDTTITEYAKFYRSKGFDGTSGLLYLKI

SEQ ID NO: 100594 - protein, 257 aa, Arabidopsis thaliana
  peptide (1)..(257): Ceres Seq. ID no. 13605568
  misc_feature (112)..(205): Pfam Name: 2OG-Fe(II) oxygenase superfamily Pfam Description: 2OG-Fe(II) oxygenase superfamily
  misc_feature (1)..(257): Homolog of NCBI NO: 30679748 NR Description: 2-oxoglutarate-dependent dioxygenase, putative thaliana] >gi|30102640|gb|AAP21238.1| At1g06620 [Arabidopsis
  misc_feature (1)..(96): Homolog of NCBI NO: 25406927 NR Description: protein F12K11.6 [imported] - Arabidopsis >gi|6692693|gb|AAF24827.1|AC007592_20 F12K11.6 [Arabidopsis
  misc_feature (74)..(247): Homolog of NCBI NO: 25406927 NR Description: protein F12K11.6 [imported] - Arabidopsis >gi|6692693|gb|AAF24827.1|AC007592_20 F12K11.6 [Arabidopsis
  misc_feature (1)..(257): Homolog of NCBI NO: 15233096 NR Description: 2-oxoglutarate-dependent dioxygenase, putative
  misc_feature (1)..(244): Homolog of NCBI NO: 9280671 NR Description: F21B7.3 [Arabidopsis thaliana]
  misc_feature (1)..(244): Homolog of NCBI NO: 15218795 NR Description: 2-oxoglutarate-dependent dioxygenase, putative
  misc_feature (171)..(257): Homolog of NCBI NO: 25406927 NR Description: protein F12K11.6 [imported] - Arabidopsis >gi|6692693|gb|AAF24827.1|AC007592_20 F12K11.6 [Arabidopsis
  misc_feature (1)..(257): Homolog of NCBI NO: 13878119 NR Description: putative oxidoreductase [Arabidopsis thaliana]
  misc_feature (1)..(257): Homolog of NCBI NO: 15221545 NR Description: 2-oxoglutarate-dependent dioxygenase, putative thaliana] >gi|23296334|gb|AAN13044.1| putative oxidoreductase
  misc_feature (1)..(257): Homolog of NCBI NO: 15218794 NR Description: 2-oxoglutarate-dependent dioxygenase, putative
MDVLEKMIDGIREFHEQDTEVKKGFYSRDPASKMVYSSNFDLFSSPAANWRDTLGCYTAPDPPRPEDLPATCGEMMIEYSKEVMKLGKLLFELLSEALGLNTNHLKDMDCTNSLLLLGHYYPPCPQPDLTLGLTKHSDNSFLTILLQDHIGGLQVLHDQYWVDVPPVPGALVVNLITNDKFISVEHRVLANVAGPRISVACFFSSYLMANPRVYGPIKEILSEENPPNYRDTTITEYAKFYRSKGFDGTSGLLYLKI

SEQ ID NO: 100595 - DNA, 1292 bp, Arabidopsis thaliana
  misc_feature (1)..(1292): Ceres Seq. ID no. 13605569
  misc_feature: MA Experiment ID: 108434 Result: Down-regulated in Transcription
  misc_feature: MA Experiment 108434 PARAMETER Experiment Name: At_Root_Tips_cDNA_P Parameter: Tissue Value: Root Tips
  misc_feature: MA Experiment ID: 108462 Result: Up-regulated in Transcription
  misc_feature: MA Experiment 108462 PARAMETER Experiment Name: At_Germinating_Seeds_cDNA_P Parameter: Age (day) Value: 2 vs. 0
  misc_feature: MA Experiment 108462 PARAMETER Experiment Name: At_Germinating_Seeds_cDNA_P Parameter: Tissue Value: Germinating Seeds
  misc_feature: MA Experiment ID: 108463 Result: Up-regulated in Transcription
  misc_feature: MA Experiment 108463 PARAMETER Experiment Name: At_Germinating_Seeds_cDNA_P Parameter: Age (day) Value: 3 vs. 0
  misc_feature: MA Experiment 108463 PARAMETER Experiment Name: At_Germinating_Seeds_cDNA_P Parameter: Tissue Value: Germinating Seeds
  misc_feature: MA Experiment ID: 108464 Result: Up-regulated in Transcription
  misc_feature: MA Experiment 108464 PARAMETER Experiment Name: At_Germinating_Seeds_cDNA_P Parameter: Age (day) Value: 4 vs. 0
  misc_feature: MA Experiment 108464 PARAMETER Experiment Name: At_Germinating_Seeds_cDNA_P Parameter: Tissue Value: Germinating Seeds
  misc_feature: MA Experiment ID: 108569 Result: Up-regulated in Transcription
  misc_feature: MA Experiment 108569 PARAMETER Experiment Name: At_0.001%_MeJA__cDNA_P Parameter: Timepoint (hr) Value: 6
  misc_feature: MA Experiment 108569 PARAMETER Experiment Name: At_0.001%_MeJA__cDNA_P Parameter: Tissue Value: Aerial
  misc_feature: MA Experiment 108569 PARAMETER Experiment Name: At_0.001%_MeJA__cDNA_P Parameter: Treatment Value: 0.001% MeJA vs. No Treatment
  misc_feature: MA Experiment ID: 108573 Result: Up-regulated in Transcription
  misc_feature: MA Experiment 108573 PARAMETER Experiment Name: At_Drought_cDNA_P Parameter: Timepoint (hr) Value: 6
  misc_feature: MA Experiment 108573 PARAMETER Experiment Name: At_Drought_cDNA_P Parameter: Tissue Value: Aerial
  misc_feature: MA Experiment 108573 PARAMETER Experiment Name: At_Drought_cDNA_P Parameter: Treatment Value: Drought vs. No Drought
  misc_feature: MA Experiment ID: 108595 Result: Down-regulated in Transcription
  misc_feature: MA Experiment 108595 PARAMETER Experiment Name: At_Ler-pi_Ovule_cDNA_P Parameter: Plant Line Value: null
  misc_feature: MA Experiment ID: 20000087 Result: Down-regulated in Transcription
  misc_feature: MA Experiment 20000087 PARAMETER Experiment Name: At_100uM_ABA_Mutants_cDNA_P Parameter: Plant Line Value: WS
  misc_feature: MA Experiment 20000087 PARAMETER Experiment Name: At_100uM_ABA_Mutants_cDNA_P Parameter: Timepoint (hr) Value: 6
  misc_feature: MA Experiment 20000087 PARAMETER Experiment Name: At_100uM_ABA_Mutants_cDNA_P Parameter: Tissue Value: Aerial
  misc_feature: MA Experiment 20000087 PARAMETER Experiment Name: At_100uM_ABA_Mutants_cDNA_P Parameter: Treatment Value: 100uM ABA vs. No Treatment
  misc_feature: MA Experiment ID: 20000180 Result: Up-regulated in Transcription
  misc_feature: MA Experiment 20000180 PARAMETER Experiment Name: At_Germinating_Seeds_P Parameter: Age (hr) Value: 24 vs. 0
  misc_feature: MA Experiment 20000180 PARAMETER Experiment Name: At_Germinating_Seeds_P Parameter: Tissue Value: Germinating Seeds
  misc_feature: MA Experiment ID: 20000185 Result: Up-regulated in Transcription
  misc_feature: MA Experiment 20000185 PARAMETER Experiment Name: At_Roots__P Parameter: Age (day) Value: 7 vs. 21
  misc_feature: MA Experiment 20000185 PARAMETER Experiment Name: At_Roots__P Parameter: Organism Value: A. thaliana
  misc_feature: MA Experiment 20000185 PARAMETER Experiment Name: At_Roots__P Parameter: Tissue Value: Roots vs. Whole Plant
  misc_feature: MA Experiment ID: 20000227 Result: Down-regulated in Transcription
  misc_feature: MA Experiment 20000227 PARAMETER Experiment Name: At_Root-Tips-vs-Tops_P Parameter: Tissue Value: Root Tips vs. Root Tops
  misc_feature: MA Experiment ID: 20000234 Result: Down-regulated in Transcription
  misc_feature: MA Experiment 20000234 PARAMETER Experiment Name: At_Siliques_P Parameter: Age (day) Value: 21
  misc_feature: MA Experiment 20000234 PARAMETER Experiment Name: At_Siliques_P Parameter: Organism Value: A. thaliana
  misc_feature: MA Experiment 20000234 PARAMETER Experiment Name: At_Siliques_P Parameter: Plant Line Value: WS
  misc_feature: MA Experiment 20000234 PARAMETER Experiment Name: At_Siliques_P Parameter: Tissue Value: Less Than 5mm Siliques vs. Whole Plant
  misc_feature: MA Experiment ID: 20000264 Result: Down-regulated in Transcription
  misc_feature: MA Experiment 20000264 PARAMETER Experiment Name: At_Open_Flower_P Parameter: Age (day) Value: 21
  misc_feature: MA Experiment 20000264 PARAMETER Experiment Name: At_Open_Flower_P Parameter: Plant Line Value: WS
  misc_feature: MA Experiment 20000264 PARAMETER Experiment Name: At_Open_Flower_P Parameter: Tissue Value: Open Flower vs. Whole Plant
  misc_feature: MA Experiment ID: 20000265 Result: Down-regulated in Transcription
  misc_feature: MA Experiment 20000265 PARAMETER Experiment Name: At_Open_Flower_P Parameter: Age (day) Value: 21
  misc_feature: MA Experiment 20000265 PARAMETER Experiment Name: At_Open_Flower_P Parameter: Plant Line Value: WS
  misc_feature: MA Experiment 20000265 PARAMETER Experiment Name: At_Open_Flower_P Parameter: Tissue Value: Closed Flower vs. Whole Plant
  misc_feature: MA Experiment ID: 20000286 Result: Down-regulated in Transcription
  misc_feature: MA Experiment 20000286 PARAMETER Experiment Name: At_Open_Flower_P Parameter: Age (day) Value: 21
  misc_feature: MA Experiment 20000286 PARAMETER Experiment Name: At_Open_Flower_P Parameter: Plant Line Value: WS
  misc_feature: MA Experiment 20000286 PARAMETER Experiment Name: At_Open_Flower_P Parameter: Tissue Value: Half Open vs. Whole Plant
  misc_feature: MA Experiment ID: 20000439 Result: Up-regulated in Transcription
  misc_feature: MA Experiment 20000439 PARAMETER Experiment Name: At_Roots__P Parameter: Age (day) Value: 14 vs. 21
  misc_feature: MA Experiment 20000439 PARAMETER Experiment Name: At_Roots__P Parameter: Organism Value: A. thaliana
  misc_feature: MA Experiment 20000439 PARAMETER Experiment Name: At_Roots__P Parameter: Tissue Value: Roots vs. Whole Plant
  misc_feature: MA Experiment ID: 20000460 Result: Down-regulated in Transcription
  misc_feature: MA Experiment 20000460 PARAMETER Experiment Name: At_10percent_PEG_P Parameter: Age (day) Value: 12
  misc_feature: MA Experiment 20000460 PARAMETER Experiment Name: At_10percent_PEG_P Parameter: Organism Value: A. thaliana
  misc_feature: MA Experiment 20000460 PARAMETER Experiment Name: At_10percent_PEG_P Parameter: Plant Line Value: WS
  misc_feature: MA Experiment 20000460 PARAMETER Experiment Name: At_10percent_PEG_P Parameter: Timepoint (day) Value: 12
  misc_feature: MA Experiment 20000460 PARAMETER Experiment Name: At_10percent_PEG_P Parameter: Tissue Value: Whole Plant
  misc_feature: MA Experiment 20000460 PARAMETER Experiment Name: At_10percent_PEG_P Parameter: Treatment Value: 10percent PEG vs. No Treatment
  misc_feature: MA Experiment ID: 20000527 Result: Down-regulated in Transcription
  misc_feature: MA Experiment 20000527 PARAMETER Experiment Name: At_10percent_PEG_P Parameter: Age (day) Value: 20
  misc_feature: MA Experiment 20000527 PARAMETER Experiment Name: At_10percent_PEG_P Parameter: Organism Value: A. thaliana
  misc_feature: MA Experiment 20000527 PARAMETER Experiment Name: At_10percent_PEG_P Parameter: Plant Line Value: WS
  misc_feature: MA Experiment 20000527 PARAMETER Experiment Name: At_10percent_PEG_P Parameter: Timepoint (day) Value: 20
  misc_feature: MA Experiment 20000527 PARAMETER Experiment Name: At_10percent_PEG_P Parameter: Tissue Value: Whole Plant
  misc_feature: MA Experiment 20000527 PARAMETER Experiment Name: At_10percent_PEG_P Parameter: Treatment Value: 10percent PEG vs. No Treatment
  misc_feature: MA Experiment ID: 20000794 Result: Down-regulated in Transcription
  misc_feature: MA Experiment 20000794 PARAMETER Experiment Name: At_Petals_P Parameter: Age (day) Value: 23-25 days
  misc_feature: MA Experiment 20000794 PARAMETER Experiment Name: At_Petals_P Parameter: Plant Line Value: WS
  misc_feature: MA Experiment 20000794 PARAMETER Experiment Name: At_Petals_P Parameter: Tissue Value: Petals vs. Whole plant
  misc_feature: MA Experiment ID: 20001450 Result: Down-regulated in Transcription
  misc_feature: MA Experiment 20001450 PARAMETER Experiment Name: At_Far-red-induction_P Parameter: Age (day) Value: 7
  misc_feature: MA Experiment 20001450 PARAMETER Experiment Name: At_Far-red-induction_P Parameter: Light Value: Far-red vs. White
  misc_feature: MA Experiment 20001450 PARAMETER Experiment Name: At_Far-red-induction_P Parameter: Organism Value: A. thaliana
  misc_feature: MA Experiment 20001450 PARAMETER Experiment Name: At_Far-red-induction_P Parameter: Plant Line Value: Columbia
  misc_feature: MA Experiment 20001450 PARAMETER Experiment Name: At_Far-red-induction_P Parameter: Timepoint (hr) Value: 8
  misc_feature: MA Experiment 20001450 PARAMETER Experiment Name: At_Far-red-induction_P Parameter: Tissue Value: Whole Plant
  misc_feature: MA Experiment ID: 20001906 Result: Down-regulated in Transcription
  misc_feature: MA Experiment 20001906 PARAMETER Experiment Name: At_Drought_Reproduction_P Parameter: Age (day) Value: 35
  misc_feature: MA Experiment 20001906 PARAMETER Experiment Name: At_Drought_Reproduction_P Parameter: Organism Value: A. thaliana
  misc_feature: MA Experiment 20001906 PARAMETER Experiment Name: At_Drought_Reproduction_P Parameter: Plant Line Value: WS
  misc_feature: MA Experiment 20001906 PARAMETER Experiment Name: At_Drought_Reproduction_P Parameter: Timepoint (day) Value: 5
  misc_feature: MA Experiment 20001906 PARAMETER Experiment Name: At_Drought_Reproduction_P Parameter: Tissue Value: Siliques
  misc_feature: MA Experiment 20001906 PARAMETER Experiment Name: At_Drought_Reproduction_P Parameter: Treatment Value: Drought vs. No Drought
gtcttacgagagaccaaaacgatggagagcacgaagattgctccttcattcgatcgtgccagtgagcttaaagctttcgatgagacgaagactggtgtgaaaggactcgttgactctggaatctcaaagattccacgcattttccatcactcatctgtcgaactagcaaaccctaaaccacttccctcggacctgctacatctcaagacgatcccaacgatcgatctcggaggacgggacttccaggacgcgattaagcacaagaacgcgattgaagggattaaagaagcagctgccaagtggggtttcttccaagtgatcaaccatggagtttcgctcgagcttcttgagaagatgaaagatggagttcgtgactttcatgagcaacctcctgaagtgaggaaagatttgtacagccgcgatttcggcagaaagtttatctatttaagtaatttcgatctctacactgctgcagctgcgaattggagagacacattctattgttacatggctccagatcctccagaaccacaggatctgccagagatttgtagggatgttatgatggaatactcaaagcaagtgatgattttgggtgaatttctgtttgagcttttgtcagaagcactagggttgaaccctaatcacctcaaggacatggagtgcttaaagggtttgcgcatgctttgccactacttcccaccgtgtccggagcctgacctaacttttggcacaagtaagcactccgacggctcttttcttaccgtccttctaccagataacatagaagggcttcaggtttgtcgtgagggatactggttcgatgttcctcatgttcccggcgctctcatcatcaacatcggagatcttctgcagcttataacaaacgacaagttcatcagtttgaagcatagagtattggcgaacagagccacaagagctcgagtctctgtcgcatgtttcttccatacccacgtaaaaccaaatcctagagtgtacggacccattaaagagcttgtgtccgaagaaaatcctccaaagtacagagagaccaccatcagagattacgctacttacttcaatggcaaaggacttggcgggacctctgctttgctggattttaaagtatgaatcatgccgagctactactttctcacagatatacgacatgacattatatgtaacatgttggagatgtgtgaaccaaatgtggaatttatgtattgaacattgtcatcaaggtttggtccaaataaagtgtaatcggatatggttaatcaattggattacgc

SEQ ID NO: 100596 - protein, 376 aa, Arabidopsis thaliana; identical to SEQ ID NO: 23901
  peptide (1)..(376): Ceres Seq. ID no. 13605570
  misc_feature (224)..(324): Pfam Name: 2OG-Fe(II) oxygenase superfamily Pfam Description: 2OG-Fe(II) oxygenase superfamily
  misc_feature (1)..(300): Homolog of NCBI NO: 25406927 NR Description: protein F12K11.6 [imported] - Arabidopsis >gi|6692693|gb|AAF24827.1|AC007592_20 F12K11.6 [Arabidopsis
  misc_feature (292)..(376): Homolog of NCBI NO: 25406927 NR Description: protein F12K11.6 [imported] - Arabidopsis >gi|6692693|gb|AAF24827.1|AC007592_20 F12K11.6 [Arabidopsis
  misc_feature (8)..(376): Homolog of NCBI NO: 15221544 NR Description: 2-oxoglutarate-dependent dioxygenase, putative thaliana] >gi|13430546|gb|AAK25895.1|AF360185_1 putative [Arabidopsis thaliana] >gi|14532752|gb|AAK64077.1| putative
  misc_feature (276)..(376): Homolog of NCBI NO: 25406927 NR Description: protein F12K11.6 [imported] - Arabidopsis >gi|6692693|gb|AAF24827.1|AC007592_20 F12K11.6 [Arabidopsis
  misc_feature (4)..(304): Homolog of NCBI NO: 25406927 NR Description: protein F12K11.6 [imported] - Arabidopsis >gi|6692693|gb|AAF24827.1|AC007592_20 F12K11.6 [Arabidopsis
  misc_feature (8)..(376): Homolog of NCBI NO: 15221545 NR Description: 2-oxoglutarate-dependent dioxygenase, putative thaliana] >gi|23296334|gb|AAN13044.1| putative oxidoreductase
  misc_feature (8)..(376): Homolog of NCBI NO: 13878119 NR Description: putative oxidoreductase [Arabidopsis thaliana]
  misc_feature (8)..(292): Homolog of NCBI NO: 30679763 NR Description: 2-oxoglutarate-dependent dioxygenase, putative
  misc_feature (8)..(208): Homolog of NCBI NO: 25406927 NR Description: protein F12K11.6 [imported] - Arabidopsis >gi|6692693|gb|AAF24827.1|AC007592_20 F12K11.6 [Arabidopsis
  misc_feature (185)..(273): Homolog of NCBI NO: 25406927 NR Description: protein F12K11.6 [imported] - Arabidopsis >gi|6692693|gb|AAF24827.1|AC007592_20 F12K11.6 [Arabidopsis

SEQ ID NO: 100597 - protein, 369 aa, Arabidopsis thaliana; identical to SEQ ID NO: 23902
  peptide (1)..(369): Ceres Seq. ID no. 13605571
  misc_feature (217)..(317): Pfam Name: 2OG-Fe(II) oxygenase superfamily Pfam Description: 2OG-Fe(II) oxygenase superfamily
  misc_feature (1)..(293): Homolog of NCBI NO: 25406927 NR Description: protein F12K11.6 [imported] - Arabidopsis >gi|6692693|gb|AAF24827.1|AC007592_20 F12K11.6 [Arabidopsis
  misc_feature (285)..(369): Homolog of NCBI NO: 25406927 NR Description: protein F12K11.6 [imported] - Arabidopsis >gi|6692693|gb|AAF24827.1|AC007592_20 F12K11.6 [Arabidopsis
  misc_feature (1)..(369): Homolog of NCBI NO: 15221544 NR Description: 2-oxoglutarate-dependent dioxygenase, putative thaliana] >gi|13430546|gb|AAK25895.1|AF360185_1 putative [Arabidopsis thaliana] >gi|14532752|gb|AAK64077.1| putative
  misc_feature (269)..(369): Homolog of NCBI NO: 25406927 NR Description: protein F12K11.6 [imported] - Arabidopsis >gi|6692693|gb|AAF24827.1|AC007592_20 F12K11.6 [Arabidopsis
  misc_feature (1)..(297): Homolog of NCBI NO: 25406927 NR Description: protein F12K11.6 [imported] - Arabidopsis >gi|6692693|gb|AAF24827.1|AC007592_20 F12K11.6 [Arabidopsis
  misc_feature (1)..(369): Homolog of NCBI NO: 15221545 NR Description: 2-oxoglutarate-dependent dioxygenase, putative thaliana] >gi|23296334|gb|AAN13044.1| putative oxidoreductase
  misc_feature (1)..(369): Homolog of NCBI NO: 13878119 NR Description: putative oxidoreductase [Arabidopsis thaliana]
  misc_feature (1)..(285): Homolog of NCBI NO: 30679763 NR Description: 2-oxoglutarate-dependent dioxygenase, putative
  misc_feature (1)..(201): Homolog of NCBI NO: 25406927 NR Description: protein F12K11.6 [imported] - Arabidopsis >gi|6692693|gb|AAF24827.1|AC007592_20 F12K11.6 [Arabidopsis
  misc_feature (178)..(266): Homolog of NCBI NO: 25406927 NR Description: protein F12K11.6 [imported] - Arabidopsis >gi|6692693|gb|AAF24827.1|AC007592_20 F12K11.6 [Arabidopsis

SEQ ID NO: 100598 - protein, 258 aa, Arabidopsis thaliana; identical to SEQ ID NO: 23903
  peptide (1)..(258): Ceres Seq. ID no. 13605572
  misc_feature (106)..(206): Pfam Name: 2OG-Fe(II) oxygenase superfamily Pfam Description: 2OG-Fe(II) oxygenase superfamily
  misc_feature (1)..(182): Homolog of NCBI NO: 25406927 NR Description: protein F12K11.6 [imported] - Arabidopsis >gi|6692693|gb|AAF24827.1|AC007592_20 F12K11.6 [Arabidopsis
  misc_feature (174)..(258): Homolog of NCBI NO: 25406927 NR Description: protein F12K11.6 [imported] - Arabidopsis >gi|6692693|gb|AAF24827.1|AC007592_20 F12K11.6 [Arabidopsis
  misc_feature (1)..(258): Homolog of NCBI NO: 15221544 NR Description: 2-oxoglutarate-dependent dioxygenase, putative thaliana] >gi|13430546|gb|AAK25895.1|AF360185_1 putative [Arabidopsis thaliana] >gi|14532752|gb|AAK64077.1| putative
  misc_feature (158)..(258): Homolog of NCBI NO: 25406927 NR Description: protein F12K11.6 [imported] - Arabidopsis >gi|6692693|gb|AAF24827.1|AC007592_20 F12K11.6 [Arabidopsis
  misc_feature (1)..(186): Homolog of NCBI NO: 25406927 NR Description: protein F12K11.6 [imported] - Arabidopsis >gi|6692693|gb|AAF24827.1|AC007592_20 F12K11.6 [Arabidopsis
  misc_feature (1)..(258): Homolog of NCBI NO: 15221545 NR Description: 2-oxoglutarate-dependent dioxygenase, putative thaliana] >gi|23296334|gb|AAN13044.1| putative oxidoreductase
  misc_feature (1)..(258): Homolog of NCBI NO: 13878119 NR Description: putative oxidoreductase [Arabidopsis thaliana]
  misc_feature (1)..(174): Homolog of NCBI NO: 30679763 NR Description: 2-oxoglutarate-dependent dioxygenase, putative
  misc_feature (1)..(90): Homolog of NCBI NO: 25406927 NR Description: protein F12K11.6 [imported] - Arabidopsis >gi|6692693|gb|AAF24827.1|AC007592_20 F12K11.6 [Arabidopsis
  misc_feature (67)..(155): Homolog of NCBI NO: 25406927 NR Description: protein F12K11.6 [imported] - Arabidopsis >gi|6692693|gb|AAF24827.1|AC007592_20 F12K11.6 [Arabidopsis

SEQ ID NO: 100599 - DNA, 1581 bp, Arabidopsis thaliana
  misc_feature (1)..(1581): Ceres Seq. ID no. 13605573
  misc_feature: MA Experiment ID: 20000166 Result: Down-regulated in Transcription
  misc_feature: MA Experiment 20000166 PARAMETER Experiment Name: At_100uM_ABA_P Parameter: Age (day) Value: 14
  misc_feature: MA Experiment 20000166 PARAMETER Experiment Name: At_100uM_ABA_P Parameter: Organism Value: A. thaliana
  misc_feature: MA Experiment 20000166 PARAMETER Experiment Name: At_100uM_ABA_P Parameter: Plant Line Value: WS
  misc_feature: MA Experiment 20000166 PARAMETER Experiment Name: At_100uM_ABA_P Parameter: Timepoint (hr) Value: 1
  misc_feature: MA Experiment 20000166 PARAMETER Experiment Name: At_100uM_ABA_P Parameter: Tissue Value: Aerial
  misc_feature: MA Experiment 20000166 PARAMETER Experiment Name: At_100uM_ABA_P Parameter: Treatment Value: 100uM ABA vs. No Treatment
  misc_feature: MA Experiment ID: 20000173 Result: Down-regulated in Transcription
  misc_feature: MA Experiment 20000173 PARAMETER Experiment Name: At_42deg_Heat_P Parameter: Age (day) Value: 14
  misc_feature: MA Experiment 20000173 PARAMETER Experiment Name: At_42deg_Heat_P Parameter: Organism Value: A. thaliana
  misc_feature: MA Experiment 20000173 PARAMETER Experiment Name: At_42deg_Heat_P Parameter: Plant Line Value: WS
  misc_feature: MA Experiment 20000173 PARAMETER Experiment Name: At_42deg_Heat_P Parameter: Temperature (deg C) Value: 42 vs. 22
  misc_feature: MA Experiment 20000173 PARAMETER Experiment Name: At_42deg_Heat_P Parameter: Timepoint (hr) Value: 6
  misc_feature: MA Experiment 20000173 PARAMETER Experiment Name: At_42deg_Heat_P Parameter: Tissue Value: Aerial
  misc_feature: MA Experiment ID: 20000179 Result: Down-regulated in Transcription
  misc_feature: MA Experiment 20000179 PARAMETER Experiment Name: At_Germinating_Seeds_P Parameter: Age (hr) Value: 6 vs. 0
  misc_feature: MA Experiment 20000179 PARAMETER Experiment Name: At_Germinating_Seeds_P Parameter: Tissue Value: Germinating Seeds
  misc_feature: MA Experiment ID: 20000184 Result: Down-regulated in Transcription
  misc_feature: MA Experiment 20000184 PARAMETER Experiment Name: At_Shoots__P Parameter: Age (day) Value: 7
  misc_feature: MA Experiment 20000184 PARAMETER Experiment Name: At_Shoots__P Parameter: Tissue Value: Shoots vs. Whole Plant
  misc_feature: MA Experiment ID: 20000227 Result: Down-regulated in Transcription
  misc_feature: MA Experiment 20000227 PARAMETER Experiment Name: At_Root-Tips-vs-Tops_P Parameter: Tissue Value: Root Tips vs. Root Tops
  misc_feature: MA Experiment ID: 20000234 Result: Down-regulated in Transcription
  misc_feature: MA Experiment 20000234 PARAMETER Experiment Name: At_Siliques_P Parameter: Age (day) Value: 21
  misc_feature: MA Experiment 20000234 PARAMETER Experiment Name: At_Siliques_P Parameter: Organism Value: A. thaliana
  misc_feature: MA Experiment 20000234 PARAMETER Experiment Name: At_Siliques_P Parameter: Plant Line Value: WS
  misc_feature: MA Experiment 20000234 PARAMETER Experiment Name: At_Siliques_P Parameter: Tissue Value: Less Than 5mm Siliques vs. Whole Plant
  misc_feature: MA Experiment ID: 20000235 Result: Down-regulated in Transcription
  misc_feature: MA Experiment 20000235 PARAMETER Experiment Name: At_Siliques_P Parameter: Age (day) Value: 21
  misc_feature: MA Experiment 20000235 PARAMETER Experiment Name: At_Siliques_P Parameter: Organism Value: A. thaliana
  misc_feature: MA Experiment 20000235 PARAMETER Experiment Name: At_Siliques_P Parameter: Plant Line Value: WS
  misc_feature: MA Experiment 20000235 PARAMETER Experiment Name: At_Siliques_P Parameter: Tissue Value: 5-10mm Siliques vs. Whole Plant
  misc_feature: MA Experiment ID: 20000264 Result: Down-regulated in Transcription
  misc_feature: MA Experiment 20000264 PARAMETER Experiment Name: At_Open_Flower_P Parameter: Age (day) Value: 21
  misc_feature: MA Experiment 20000264 PARAMETER Experiment Name: At_Open_Flower_P Parameter: Plant Line Value: WS
  misc_feature: MA Experiment 20000264 PARAMETER Experiment Name: At_Open_Flower_P Parameter: Tissue Value: Open Flower vs. Whole Plant
  misc_feature: MA Experiment ID: 20000265 Result: Down-regulated in Transcription
  misc_feature: MA Experiment 20000265 PARAMETER Experiment Name: At_Open_Flower_P Parameter: Age (day) Value: 21
  misc_feature: MA Experiment 20000265 PARAMETER Experiment Name: At_Open_Flower_P Parameter: Plant Line Value: WS
  misc_feature: MA Experiment 20000265 PARAMETER Experiment Name: At_Open_Flower_P Parameter: Tissue Value: Closed Flower vs. Whole Plant
  misc_feature: MA Experiment ID: 20000286 Result: Down-regulated in Transcription
  misc_feature: MA Experiment 20000286 PARAMETER Experiment Name: At_Open_Flower_P Parameter: Age (day) Value: 21
  misc_feature: MA Experiment 20000286 PARAMETER Experiment Name: At_Open_Flower_P Parameter: Plant Line Value: WS
  misc_feature: MA Experiment 20000286 PARAMETER Experiment Name: At_Open_Flower_P Parameter: Tissue Value: Half Open vs. Whole Plant
  misc_feature: MA Experiment ID: 20000438 Result: Down-regulated in Transcription
  misc_feature: MA Experiment 20000438 PARAMETER Experiment Name: At_Shoots__P Parameter: Age (day) Value: 14
  misc_feature: MA Experiment 20000438 PARAMETER Experiment Name: At_Shoots__P Parameter: Tissue Value: Shoots vs. Whole Plant
  misc_feature: MA Experiment ID: 20001248 Result: Up-regulated in Transcription
  misc_feature: MA Experiment 20001248 PARAMETER Experiment Name: At_Far-red-induction_P Parameter: Age (day) Value: 7
  misc_feature: MA Experiment 20001248 PARAMETER Experiment Name: At_Far-red-induction_P Parameter: Light Value: Far-red vs. White
  misc_feature: MA Experiment 20001248 PARAMETER Experiment Name: At_Far-red-induction_P Parameter: Organism Value: A. thaliana
  misc_feature: MA Experiment 20001248 PARAMETER Experiment Name: At_Far-red-induction_P Parameter: Plant Line Value: Columbia
  misc_feature: MA Experiment 20001248 PARAMETER Experiment Name: At_Far-red-induction_P Parameter: Timepoint (hr) Value: 4
  misc_feature: MA Experiment 20001248 PARAMETER Experiment Name: At_Far-red-induction_P Parameter: Tissue Value: Whole Plant
  misc_feature: MA Experiment ID: 20001905 Result: Down-regulated in Transcription
  misc_feature: MA Experiment 20001905 PARAMETER Experiment Name: At_Drought_Reproduction_P Parameter: Age (day) Value: 40
  misc_feature: MA Experiment 20001905 PARAMETER Experiment Name: At_Drought_Reproduction_P Parameter: Organism Value: A. thaliana
  misc_feature: MA Experiment 20001905 PARAMETER Experiment Name: At_Drought_Reproduction_P Parameter: Plant Line Value: WS
  misc_feature: MA Experiment 20001905 PARAMETER Experiment Name: At_Drought_Reproduction_P Parameter: Timepoint (day) Value: 10
  misc_feature: MA Experiment 20001905 PARAMETER Experiment Name: At_Drought_Reproduction_P Parameter: Tissue Value: Rosettes
  misc_feature: MA Experiment 20001905 PARAMETER Experiment Name: At_Drought_Reproduction_P Parameter: Treatment Value: Drought vs. No Drought
ataaagaaaaaaaagtaaagagatgaagacagcagagctcatattcgttcctctgccggagaccggccatctcttgtcaacgatcgagtttggaaagcgtctactcaatctagaccgtcggatttctatgattacaatcctctccatgaatcttccttacgctcctcacgccgacgcttctcttgcttcgctaacagcctccgagcctggtatccgaatcatcagtctcccggagatccacgatccacctccgatcaagcttcttgacacttcctccgagacttacatcctcgatttcatccataaaaacataccttgtctcagaaaaaccatccaagatttagtctcatcatcatcatcttccggaggtggtagtagtcatgtcgccggcttgattcttgatttcttctgcgttggtttgatcgacatcggccgtgaggtaaaccttccttcctatatcttcatgacttccaactttggtttcttaggggttctacagtatctcccggaacgacaacgtttgactccgtcggagttcgatgagagctccggcgaggaagagttacatattccggcgtttgtgaaccgtgttcccgccaaggttctgccgccaggtgtgttcgataaactctcttacgggtctctggtcaaaatcggcgagcgattacatgaagccaagggtattttggttaattcatttacccaagtggagccttatgctgctgaacatttttctcaaggacgagattaccctcacgtgtatcctgttgggccggttctcaacttaacgggccgtacaaatccgggtctagcttcggcccaatataaagagatgatgaagtggcttgacgagcaaccagactcgtcggttttgttcctgtgtttcgggagcatgggagtcttccctgcacctcagatcacagagattgctcacgcgctcgagcttatcgggtgcaggttcatctgggcgatccgtacgaacatggcgggagatggcgatcctcaggagccgcttccagaaggatttgtcgatcgaacaatgggccgtggaattgtgtgtagttgggctccacaagtggatatcttggcccacaaggcaacaggtggattcgtttctcactgcgggtggaattccgtccaagagagtctatggtacggtgtacctattgcaacgtggccaatgtatgcggagcaacaactgaacgcatttgagatggtgaaggagttgggcttagcagtggagataaggcttgactacgtggcggatggtgatagggttactttggagatcgtgtcagccgatgaaatagccacagccgtccgatcattgatggatagtgataaccccgtgagaaagaaggttatagaaaaatcttcagtggcgaggaaagctgttggtgatggtgggtcttctacggtggccacatgtaattttatcaaagatattcttggggatcacttttgagttttgaccatttcactttcagagcaagataattttgtaatttgtaataaaaataaacaaatgttatcaatttattatggactaaatgttaatcaacgccatttgtgcttgaagac

SEQ ID NO: 100600 - protein, 480 aa, Arabidopsis thaliana; identical to SEQ ID NO: 27630
  peptide (1)..(480): Ceres Seq. ID no. 13605574
  misc_feature (1)..(480): Homolog of NCBI NO: 15222344 NR Description: UDP-glycosyltransferase family [Arabidopsis
  misc_feature (1)..(478): Homolog of NCBI NO: 30680040 NR Description: glycosyltransferase family [Arabidopsis thaliana]
  misc_feature (1)..(477): Homolog of NCBI NO: 15222348 NR Description: UDP-glycosyltransferase family [Arabidopsis
  misc_feature (17)..(478): Homolog of NCBI NO: 21954072 NR Description: putative UDP-glucose glucosyltransferase
  misc_feature (1)..(476): Homolog of NCBI NO: 15227616 NR Description: glycosyltransferase family [Arabidopsis thaliana]
  misc_feature (1)..(472): Homolog of NCBI NO: 15227613 NR Description: glycosyltransferase family [Arabidopsis thaliana]
  misc_feature (1)..(477): Homolog of NCBI NO: 15227610 NR Description: UDP-glycosyltransferase family [Arabidopsis
  misc_feature (1)..(477): Homolog of NCBI NO: 15227606 NR Description: UDP-glycosyltransferase family [Arabidopsis
  misc_feature (1)..(477): Homolog of NCBI NO: 21555082 NR Description: putative flavonol 3-O-glucosyltransferase
  misc_feature (1)..(476): Homolog of NCBI NO: 14349251 NR Description: glucosyltransferase [Nicotiana tabacum]

SEQ ID NO: 100601 - protein, 445 aa, Arabidopsis thaliana; identical to SEQ ID NO: 27631
  peptide (1)..(445): Ceres Seq. ID no. 13605575
  misc_feature (1)..(445): Homolog of NCBI NO: 15222344 NR Description: UDP-glycosyltransferase family [Arabidopsis
  misc_feature (1)..(443): Homolog of NCBI NO: 30680040 NR Description: glycosyltransferase family [Arabidopsis thaliana]
  misc_feature (1)..(442): Homolog of NCBI NO: 15222348 NR Description: UDP-glycosyltransferase family [Arabidopsis
  misc_feature (1)..(443): Homolog of NCBI NO: 21954072 NR Description: putative UDP-glucose glucosyltransferase
  misc_feature (1)..(441): Homolog of NCBI NO: 15227616 NR Description: glycosyltransferase family [Arabidopsis thaliana]
  misc_feature (1)..(437): Homolog of NCBI NO: 15227613 NR Description: glycosyltransferase family [Arabidopsis thaliana]
  misc_feature (1)..(442): Homolog of NCBI NO: 15227610 NR Description: UDP-glycosyltransferase family [Arabidopsis
  misc_feature (1)..(442): Homolog of NCBI NO: 15227606 NR Description: UDP-glycosyltransferase family [Arabidopsis
  misc_feature (1)..(442): Homolog of NCBI NO: 21555082 NR Description: putative flavonol 3-O-glucosyltransferase
  misc_feature (1)..(441): Homolog of NCBI NO: 14349251 NR Description: glucosyltransferase [Nicotiana tabacum]

SEQ ID NO: 100602 - protein, 439 aa, Arabidopsis thaliana
  peptide (1)..(439): Ceres Seq. ID no. 13605576
  misc_feature (1)..(439): Homolog of NCBI NO: 15222344 NR Description: UDP-glycosyltransferase family [Arabidopsis
  misc_feature (1)..(437): Homolog of NCBI NO: 30680040 NR Description: glycosyltransferase family [Arabidopsis thaliana]
  misc_feature (1)..(436): Homolog of NCBI NO: 15222348 NR Description: UDP-glycosyltransferase family [Arabidopsis
  misc_feature (1)..(437): Homolog of NCBI NO: 21954072 NR Description: putative UDP-glucose glucosyltransferase
  misc_feature (1)..(435): Homolog of NCBI NO: 15227616 NR Description: glycosyltransferase family [Arabidopsis thaliana]
  misc_feature (1)..(431): Homolog of NCBI NO: 15227613 NR Description: glycosyltransferase family [Arabidopsis thaliana]
  misc_feature (1)..(436): Homolog of NCBI NO: 15227610 NR Description: UDP-glycosyltransferase family [Arabidopsis
  misc_feature (1)..(436): Homolog of NCBI NO: 15227606 NR Description: UDP-glycosyltransferase family [Arabidopsis
  misc_feature (1)..(436): Homolog of NCBI NO: 21555082 NR Description: putative flavonol 3-O-glucosyltransferase
  misc_feature (1)..(435): Homolog of NCBI NO: 14349251 NR Description: glucosyltransferase [Nicotiana tabacum]
MNLPYAPHADASLASLTASEPGIRIISLPEIHDPPPIKLLDTSSETYILDFIHKNIPCLRKTIQDLVSSSSSSGGGSSHVAGLILDFFCVGLIDIGREVNLPSYIFMTSNFGFLGVLQYLPERQRLTPSEFDESSGEEELHIPAFVNRVPAKVLPPGVFDKLSYGSLVKIGERLHEAKGILVNSFTQVEPYAAEHFSQGRDYPHVYPVGPVLNLTGRTNPGLASAQYKEMMKWLDEQPDSSVLFLCFGSMGVFPAPQITEIAHALELIGCRFIWAIRTNMAGDGDPQEPLPEGFVDRTMGRGIVCSWAPQVDILAHKATGGFVSHCGWNSVQESLWYGVPIATWPMYAEQQLNAFEMVKELGLAVEIRLDYVADGDRVTLEIVSADEIATAVRSLMDSDNPVRKKVIEKSSVARKAVGDGGSSTVATCNFIKDILGDHF

SEQ ID NO: 100603 - DNA, 1685 bp, Arabidopsis thaliana
  misc_feature (1)..(1685): Ceres Seq. ID no. 13605584
  misc_feature: MA Experiment ID: 108474 Result: Down-regulated in Transcription
  misc_feature: MA Experiment 108474 PARAMETER Experiment Name: At_Drought_Flowers_cDNA_P Parameter: Timepoint (hr) Value: null
  misc_feature: MA Experiment 108474 PARAMETER Experiment Name: At_Drought_Flowers_cDNA_P Parameter: Treatment Value: Drought vs. No Drought
  misc_feature: MA Experiment ID: 20000264 Result: Up-regulated in Transcription
  misc_feature: MA Experiment 20000264 PARAMETER Experiment Name: At_Open_Flower_P Parameter: Age (day) Value: 21
  misc_feature: MA Experiment 20000264 PARAMETER Experiment Name: At_Open_Flower_P Parameter: Plant Line Value: WS
  misc_feature: MA Experiment 20000264 PARAMETER Experiment Name: At_Open_Flower_P Parameter: Tissue Value: Open Flower vs. Whole Plant
  misc_feature: MA Experiment ID: 20000265 Result: Up-regulated in Transcription
  misc_feature: MA Experiment 20000265 PARAMETER Experiment Name: At_Open_Flower_P Parameter: Age (day) Value: 21
  misc_feature: MA Experiment 20000265 PARAMETER Experiment Name: At_Open_Flower_P Parameter: Plant Line Value: WS
  misc_feature: MA Experiment 20000265 PARAMETER Experiment Name: At_Open_Flower_P Parameter: Tissue Value: Closed Flower vs. Whole Plant
  misc_feature: MA Experiment ID: 20000286 Result: Up-regulated in Transcription
  misc_feature: MA Experiment 20000286 PARAMETER Experiment Name: At_Open_Flower_P Parameter: Age (day) Value: 21
  misc_feature: MA Experiment 20000286 PARAMETER Experiment Name: At_Open_Flower_P Parameter: Plant Line Value: WS
  misc_feature: MA Experiment 20000286 PARAMETER Experiment Name: At_Open_Flower_P Parameter: Tissue Value: Half Open vs. Whole Plant
  misc_feature: MA Experiment ID: 20000441 Result: Down-regulated in Transcription
  misc_feature: MA Experiment 20000441 PARAMETER Experiment Name: At_1uM_BR-BRZ__P Parameter: Tissue Value: Shoot Apices
  misc_feature: MA Experiment 20000441 PARAMETER Experiment Name: At_1uM_BR-BRZ__P Parameter: Treatment Value: 1uM BR vs. No Treatment
  misc_feature: MA Experiment ID: 20001911 Result: Down-regulated in Transcription
  misc_feature: MA Experiment 20001911 PARAMETER Experiment Name: At_Drought_Reproduction_P Parameter: Age (day) Value: 40
  misc_feature: MA Experiment 20001911 PARAMETER Experiment Name: At_Drought_Reproduction_P Parameter: Organism Value: A. thaliana
  misc_feature: MA Experiment 20001911 PARAMETER Experiment Name: At_Drought_Reproduction_P Parameter: Plant Line Value: WS
  misc_feature: MA Experiment 20001911 PARAMETER Experiment Name: At_Drought_Reproduction_P Parameter: Timepoint (day) Value: 10
  misc_feature: MA Experiment 20001911 PARAMETER Experiment Name: At_Drought_Reproduction_P Parameter: Tissue Value: Flowers
  misc_feature: MA Experiment 20001911 PARAMETER Experiment Name: At_Drought_Reproduction_P Parameter: Treatment Value: Drought vs. No Drought
atctcaataaacaaacactaacaatggtggtcgaagaagattcacgtctcataaatctccaacacaagtacaacccgacaatgcccgaggtggtggaggagctgaagagaatttgggacataagttttccggtggccgccatgagcatattaaactacctaaagaacatgacatccgtcgtgtgtatgggacgactcggtagccttgagctcgcaggaggagccttagccatcggtttcaccaacatcaccggttactccgtcctctctggtttagccaccggtatggaaccattatgtggtcaagccatcggttctaaaaacccttcactcgcttccttaaccctcaagcgaaccatcttcctccttctcttagcttctcttcccatatcactcctttggctaaacctcgcgcctctaatgctgatgctccgccaacaacatgatatcactcgtgtcgcatctctctattgttccttctctttgcctgatcttctcgctaatagtttccttcatcctttacgtatttacttacgttgtaaaggcaccacttggcctttgatgtggtgcacgttagtctccgtccttcttcatcttcccattactgctttcttcacgttttacatctctctcggagttcccggagtcgccgtctcttcttttcttaccaacttcatctctttgtcgcttctcctttgctacatctacttggaaaacaacaacaacgacaaaaccacttccaagtctctttgtcttgatacgccgttgatgctgtatggttcgagagactccggtgaaaatgatgtgtggtcaacgctggttaaattcgctgttccgagctgtatagcggtttgcttggagtggtggtggtacgagttcatgacggtcctcgctggatatctccccgagccgaaggtggcgctagcagcagccgccatcgtgatacaaacaacctcattgatgtatacaatcccaacggccctctcggccgcggtatccacgagggtaagcaacgagttaggagcaggacggccagagaaagcaaaaacagcggcgactgtggctgtcggagccgccgtggcagtgtcagtgtttggacttgtggggaccaccgtggggagagaagcttggggaaaagttttcaccgccgacaaagttgtcctcgagctgacggcggcggttattccggtgattggagcttgtgagcttgccaactgtcctcagaccattagctgtggaatcttacgtggcagtgcgaggccaggtataggggccaagattaatttctacgccttctatgtagttggagcaccagtggcggttgttttagcgtttgtgtggggtttaggcttcatgggcctatgctatggcttgcttggggcacagctagcttgtgcaatctccattttgaccgttgtttataacacagattggaacaaagagtccttgaaggctcatgacttggtgggcaagaacgtcatttcacctaatgtcgatcaaattattgtcaaatgcgaagaaggcctacactaacagtttttccttctcttttctttttgttcttcatatatactatctccatttatgtctcaatgatttgcttttgttttaaaacttatacatttatgtaagtgtcttcattggacaaggacagaatgtaaaactttatgaaacacaaaactgttg

SEQ ID NO: 100604 - protein, 509 aa, Arabidopsis thaliana
  peptide (1)..(509): Ceres Seq. ID no. 13605585
  misc_feature (8)..(509): Homolog of NCBI NO: 15239797 NR Description: MATE efflux protein - related [Arabidopsis >gi|10176946|dbj|BAB10095.1| similarity to unknown protein [Arabidopsis thaliana]
  misc_feature (21)..(484): Homolog of NCBI NO: 15217599 NR Description: MATE efflux protein - related [Arabidopsis
  misc_feature (28)..(494): Homolog of NCBI NO: 28376699 NR Description: putative MATE efflux membrane protein [Oryza
  misc_feature (18)..(502): Homolog of NCBI NO: 15233459 NR Description: MATE efflux protein - related [Arabidopsis
  misc_feature (18)..(490): Homolog of NCBI NO: 18406257 NR Description: MATE efflux protein - related [Arabidopsis
  misc_feature (25)..(487): Homolog of NCBI NO: 15241158 NR Description: MATE efflux protein - related [Arabidopsis
  misc_feature (33)..(506): Homolog of NCBI NO: 38567909 NR Description: OSJNBa0088I22.5 [Oryza sativa (japonica
  misc_feature (24)..(491): Homolog of NCBI NO: 15235905 NR Description: MATE efflux protein - related [Arabidopsis
  misc_feature (31)..(484): Homolog of NCBI NO: 15242265 NR Description: MATE efflux protein - related [Arabidopsis
  misc_feature (31)..(484): Homolog of NCBI NO: 39104576 NR Description: putative integral membrane protein [Arabidopsis
LNKQTLTMVVEEDSRLINLQHKYNPTMPEVVEELKRIWDISFPVAAMSILNYLKNMTSVVCMGRLGSLELAGGALAIGFTNITGYSVLSGLATGMEPLCGQAIGSKNPSLASLTLKRTIFLLLLASLPISLLWLNLAPLMLMLRQQHDITRVASLYCSFSLPDLLANSFLHPLRIYLRCKGTTWPLMWCTLVSVLLHLPITAFFTFYISLGVPGVAVSSFLTNFISLSLLLCYIYLENNNNDKTTSKSLCLDTPLMLYGSRDSGENDVWSTLVKFAVPSCIAVCLEWWWYEFMTVLAGYLPEPKVALAAAAIVIQTTSLMYTIPTALSAAVSTRVSNELGAGRPEKAKTAATVAVGAAVAVSVFGLVGTTVGREAWGKVFTADKVVLELTAAVIPVIGACELANCPQTISCGILRGSARPGIGAKINFYAFYVVGAPVAVVLAFVWGLGFMGLCYGLLGAQLACAISILTVVYNTDWNKESLKAHDLVGKNVISPNVDQIIVKCEEGLH

SEQ ID NO: 100605 - protein, 502 aa, Arabidopsis thaliana
  peptide (1)..(502): Ceres Seq. ID no. 13605586
  misc_feature (1)..(502): Homolog of NCBI NO: 15239797 NR Description: MATE efflux protein - related [Arabidopsis >gi|10176946|dbj|BAB10095.1| similarity to unknown protein [Arabidopsis thaliana]
  misc_feature (14)..(477): Homolog of NCBI NO: 15217599 NR Description: MATE efflux protein - related [Arabidopsis
  misc_feature (21)..(487): Homolog of NCBI NO: 28376699 NR Description: putative MATE efflux membrane protein [Oryza
  misc_feature (11)..(495): Homolog of NCBI NO: 15233459 NR Description: MATE efflux protein - related [Arabidopsis
  misc_feature (11)..(483): Homolog of NCBI NO: 18406257 NR Description: MATE efflux protein - related [Arabidopsis
  misc_feature (18)..(480): Homolog of NCBI NO: 15241158 NR Description: MATE efflux protein - related [Arabidopsis
  misc_feature (26)..(499): Homolog of NCBI NO: 38567909 NR Description: OSJNBa0088I22.5 [Oryza sativa (japonica
  misc_feature (17)..(484): Homolog of NCBI NO: 15235905 NR Description: MATE efflux protein - related [Arabidopsis
  misc_feature (24)..(477): Homolog of NCBI NO: 15242265 NR Description: MATE efflux protein - related [Arabidopsis
  misc_feature (24)..(477): Homolog of NCBI NO: 39104576 NR Description: putative integral membrane protein [Arabidopsis
MVVEEDSRLINLQHKYNPTMPEVVEELKRIWDISFPVAAMSILNYLKNMTSVVCMGRLGSLELAGGALAIGFTNITGYSVLSGLATGMEPLCGQAIGSKNPSLASLTLKRTIFLLLLASLPISLLWLNLAPLMLMLRQQHDITRVASLYCSFSLPDLLANSFLHPLRIYLRCKGTTWPLMWCTLVSVLLHLPITAFFTFYISLGVPGVAVSSFLTNFISLSLLLCYIYLENNNNDKTTSKSLCLDTPLMLYGSRDSGENDVWSTLVKFAVPSCIAVCLEWWWYEFMTVLAGYLPEPKVALAAAAIVIQTTSLMYTIPTALSAAVSTRVSNELGAGRPEKAKTAATVAVGAAVAVSVFGLVGTTVGREAWGKVFTADKVVLELTAAVIPVIGACELANCPQTISCGILRGSARPGIGAKINFYAFYVVGAPVAVVLAFVWGLGFMGLCYGLLGAQLACAISILTVVYNTDWNKESLKAHDLVGKNVISPNVDQIIVKCEEGLH

SEQ ID NO: 100606 - protein, 483 aa, Arabidopsis thaliana
  peptide (1)..(483): Ceres Seq. ID no. 13605587
  misc_feature (1)..(483): Homolog of NCBI NO: 15239797 NR Description: MATE efflux protein - related [Arabidopsis >gi|10176946|dbj|BAB10095.1| similarity to unknown protein [Arabidopsis thaliana]
  misc_feature (1)..(458): Homolog of NCBI NO: 15217599 NR Description: MATE efflux protein - related [Arabidopsis
  misc_feature (2)..(468): Homolog of NCBI NO: 28376699 NR Description: putative MATE efflux membrane protein [Oryza
  misc_feature (1)..(476): Homolog of NCBI NO: 15233459 NR Description: MATE efflux protein - related [Arabidopsis
  misc_feature (1)..(464): Homolog of NCBI NO: 18406257 NR Description: MATE efflux protein - related [Arabidopsis
  misc_feature (1)..(461): Homolog of NCBI NO: 15241158 NR Description: MATE efflux protein - related [Arabidopsis
  misc_feature (7)..(480): Homolog of NCBI NO: 38567909 NR Description: OSJNBa0088I22.5 [Oryza sativa (japonica
  misc_feature (1)..(465): Homolog of NCBI NO: 15235905 NR Description: MATE efflux protein - related [Arabidopsis
  misc_feature (5)..(458): Homolog of NCBI NO: 15242265 NR Description: MATE efflux protein - related [Arabidopsis
  misc_feature (5)..(458): Homolog of NCBI NO: 39104576 NR Description: putative integral membrane protein [Arabidopsis
MPEVVEELKRIWDISFPVAAMSILNYLKNMTSVVCMGRLGSLELAGGALAIGFTNITGYSVLSGLATGMEPLCGQAIGSKNPSLASLTLKRTIFLLLLASLPISLLWLNLAPLMLMLRQQHDITRVASLYCSFSLPDLLANSFLHPLRIYLRCKGTTWPLMWCTLVSVLLHLPITAFFTFYISLGVPGVAVSSFLTNFISLSLLLCYIYLENNNNDKTTSKSLCLDTPLMLYGSRDSGENDVWSTLVKFAVPSCIAVCLEWWWYEFMTVLAGYLPEPKVALAAAAIVIQTTSLMYTIPTALSAAVSTRVSNELGAGRPEKAKTAATVAVGAAVAVSVFGLVGTTVGREAWGKVFTADKVVLELTAAVIPVIGACELANCPQTISCGILRGSARPGIGAKINFYAFYVVGAPVAVVLAFVWGLGFMGLCYGLLGAQLACAISILTVVYNTDWNKESLKAHDLVGKNVISPNVDQIIVKCEEGLH

SEQ ID NO: 100607 - DNA, 872 bp, Arabidopsis thaliana
  misc_feature (1)..(872): Ceres Seq. ID no. 13605599
  misc_feature: MA Experiment ID: 108595 Result: Down-regulated in Transcription
  misc_feature: MA Experiment 108595 PARAMETER Experiment Name: At_Ler-pi_Ovule_cDNA_P Parameter: Plant Line Value: null
  misc_feature: MA Experiment ID: 20000439 Result: Down-regulated in Transcription
  misc_feature: MA Experiment 20000439 PARAMETER Experiment Name: At_Roots__P Parameter: Age (day) Value: 14 vs. 21
  misc_feature: MA Experiment 20000439 PARAMETER Experiment Name: At_Roots__P Parameter: Organism Value: A. thaliana
  misc_feature: MA Experiment 20000439 PARAMETER Experiment Name: At_Roots__P Parameter: Tissue Value: Roots vs. Whole Plant
  misc_feature: MA Experiment ID: 20001911 Result: Up-regulated in Transcription
  misc_feature: MA Experiment 20001911 PARAMETER Experiment Name: At_Drought_Reproduction_P Parameter: Age (day) Value: 40
  misc_feature: MA Experiment 20001911 PARAMETER Experiment Name: At_Drought_Reproduction_P Parameter: Organism Value: A. thaliana
  misc_feature: MA Experiment 20001911 PARAMETER Experiment Name: At_Drought_Reproduction_P Parameter: Plant Line Value: WS
  misc_feature: MA Experiment 20001911 PARAMETER Experiment Name: At_Drought_Reproduction_P Parameter: Timepoint (day) Value: 10
  misc_feature: MA Experiment 20001911 PARAMETER Experiment Name: At_Drought_Reproduction_P Parameter: Tissue Value: Flowers
  misc_feature: MA Experiment 20001911 PARAMETER Experiment Name: At_Drought_Reproduction_P Parameter: Treatment Value: Drought vs. No Drought
cgaaacaaaaactcgtggaggagatatgcaattgctgacgctaaatccggcggccatttccaggacgccgccgcaagccatagacccttcctcatcctcgagtcttcttcttccttttcctcagattttgagctcccaacgcgctcttggtcttgtagctaggccttgtaatccacttcgacgaggattatctaggtttttatcaagtcgacagcttttccgacgatccaaagttgtcaaggcagtagcaaccccagaccccatcttggaagtacctttaactgaggaaaatgtagaaagcgttttggatgaaatccgaccttaccttatgtctgatggtggtaatgtggcattacatgagatcgatggaaatattgtgcgggttaagctgcagggagcatgcggatcatgtccaagttctactatgacaatgaagatgggtattgagcgtcgtctaatggaaaagatccctgaaatagtggctgtagaagctcttccagatgaagagactggccttgaactgaatgaggaaaacattgaaaaggtgctggaagaaatcaggccttacttaatcggaacagcagatggatcgcttgatctagtggagattgaagatccaatcgtgaagataagaatcacaggacctgcagctggagtcatgacagttcgtgtagcagtcactcagaaactaagagagaaaattccatcaatcgcagctgttcaacttatatagaaacaacaactcttcttgtatgctttgtattagctcccttgtatagttgttgtgcatagattatgtgttttgttgacatttgctatttgtcctcaaataagttttcaacatttttgttttacttagaaaaaaagtcctt

SEQ ID NO: 100608 - protein, 243 aa, Arabidopsis thaliana; identical to SEQ ID NO: 38446
  peptide (1)..(243): Ceres Seq. ID no. 13605600
  misc_feature (98)..(165): Pfam Name: NifU-like domain Pfam Description: NifU-like domain
  misc_feature (9)..(243): Homolog of NCBI NO: 18423084 NR Description: expressed protein [Arabidopsis thaliana] unknown protein [Arabidopsis thaliana] AT5g49940/K9P8_8 [Arabidopsis thaliana]
  misc_feature (9)..(222): Homolog of NCBI NO: 8777425 NR Description: gene_id:K9P8.8~pir||T09896~strong similarity to
  misc_feature (56)..(243): Homolog of NCBI NO: 30698492 NR Description: NifU1 [Oryza sativa (japonica cultivar-group)]
  misc_feature (7)..(243): Homolog of NCBI NO: 18416645 NR Description: nitrogen fixation protein, putative (NifU) thaliana] >gi|28207820|emb|CAD55560.1| NFU3 protein [Arabidopsis
  misc_feature (28)..(243): Homolog of NCBI NO: 7485833 NR Description: hypothetical protein F20B18.20 - Arabidopsis >gi|4538920|emb|CAB39656.1| nitrogen fixation like protein thaliana] >gi|7269442|emb|CAB79446.1| nitrogen fixation like
  misc_feature (42)..(243): Homolog of NCBI NO: 21554503 NR Description: nitrogen fixation like protein [Arabidopsis
  misc_feature (91)..(162): Homolog of NCBI NO: 33860975 NR Description: NifU-like protein [Prochlorococcus marinus subsp.
  misc_feature (93)..(163): Homolog of NCBI NO: 16332125 NR Description: NifU protein [Synechocystis sp. PCC 6803]
  misc_feature (93)..(163): Homolog of NCBI NO: 17228804 NR Description: NifU like protein [Nostoc sp. PCC 7120]
  misc_feature (93)..(162): Homolog of NCBI NO: 33239869 NR Description: Thioredoxin family protein [Prochlorococcus subsp. marinus str. CCMP1375] >gi|33237395|gb|AAP99463.1| family protein [Prochlorococcus marinus subsp. marinus str.

SEQ ID NO: 100609 - protein, 235 aa, Arabidopsis thaliana; identical to SEQ ID NO: 38447
  peptide (1)..(235): Ceres Seq. ID no. 13605601
  misc_feature (90)..(157): Pfam Name: NifU-like domain Pfam Description: NifU-like domain
  misc_feature (1)..(235): Homolog of NCBI NO: 18423084 NR Description: expressed protein [Arabidopsis thaliana] unknown protein [Arabidopsis thaliana] AT5g49940/K9P8_8 [Arabidopsis thaliana]
  misc_feature (1)..(214): Homolog of NCBI NO: 8777425 NR Description: gene_id:K9P8.8~pir||T09896~strong similarity to
  misc_feature (48)..(235): Homolog of NCBI NO: 30698492 NR Description: NifU1 [Oryza sativa (japonica cultivar-group)]
  misc_feature (1)..(235): Homolog of NCBI NO: 18416645 NR Description: nitrogen fixation protein, putative (NifU) thaliana] >gi|28207820|emb|CAD55560.1| NFU3 protein [Arabidopsis
  misc_feature (20)..(235): Homolog of NCBI NO: 7485833 NR Description: hypothetical protein F20B18.20 - Arabidopsis >gi|4538920|emb|CAB39656.1| nitrogen fixation like protein thaliana] >gi|7269442|emb|CAB79446.1| nitrogen fixation like
  misc_feature (34)..(235): Homolog of NCBI NO: 21554503 NR Description: nitrogen fixation like protein [Arabidopsis
  misc_feature (83)..(154): Homolog of NCBI NO: 33860975 NR Description: NifU-like protein [Prochlorococcus marinus subsp.
  misc_feature (85)..(155): Homolog of NCBI NO: 16332125 NR Description: NifU protein [Synechocystis sp. PCC 6803]
  misc_feature (85)..(155): Homolog of NCBI NO: 17228804 NR Description: NifU like protein [Nostoc sp. PCC 7120]
  misc_feature (85)..(154): Homolog of NCBI NO: 33239869 NR Description: Thioredoxin family protein [Prochlorococcus subsp. marinus str. CCMP1375] >gi|33237395|gb|AAP99463.1| family protein [Prochlorococcus marinus subsp. marinus str.

SEQ ID NO: 100610 - protein, 134 aa, Arabidopsis thaliana; identical to SEQ ID NO: 38448
  peptide (1)..(134): Ceres Seq. ID no. 13605602
  misc_feature (1)..(56): Pfam Name: NifU-like domain Pfam Description: NifU-like domain
  misc_feature (1)..(134): Homolog of NCBI NO: 18423084 NR Description: expressed protein [Arabidopsis thaliana] unknown protein [Arabidopsis thaliana] AT5g49940/K9P8_8 [Arabidopsis thaliana]
  misc_feature (1)..(113): Homolog of NCBI NO: 8777425 NR Description: gene_id:K9P8.8~pir||T09896~strong similarity to
  misc_feature (1)..(134): Homolog of NCBI NO: 30698492 NR Description: NifU1 [Oryza sativa (japonica cultivar-group)]
  misc_feature (1)..(134): Homolog of NCBI NO: 18416645 NR Description: nitrogen fixation protein, putative (NifU) thaliana] >gi|28207820|emb|CAD55560.1| NFU3 protein [Arabidopsis
  misc_feature (1)..(134): Homolog of NCBI NO: 7485833 NR Description: hypothetical protein F20B18.20 - Arabidopsis >gi|4538920|emb|CAB39656.1| nitrogen fixation like protein thaliana] >gi|7269442|emb|CAB79446.1| nitrogen fixation like
  misc_feature (1)..(134): Homolog of NCBI NO: 21554503 NR Description: nitrogen fixation like protein [Arabidopsis
  misc_feature (1)..(53): Homolog of NCBI NO: 33860975 NR Description: NifU-like protein [Prochlorococcus marinus subsp.
  misc_feature (1)..(54): Homolog of NCBI NO: 16332125 NR Description: NifU protein [Synechocystis sp. PCC 6803]
  misc_feature (1)..(54): Homolog of NCBI NO: 17228804 NR Description: NifU like protein [Nostoc sp. PCC 7120]
  misc_feature (1)..(53): Homolog of NCBI NO: 33239869 NR Description: Thioredoxin family protein [Prochlorococcus subsp. marinus str. CCMP1375] >gi|33237395|gb|AAP99463.1| family protein [Prochlorococcus marinus subsp. marinus str.

SEQ ID NO: 100611 - DNA, 2261 bp, Arabidopsis thaliana
  misc_feature (1)..(2261): Ceres Seq. ID no. 13605611
  misc_feature: MA Experiment ID: 20000307 Result: Up-regulated in Transcription
  misc_feature: MA Experiment 20000307 PARAMETER Experiment Name: At_Germinating_Seeds_Sub_P Parameter: Age (hr) Value: 24 vs. 0
  misc_feature: MA Experiment 20000307 PARAMETER Experiment Name: At_Germinating_Seeds_Sub_P Parameter: Organism Value: A. thaliana
  misc_feature: MA Experiment 20000307 PARAMETER Experiment Name: At_Germinating_Seeds_Sub_P Parameter: Plant Line Value: WS
  misc_feature: MA Experiment 20000307 PARAMETER Experiment Name: At_Germinating_Seeds_Sub_P Parameter: Tissue Value: Germinating Seeds
  misc_feature: MA Experiment ID: 20000315 Result: Down-regulated in Transcription
  misc_feature: MA Experiment 20000315 PARAMETER Experiment Name: At_14day_Shoots-Roots_Sub_P Parameter: Age (day) Value: 14
  misc_feature: MA Experiment 20000315 PARAMETER Experiment Name: At_14day_Shoots-Roots_Sub_P Parameter: Organism Value: A. thaliana
  misc_feature: MA Experiment 20000315 PARAMETER Experiment Name: At_14day_Shoots-Roots_Sub_P Parameter: Plant Line Value: WS
  misc_feature: MA Experiment 20000315 PARAMETER Experiment Name: At_14day_Shoots-Roots_Sub_P Parameter: Tissue Value: Shoots vs. Whole Plant
  misc_feature: MA Experiment ID: 20000328 Result: Down-regulated in Transcription
  misc_feature: MA Experiment 20000328 PARAMETER Experiment Name: At_42deg_Heat_Sub_P Parameter: Age (day) Value: 14
  misc_feature: MA Experiment 20000328 PARAMETER Experiment Name: At_42deg_Heat_Sub_P Parameter: Organism Value: A. thaliana
  misc_feature: MA Experiment 20000328 PARAMETER Experiment Name: At_42deg_Heat_Sub_P Parameter: Plant Line Value: WS
  misc_feature: MA Experiment 20000328 PARAMETER Experiment Name: At_42deg_Heat_Sub_P Parameter: Temperature (deg C) Value: 42 vs. 22
  misc_feature: MA Experiment 20000328 PARAMETER Experiment Name: At_42deg_Heat_Sub_P Parameter: Timepoint (hr) Value: 6
  misc_feature: MA Experiment 20000328 PARAMETER Experiment Name: At_42deg_Heat_Sub_P Parameter: Tissue Value: Aerial
aaaacagagaattaaagaatcgatttagaccaaattgtatgtgattcgttcggacaagaagcgatgatgaggggatctcggtttctcctctctcgcgcttctctgtatcaccgtcttcgctctgatcatcaccatcacagtttctccagttttatcaaacgtagctcaattcagagatcaccagctatcaatgcattcttcaccgatccatctccatctccatctccagtcaacgcacgagtcttcttcttctcaacttcaacttcaactccaaatcaagatcaaaccaaaacagcatcatctaagaagatcctccgcacgatttcaagctatctatggatgaaagacaacccagaactccgattcagagtcatcgctgctttagcgtgtctcataggagctaagttcttgaatgttcaagttcctttcctcttcaaattatctatcgatttactctcttcatattcatcttcaacaatcactgattcaaatccttatctacttgctgctttcgctactccttcttccgttctcattggctatggcattgctcgatctggatcttcagcttttaacgagcttcgtactgctgttttctccaaagtatctctccgcacaatacgatctgtttctcgtaaagtgctctcgcatttacatgatcttgatcttcgttaccatttgaatcgagaaacaggagctttgaatagaatcattgaccgtggaagtcgcgcgattaacacgatcctctctgctatggttttcaatgttgttccaacgatcttggagatatcaatggtcacaggtatattagcatacaattttggacctgtttttgctttgatcacttctctttccgttggatcatacatagctttcacattggttgtgacacagtatagaactaagtttagaaaagctatgaaccaagctgataatgatgcaagcacaagagctattgattctcttgtaaactacgagactgttaagtattttaacaacgaagattacgaagcgagaaagtacgatgatttactcggaagatatgaagatgctgcattgcaaactcagaagagtcttgcgtttttagattttggacagagttttatatttagtacagctttgtcaacatcaatggtgttgtgttctcaagggattatgaatggagagatgacagttggtgatttggtgatggtgaatggtcttctctttcaattgtctcttcctctttactttctcggtggtgtttaccgtgaaaccgttcagggtcttgttgatatgaaatcattgttccagttgctagaggagagatccgatattggagataaagatacagagacaaagctacctcctcttgttctgagaggtggaagcatcagttttgagaatgtacattttagttatctgccagagagaaagattttggatgggatttcatttgaggtaccggcagggaaaagtgtagcgattgttggtagtagcggaagcggcaaatcgacgattcttagaatgattttcaggttctttgacacagattctggtaatgttaggattgatggtcaagatataaaggaagtgacactagagagtcttcgaagctgcattggagttgtccctcaagatactgtgctcttcaatgacacaatatttcacaacattcactatggaaacctttcagcaacagaagaagaggtgtacgatgcagctaggcgagcagtgattcacgatacgatcatgaaatttccggataaatattcgaccgcggtgggagaaagagggctgatgctgagtggtggagaaaaacaaagagtggcacttgctcgtgcctttctgaaatcaccagcgattctcttgtgtgacgaagcaacgaatgcgcttgatagtaaaaccgaggcagagataatgaaaacgttcaggtcgctagcgagtaacagaacatgcattttcattgcacataggctgaccactgcgatgcaatgtgatgagataatagtaatggagaaagggaaagtggtggaaaaagggacacaccaagtgttgttggagaaatctggcagatacgctaaattatggacacaacaaaacagtacactggaggtgtgaatctcaagagctagacagctagtgtttgggttctgttttcgcctcactaattctttttttttgctgacttcccttatttttggaatcatatatttgcaaatatcattgatggtactttgtagccttgttacaaaaaataaaacatatttgtaacctaatat

SEQ ID NO: 100612 - protein, 678 aa, Arabidopsis thaliana
  peptide (1)..(678): Ceres Seq. ID no. 13605612
  misc_feature (103)..(388): Pfam Name: ABC transporter transmembrane region Pfam Description: ABC transporter transmembrane region
  misc_feature (1)..(678): Homolog of NCBI NO: 15235382 NR Description: ABC transporter family protein [Arabidopsis
  misc_feature (36)..(678): Homolog of NCBI NO: 15237155 NR Description: ABC transporter family protein [Arabidopsis
  misc_feature (36)..(678): Homolog of NCBI NO: 9187883 NR Description: mitochondrial half-ABC transporter [Arabidopsis
  misc_feature (69)..(677): Homolog of NCBI NO: 8928549 NR Description: ATP-binding cassette, sub-family B, member 7,
  misc_feature (69)..(677): Homolog of NCBI NO: 13623447 NR Description: ATP-binding cassette, sub-family B (MDR/TAP),
  misc_feature (69)..(677): Homolog of NCBI NO: 30584297 NR Description: Homo sapiens ATP-binding cassette, sub-family B
  misc_feature (69)..(677): Homolog of NCBI NO: 5702098 NR Description: ABC transporter [Homo sapiens]
  misc_feature (69)..(677): Homolog of NCBI NO: 3228279 NR Description: ABC transporter 7 protein [Homo sapiens]
  misc_feature (69)..(677): Homolog of NCBI NO: 4757706 NR Description: ATP-binding cassette, sub-family B, member 7; cassette 7 [Homo sapiens] >gi|3329370|gb|AAC39865.1| ATP binding
  misc_feature (4)..(672): Homolog of NCBI NO: 32407768 NR Description: hypothetical protein [Neurospora crassa]
MMRGSRFLLSRASLYHRLRSDHHHHSFSSFIKRSSIQRSPAINAFFTDPSPSPSPVNARVFFFSTSTSTPNQDQTKTASSKKILRTISSYLWMKDNPELRFRVIAALACLIGAKFLNVQVPFLFKLSIDLLSSYSSSTITDSNPYLLAAFATPSSVLIGYGIARSGSSAFNELRTAVFSKVSLRTIRSVSRKVLSHLHDLDLRYHLNRETGALNRIIDRGSRAINTILSAMVFNVVPTILEISMVTGILAYNFGPVFALITSLSVGSYIAFTLVVTQYRTKFRKAMNQADNDASTRAIDSLVNYETVKYFNNEDYEARKYDDLLGRYEDAALQTQKSLAFLDFGQSFIFSTALSTSMVLCSQGIMNGEMTVGDLVMVNGLLFQLSLPLYFLGGVYRETVQGLVDMKSLFQLLEERSDIGDKDTETKLPPLVLRGGSISFENVHFSYLPERKILDGISFEVPAGKSVAIVGSSGSGKSTILRMIFRFFDTDSGNVRIDGQDIKEVTLESLRSCIGVVPQDTVLFNDTIFHNIHYGNLSATEEEVYDAARRAVIHDTIMKFPDKYSTAVGERGLMLSGGEKQRVALARAFLKSPAILLCDEATNALDSKTEAEIMKTFRSLASNRTCIFIAHRLTTAMQCDEIIVMEKGKVVEKGTHQVLLEKSGRYAKLWTQQNSTLEV

SEQ ID NO: 100613 - protein, 677 aa, Arabidopsis thaliana
  peptide (1)..(677): Ceres Seq. ID no. 13605613
  misc_feature (102)..(387): Pfam Name: ABC transporter transmembrane region Pfam Description: ABC transporter transmembrane region
  misc_feature (1)..(677): Homolog of NCBI NO: 15235382 NR Description: ABC transporter family protein [Arabidopsis
  misc_feature (35)..(677): Homolog of NCBI NO: 15237155 NR Description: ABC transporter family protein [Arabidopsis
  misc_feature (35)..(677): Homolog of NCBI NO: 9187883 NR Description: mitochondrial half-ABC transporter [Arabidopsis
  misc_feature (68)..(676): Homolog of NCBI NO: 8928549 NR Description: ATP-binding cassette, sub-family B, member 7,
  misc_feature (68)..(676): Homolog of NCBI NO: 30584297 NR Description: Homo sapiens ATP-binding cassette, sub-family B
  misc_feature (68)..(676): Homolog of NCBI NO: 13623447 NR Description: ATP-binding cassette, sub-family B (MDR/TAP),
  misc_feature (68)..(676): Homolog of NCBI NO: 5702098 NR Description: ABC transporter [Homo sapiens]
  misc_feature (68)..(676): Homolog of NCBI NO: 3228279 NR Description: ABC transporter 7 protein [Homo sapiens]
  misc_feature (68)..(676): Homolog of NCBI NO: 4757706 NR Description: ATP-binding cassette, sub-family B, member 7; cassette 7 [Homo sapiens] >gi|3329370|gb|AAC39865.1| ATP binding
  misc_feature (3)..(671): Homolog of NCBI NO: 32407768 NR Description: hypothetical protein [Neurospora crassa]
MRGSRFLLSRASLYHRLRSDHHHHSFSSFIKRSSIQRSPAINAFFTDPSPSPSPVNARVFFFSTSTSTPNQDQTKTASSKKILRTISSYLWMKDNPELRFRVIAALACLIGAKFLNVQVPFLFKLSIDLLSSYSSSTITDSNPYLLAAFATPSSVLIGYGIARSGSSAFNELRTAVFSKVSLRTIRSVSRKVLSHLHDLDLRYHLNRETGALNRIIDRGSRAINTILSAMVFNVVPTILEISMVTGILAYNFGPVFALITSLSVGSYIAFTLVVTQYRTKFRKAMNQADNDASTRAIDSLVNYETVKYFNNEDYEARKYDDLLGRYEDAALQTQKSLAFLDFGQSFIFSTALSTSMVLCSQGIMNGEMTVGDLVMVNGLLFQLSLPLYFLGGVYRETVQGLVDMKSLFQLLEERSDIGDKDTETKLPPLVLRGGSISFENVHFSYLPERKILDGISFEVPAGKSVAIVGSSGSGKSTILRMIFRFFDTDSGNVRIDGQDIKEVTLESLRSCIGVVPQDTVLFNDTIFHNIHYGNLSATEEEVYDAARRAVIHDTIMKFPDKYSTAVGERGLMLSGGEKQRVALARAFLKSPAILLCDEATNALDSKTEAEIMKTFRSLASNRTCIFIAHRLTTAMQCDEIIVMEKGKVVEKGTHQVLLEKSGRYAKLWTQQNSTLEV

SEQ ID NO: 100614 - protein, 586 aa, Arabidopsis thaliana
  peptide (1)..(586): Ceres Seq. ID no. 13605614
  misc_feature (11)..(296): Pfam Name: ABC transporter transmembrane region Pfam Description: ABC transporter transmembrane region
  misc_feature (1)..(586): Homolog of NCBI NO: 15235382 NR Description: ABC transporter family protein [Arabidopsis
  misc_feature (1)..(586): Homolog of NCBI NO: 15237155 NR Description: ABC transporter family protein [Arabidopsis
  misc_feature (1)..(586): Homolog of NCBI NO: 9187883 NR Description: mitochondrial half-ABC transporter [Arabidopsis
  misc_feature (1)..(585): Homolog of NCBI NO: 8928549 NR Description: ATP-binding cassette, sub-family B, member 7,
  misc_feature (1)..(585): Homolog of NCBI NO: 13623447 NR Description: ATP-binding cassette, sub-family B (MDR/TAP),
  misc_feature (1)..(585): Homolog of NCBI NO: 30584297 NR Description: Homo sapiens ATP-binding cassette, sub-family B
  misc_feature (1)..(585): Homolog of NCBI NO: 5702098 NR Description: ABC transporter [Homo sapiens]
  misc_feature (1)..(585): Homolog of NCBI NO: 3228279 NR Description: ABC transporter 7 protein [Homo sapiens]
  misc_feature (1)..(585): Homolog of NCBI NO: 4757706 NR Description: ATP-binding cassette, sub-family B, member 7; cassette 7 [Homo sapiens] >gi|3329370|gb|AAC39865.1| ATP binding
  misc_feature (1)..(580): Homolog of NCBI NO: 32407768 NR Description: hypothetical protein [Neurospora crassa]
MKDNPELRFRVIAALACLIGAKFLNVQVPFLFKLSIDLLSSYSSSTITDSNPYLLAAFATPSSVLIGYGIARSGSSAFNELRTAVFSKVSLRTIRSVSRKVLSHLHDLDLRYHLNRETGALNRIIDRGSRAINTILSAMVFNVVPTILEISMVTGILAYNFGPVFALITSLSVGSYIAFTLVVTQYRTKFRKAMNQADNDASTRAIDSLVNYETVKYFNNEDYEARKYDDLLGRYEDAALQTQKSLAFLDFGQSFIFSTALSTSMVLCSQGIMNGEMTVGDLVMVNGLLFQLSLPLYFLGGVYRETVQGLVDMKSLFQLLEERSDIGDKDTETKLPPLVLRGGSISFENVHFSYLPERKILDGISFEVPAGKSVAIVGSSGSGKSTILRMIFRFFDTDSGNVRIDGQDIKEVTLESLRSCIGVVPQDTVLFNDTIFHNIHYGNLSATEEEVYDAARRAVIHDTIMKFPDKYSTAVGERGLMLSGGEKQRVALARAFLKSPAILLCDEATNALDSKTEAEIMKTFRSLASNRTCIFIAHRLTTAMQCDEIIVMEKGKVVEKGTHQVLLEKSGRYAKLWTQQNSTLEV

SEQ ID NO: 100615 - DNA, 785 bp, Arabidopsis thaliana
  misc_feature (1)..(785): Ceres Seq. ID no. 13605623
  misc_feature: MA Experiment ID: 20000171 Result: Down-regulated in Transcription
  misc_feature: MA Experiment 20000171 PARAMETER Experiment Name: At_42deg_Heat_P Parameter: Age (day) Value: 14
  misc_feature: MA Experiment 20000171 PARAMETER Experiment Name: At_42deg_Heat_P Parameter: Organism Value: A. thaliana
  misc_feature: MA Experiment 20000171 PARAMETER Experiment Name: At_42deg_Heat_P Parameter: Plant Line Value: WS
  misc_feature: MA Experiment 20000171 PARAMETER Experiment Name: At_42deg_Heat_P Parameter: Temperature (deg C) Value: 42 vs. 22
  misc_feature: MA Experiment 20000171 PARAMETER Experiment Name: At_42deg_Heat_P Parameter: Timepoint (hr) Value: 1
  misc_feature: MA Experiment 20000171 PARAMETER Experiment Name: At_42deg_Heat_P Parameter: Tissue Value: Aerial
  misc_feature: MA Experiment ID: 20000173 Result: Down-regulated in Transcription
  misc_feature: MA Experiment 20000173 PARAMETER Experiment Name: At_42deg_Heat_P Parameter: Age (day) Value: 14
  misc_feature: MA Experiment 20000173 PARAMETER Experiment Name: At_42deg_Heat_P Parameter: Organism Value: A. thaliana
  misc_feature: MA Experiment 20000173 PARAMETER Experiment Name: At_42deg_Heat_P Parameter: Plant Line Value: WS
  misc_feature: MA Experiment 20000173 PARAMETER Experiment Name: At_42deg_Heat_P Parameter: Temperature (deg C) Value: 42 vs. 22
  misc_feature: MA Experiment 20000173 PARAMETER Experiment Name: At_42deg_Heat_P Parameter: Timepoint (hr) Value: 6
  misc_feature: MA Experiment 20000173 PARAMETER Experiment Name: At_42deg_Heat_P Parameter: Tissue Value: Aerial
  misc_feature: MA Experiment ID: 20000184 Result: Down-regulated in Transcription
  misc_feature: MA Experiment 20000184 PARAMETER Experiment Name: At_Shoots__P Parameter: Age (day) Value: 7
  misc_feature: MA Experiment 20000184 PARAMETER Experiment Name: At_Shoots__P Parameter: Tissue Value: Shoots vs. Whole Plant
  misc_feature: MA Experiment ID: 20000213 Result: Up-regulated in Transcription
  misc_feature: MA Experiment 20000213 PARAMETER Experiment Name: At_4deg_Cold_P Parameter: Timepoint (hr) Value: 2
  misc_feature: MA Experiment ID: 20000234 Result: Down-regulated in Transcription
  misc_feature: MA Experiment 20000234 PARAMETER Experiment Name: At_Siliques_P Parameter: Age (day) Value: 21
  misc_feature: MA Experiment 20000234 PARAMETER Experiment Name: At_Siliques_P Parameter: Organism Value: A. thaliana
  misc_feature: MA Experiment 20000234 PARAMETER Experiment Name: At_Siliques_P Parameter: Plant Line Value: WS
  misc_feature: MA Experiment 20000234 PARAMETER Experiment Name: At_Siliques_P Parameter: Tissue Value: Less Than 5mm Siliques vs. Whole Plant
  misc_feature: MA Experiment ID: 20000264 Result: Down-regulated in Transcription
  misc_feature: MA Experiment 20000264 PARAMETER Experiment Name: At_Open_Flower_P Parameter: Age (day) Value: 21
  misc_feature: MA Experiment 20000264 PARAMETER Experiment Name: At_Open_Flower_P Parameter: Plant Line Value: WS
  misc_feature: MA Experiment 20000264 PARAMETER Experiment Name: At_Open_Flower_P Parameter: Tissue Value: Open Flower vs. Whole Plant
  misc_feature: MA Experiment ID: 20000265 Result: Down-regulated in Transcription
  misc_feature: MA Experiment 20000265 PARAMETER Experiment Name: At_Open_Flower_P Parameter: Age (day) Value: 21
  misc_feature: MA Experiment 20000265 PARAMETER Experiment Name: At_Open_Flower_P Parameter: Plant Line Value: WS
  misc_feature: MA Experiment 20000265 PARAMETER Experiment Name: At_Open_Flower_P Parameter: Tissue Value: Closed Flower vs. Whole Plant
  misc_feature: MA Experiment ID: 20000286 Result: Down-regulated in Transcription
  misc_feature: MA Experiment 20000286 PARAMETER Experiment Name: At_Open_Flower_P Parameter: Age (day) Value: 21
  misc_feature: MA Experiment 20000286 PARAMETER Experiment Name: At_Open_Flower_P Parameter: Plant Line Value: WS
  misc_feature: MA Experiment 20000286 PARAMETER Experiment Name: At_Open_Flower_P Parameter: Tissue Value: Half Open vs. Whole Plant
  misc_feature: MA Experiment ID: 20000436 Result: Down-regulated in Transcription
  misc_feature: MA Experiment 20000436 PARAMETER Experiment Name: At_Drought_P Parameter: Age (day) Value: 7
  misc_feature: MA Experiment 20000436 PARAMETER Experiment Name: At_Drought_P Parameter: Organism Value: A. thaliana
  misc_feature: MA Experiment 20000436 PARAMETER Experiment Name: At_Drought_P Parameter: Plant Line Value: WS
  misc_feature: MA Experiment 20000436 PARAMETER Experiment Name: At_Drought_P Parameter: Timepoint (hr) Value: 12
  misc_feature: MA Experiment 20000436 PARAMETER Experiment Name: At_Drought_P Parameter: Tissue Value: Whole Plant
  misc_feature: MA Experiment 20000436 PARAMETER Experiment Name: At_Drought_P Parameter: Treatment Value: Drought vs. No Drought
  misc_feature: MA Experiment ID: 20000437 Result: Down-regulated in Transcription
  misc_feature: MA Experiment 20000437 PARAMETER Experiment Name: At_Drought_P Parameter: Age (day) Value: 8
  misc_feature: MA Experiment 20000437 PARAMETER Experiment Name: At_Drought_P Parameter: Organism Value: A. thaliana
  misc_feature: MA Experiment 20000437 PARAMETER Experiment Name: At_Drought_P Parameter: Plant Line Value: WS
  misc_feature: MA Experiment 20000437 PARAMETER Experiment Name: At_Drought_P Parameter: Timepoint (hr) Value: 24
  misc_feature: MA Experiment 20000437 PARAMETER Experiment Name: At_Drought_P Parameter: Tissue Value: Whole Plant
  misc_feature: MA Experiment 20000437 PARAMETER Experiment Name: At_Drought_P Parameter: Treatment Value: Drought vs. No Drought
  misc_feature: MA Experiment ID: 20000438 Result: Down-regulated in Transcription
  misc_feature: MA Experiment 20000438 PARAMETER Experiment Name: At_Shoots__P Parameter: Age (day) Value: 14
  misc_feature: MA Experiment 20000438 PARAMETER Experiment Name: At_Shoots__P Parameter: Tissue Value: Shoots vs. Whole Plant
  misc_feature: MA Experiment ID: 20000453 Result: Down-regulated in Transcription
  misc_feature: MA Experiment 20000453 PARAMETER Experiment Name: At_100uM_ABA_P Parameter: Age (day) Value: 15
  misc_feature: MA Experiment 20000453 PARAMETER Experiment Name: At_100uM_ABA_P Parameter: Organism Value: A. thaliana
  misc_feature: MA Experiment 20000453 PARAMETER Experiment Name: At_100uM_ABA_P Parameter: Plant Line Value: WS
  misc_feature: MA Experiment 20000453 PARAMETER Experiment Name: At_100uM_ABA_P Parameter: Timepoint (hr) Value: 24
  misc_feature: MA Experiment 20000453 PARAMETER Experiment Name: At_100uM_ABA_P Parameter: Tissue Value: Aerial
  misc_feature: MA Experiment 20000453 PARAMETER Experiment Name: At_100uM_ABA_P Parameter: Treatment Value: 100uM ABA vs. No Treatment
  misc_feature: MA Experiment ID: 20000495 Result: Down-regulated in Transcription
  misc_feature: MA Experiment 20000495 PARAMETER Experiment Name: At_Guard_Cells_P Parameter: Harvest Date Value: 8/2/2002
  misc_feature: MA Experiment 20000495 PARAMETER Experiment Name: At_Guard_Cells_P Parameter: Organism Value: A. thaliana
  misc_feature: MA Experiment 20000495 PARAMETER Experiment Name: At_Guard_Cells_P Parameter: Tissue Value: Guard Cells vs. Leaves
  misc_feature: MA Experiment ID: 20000794 Result: Down-regulated in Transcription
  misc_feature: MA Experiment 20000794 PARAMETER Experiment Name: At_Petals_P Parameter: Age (day) Value: 23-25 days
  misc_feature: MA Experiment 20000794 PARAMETER Experiment Name: At_Petals_P Parameter: Plant Line Value: WS
  misc_feature: MA Experiment 20000794 PARAMETER Experiment Name: At_Petals_P Parameter: Tissue Value: Petals vs. Whole plant
  misc_feature: MA Experiment ID: 20001554 Result: Down-regulated in Transcription
  misc_feature: MA Experiment 20001554 PARAMETER Experiment Name: At_Drought_Soil_Dry_P Parameter: Age (day) Value: 21
  misc_feature: MA Experiment 20001554 PARAMETER Experiment Name: At_Drought_Soil_Dry_P Parameter: Organism Value: A. thaliana
  misc_feature: MA Experiment 20001554 PARAMETER Experiment Name: At_Drought_Soil_Dry_P Parameter: Plant Line Value: WS
  misc_feature: MA Experiment 20001554 PARAMETER Experiment Name: At_Drought_Soil_Dry_P Parameter: Post Timepoint (hr) Value: None
  misc_feature: MA Experiment 20001554 PARAMETER Experiment Name: At_Drought_Soil_Dry_P Parameter: Post-Treatment Value: None
  misc_feature: MA Experiment 20001554 PARAMETER Experiment Name: At_Drought_Soil_Dry_P Parameter: Timepoint (day) Value: 7
  misc_feature: MA Experiment 20001554 PARAMETER Experiment Name: At_Drought_Soil_Dry_P Parameter: Treatment Value: Drought vs. No Drought
  misc_feature: MA Experiment ID: 20001555 Result: Down-regulated in Transcription
  misc_feature: MA Experiment 20001555 PARAMETER Experiment Name: At_Drought_Soil_Dry_P Parameter: Age (day) Value: 24
  misc_feature: MA Experiment 20001555 PARAMETER Experiment Name: At_Drought_Soil_Dry_P Parameter: Organism Value: A. thaliana
  misc_feature: MA Experiment 20001555 PARAMETER Experiment Name: At_Drought_Soil_Dry_P Parameter: Plant Line Value: WS
  misc_feature: MA Experiment 20001555 PARAMETER Experiment Name: At_Drought_Soil_Dry_P Parameter: Post Timepoint (hr) Value: None
  misc_feature: MA Experiment 20001555 PARAMETER Experiment Name: At_Drought_Soil_Dry_P Parameter: Post-Treatment Value: None
  misc_feature: MA Experiment 20001555 PARAMETER Experiment Name: At_Drought_Soil_Dry_P Parameter: Timepoint (day) Value: 10
  misc_feature: MA Experiment 20001555 PARAMETER Experiment Name: At_Drought_Soil_Dry_P Parameter: Treatment Value: Drought vs. No Drought
  misc_feature: MA Experiment ID: 20001556 Result: Down-regulated in Transcription
  misc_feature: MA Experiment 20001556 PARAMETER Experiment Name: At_Drought_Soil_Dry_P Parameter: Age (day) Value: 26
  misc_feature: MA Experiment 20001556 PARAMETER Experiment Name: At_Drought_Soil_Dry_P Parameter: Organism Value: A. thaliana
  misc_feature: MA Experiment 20001556 PARAMETER Experiment Name: At_Drought_Soil_Dry_P Parameter: Plant Line Value: WS
  misc_feature: MA Experiment 20001556 PARAMETER Experiment Name: At_Drought_Soil_Dry_P Parameter: Post Timepoint (hr) Value: None
  misc_feature: MA Experiment 20001556 PARAMETER Experiment Name: At_Drought_Soil_Dry_P Parameter: Post-Treatment Value: None
  misc_feature: MA Experiment 20001556 PARAMETER Experiment Name: At_Drought_Soil_Dry_P Parameter: Timepoint (day) Value: 12
  misc_feature: MA Experiment 20001556 PARAMETER Experiment Name: At_Drought_Soil_Dry_P Parameter: Treatment Value: Drought vs. No Drought
  misc_feature: MA Experiment ID: 20001557 Result: Up-regulated in Transcription
  misc_feature: MA Experiment 20001557 PARAMETER Experiment Name: At_Drought_Soil_Dry_P Parameter: Age (day) Value: 27
  misc_feature: MA Experiment 20001557 PARAMETER Experiment Name: At_Drought_Soil_Dry_P Parameter: Organism Value: A. thaliana
  misc_feature: MA Experiment 20001557 PARAMETER Experiment Name: At_Drought_Soil_Dry_P Parameter: Plant Line Value: WS
  misc_feature: MA Experiment 20001557 PARAMETER Experiment Name: At_Drought_Soil_Dry_P Parameter: Post Timepoint (hr) Value: 3
  misc_feature: MA Experiment 20001557 PARAMETER Experiment Name: At_Drought_Soil_Dry_P Parameter: Post-Treatment Value: Re-Water vs. No Drought
  misc_feature: MA Experiment 20001557 PARAMETER Experiment Name: At_Drought_Soil_Dry_P Parameter: Timepoint (day) Value: 13
  misc_feature: MA Experiment 20001557 PARAMETER Experiment Name: At_Drought_Soil_Dry_P Parameter: Treatment Value: Drought vs. No Drought
  misc_feature: MA Experiment ID: 20001760 Result: Down-regulated in Transcription
  misc_feature: MA Experiment 20001760 PARAMETER Experiment Name: At_50mM_NH4NO3_L-to-H_P Parameter: Timepoint (hr) Value: 2
  misc_feature: MA Experiment 20001760 PARAMETER Experiment Name: At_50mM_NH4NO3_L-to-H_P Parameter: Tissue Value: Siliques
  misc_feature: MA Experiment 20001760 PARAMETER Experiment Name: At_50mM_NH4NO3_L-to-H_P Parameter: Treatment Value: 50mM NH4NO3 vs 100mM Mannitol
  misc_feature: MA Experiment ID: 20001904 Result: Down-regulated in Transcription
  misc_feature: MA Experiment 20001904 PARAMETER Experiment Name: At_Drought_Reproduction_P Parameter: Age (day) Value: 37
  misc_feature: MA Experiment 20001904 PARAMETER Experiment Name: At_Drought_Reproduction_P Parameter: Organism Value: A. thaliana
  misc_feature: MA Experiment 20001904 PARAMETER Experiment Name: At_Drought_Reproduction_P Parameter: Plant Line Value: WS
  misc_feature: MA Experiment 20001904 PARAMETER Experiment Name: At_Drought_Reproduction_P Parameter: Timepoint (day) Value: 7
  misc_feature: MA Experiment 20001904 PARAMETER Experiment Name: At_Drought_Reproduction_P Parameter: Tissue Value: Rosettes
  misc_feature: MA Experiment 20001904 PARAMETER Experiment Name: At_Drought_Reproduction_P Parameter: Treatment Value: Drought vs. No Drought
  misc_feature: MA Experiment ID: 20001905 Result: Down-regulated in Transcription
  misc_feature: MA Experiment 20001905 PARAMETER Experiment Name: At_Drought_Reproduction_P Parameter: Age (day) Value: 40
  misc_feature: MA Experiment 20001905 PARAMETER Experiment Name: At_Drought_Reproduction_P Parameter: Organism Value: A. thaliana
  misc_feature: MA Experiment 20001905 PARAMETER Experiment Name: At_Drought_Reproduction_P Parameter: Plant Line Value: WS
  misc_feature: MA Experiment 20001905 PARAMETER Experiment Name: At_Drought_Reproduction_P Parameter: Timepoint (day) Value: 10
  misc_feature: MA Experiment 20001905 PARAMETER Experiment Name: At_Drought_Reproduction_P Parameter: Tissue Value: Rosettes
  misc_feature: MA Experiment 20001905 PARAMETER Experiment Name: At_Drought_Reproduction_P Parameter: Treatment Value: Drought vs. No Drought
  misc_feature: MA Experiment ID: 20001907 Result: Down-regulated in Transcription
  misc_feature: MA Experiment 20001907 PARAMETER Experiment Name: At_Drought_Reproduction_P Parameter: Age (day) Value: 37
  misc_feature: MA Experiment 20001907 PARAMETER Experiment Name: At_Drought_Reproduction_P Parameter: Organism Value: A. thaliana
  misc_feature: MA Experiment 20001907 PARAMETER Experiment Name: At_Drought_Reproduction_P Parameter: Plant Line Value: WS
  misc_feature: MA Experiment 20001907 PARAMETER Experiment Name: At_Drought_Reproduction_P Parameter: Timepoint (day) Value: 7
  misc_feature: MA Experiment 20001907 PARAMETER Experiment Name: At_Drought_Reproduction_P Parameter: Tissue Value: Siliques
  misc_feature: MA Experiment 20001907 PARAMETER Experiment Name: At_Drought_Reproduction_P Parameter: Treatment Value: Drought vs. No Drought
ataattagccctcatcactcaatttctcaatctcagattataattccacaaacgaacaagaagaagaagaagaacacaagataacaatggagagtaacaacaacgagaagaagaaagttgcaagacaatcatcatccttcagactacgtagcccaagcctaaacgcacttcgtctccaacgaatcttcgacttattcgacaaaaacggcgacggattcataaccgtcgaagagctaagccaagctctaacacgtcttggtctcaacgctgatctctccgatctcaaatccaccgttgaatcatacatccaacctggtaacactggtctcaatttcgatgatttctcttctcttcacaaaacactcgacgattctttcttcggtggagcttgtggaggaggagaaaacgaagatgatccttcttccgcagctgaaaatgaatcggatctcgccgaggcgtttaaggtgtttgatgagaacggtgatggattcatctccgctagagaactgcaaactgttctgaagaaacttggtttacctgaaggtggagaaatggagagagtggagaagatgatcgtttccgttgaccggaatcaagatggtcgcgttgacttttttgaattcaagaacatgatgcgtactgttgtcatcccttcttcttgattctccaaaaaaaacattttttctccaaaagattattatttttactttttgtcttttaagtttgtattttttccagtttatgtaatgattgattcaaacattataaacaaataaattttttct

SEQ ID NO: 100616 - protein, 191 aa, Arabidopsis thaliana
  peptide (1)..(191): Ceres Seq. ID no. 13605624
  misc_feature (158)..(186): Pfam Name: EF hand Pfam Description: EF hand
  misc_feature (1)..(191): Homolog of NCBI NO: 15233402 NR Description: calcium-binding protein, putative [Arabidopsis
  misc_feature (5)..(190): Homolog of NCBI NO: 15241500 NR Description: calcium-binding protein, putative [Arabidopsis
  misc_feature (1)..(190): Homolog of NCBI NO: 1168782 NR Description: Calcium-binding protein CAST
  misc_feature (9)..(191): Homolog of NCBI NO: 12003380 NR Description: Avr9/Cf-9 rapidly elicited protein 31 [Nicotiana
  misc_feature (9)..(191): Homolog of NCBI NO: 1168696 NR Description: Calcium-binding allergen Bet v 3 (Bet v III)
  misc_feature (9)..(188): Homolog of NCBI NO: 29467539 NR Description: P0665F09.7 [Oryza sativa (japonica
  misc_feature (13)..(188): Homolog of NCBI NO: 13194672 NR Description: calmodulin-like protein [Pennisetum ciliare]
  misc_feature (1)..(188): Homolog of NCBI NO: 33146667 NR Description: putative Avr9/Cf-9 rapidly elicited protein 31
  misc_feature (25)..(95): Homolog of NCBI NO: 15221358 NR Description: calcium-binding protein, putative [Arabidopsis
  misc_feature (116)..(184): Homolog of NCBI NO: 15221358 NR Description: calcium-binding protein, putative [Arabidopsis
MESNNNEKKKVARQSSSFRLRSPSLNALRLQRIFDLFDKNGDGFITVEELSQALTRLGLNADLSDLKSTVESYIQPGNTGLNFDDFSSLHKTLDDSFFGGACGGGENEDDPSSAAENESDLAEAFKVFDENGDGFISARELQTVLKKLGLPEGGEMERVEKMIVSVDRNQDGRVDFFEFKNMMRTVVIPSS

SEQ ID NO: 100617 - DNA, 2983 bp, Arabidopsis thaliana
  misc_feature (1)..(2983): Ceres Seq. ID no. 13605633
  misc_feature: MA Experiment ID: 20000314 Result: Down-regulated in Transcription
  misc_feature: MA Experiment 20000314 PARAMETER Experiment Name: At_14day_Shoots-Roots_Sub_P Parameter: Age (day) Value: 14
  misc_feature: MA Experiment 20000314 PARAMETER Experiment Name: At_14day_Shoots-Roots_Sub_P Parameter: Organism Value: A. thaliana
  misc_feature: MA Experiment 20000314 PARAMETER Experiment Name: At_14day_Shoots-Roots_Sub_P Parameter: Plant Line Value: WS
  misc_feature: MA Experiment 20000314 PARAMETER Experiment Name: At_14day_Shoots-Roots_Sub_P Parameter: Tissue Value: Roots vs. Whole Plant
  misc_feature: MA Experiment ID: 20000328 Result: Down-regulated in Transcription
  misc_feature: MA Experiment 20000328 PARAMETER Experiment Name: At_42deg_Heat_Sub_P Parameter: Age (day) Value: 14
  misc_feature: MA Experiment 20000328 PARAMETER Experiment Name: At_42deg_Heat_Sub_P Parameter: Organism Value: A. thaliana
  misc_feature: MA Experiment 20000328 PARAMETER Experiment Name: At_42deg_Heat_Sub_P Parameter: Plant Line Value: WS
  misc_feature: MA Experiment 20000328 PARAMETER Experiment Name: At_42deg_Heat_Sub_P Parameter: Temperature (deg C) Value: 42 vs. 22
  misc_feature: MA Experiment 20000328 PARAMETER Experiment Name: At_42deg_Heat_Sub_P Parameter: Timepoint (hr) Value: 6
  misc_feature: MA Experiment 20000328 PARAMETER Experiment Name: At_42deg_Heat_Sub_P Parameter: Tissue Value: Aerial
  misc_feature: MA Experiment ID: 20000347 Result: Up-regulated in Transcription
  misc_feature: MA Experiment 20000347 PARAMETER Experiment Name: At_2mM_SA_Sub_P Parameter: Age (day) Value: 14
  misc_feature: MA Experiment 20000347 PARAMETER Experiment Name: At_2mM_SA_Sub_P Parameter: Organism Value: A. thaliana
  misc_feature: MA Experiment 20000347 PARAMETER Experiment Name: At_2mM_SA_Sub_P Parameter: Plant Line Value: WS
  misc_feature: MA Experiment 20000347 PARAMETER Experiment Name: At_2mM_SA_Sub_P Parameter: Timepoint (hr) Value: 6
  misc_feature: MA Experiment 20000347 PARAMETER Experiment Name: At_2mM_SA_Sub_P Parameter: Tissue Value: Aerial
  misc_feature: MA Experiment 20000347 PARAMETER Experiment Name: At_2mM_SA_Sub_P Parameter: Treatment Value: 2mM SA vs. No Treatment
  misc_feature: MA Experiment ID: 20000355 Result: Down-regulated in Transcription
  misc_feature: MA Experiment 20000355 PARAMETER Experiment Name: At_Siliques_Sub_P Parameter: Age (day) Value: 21
  misc_feature: MA Experiment 20000355 PARAMETER Experiment Name: At_Siliques_Sub_P Parameter: Organism Value: A. thaliana
  misc_feature: MA Experiment 20000355 PARAMETER Experiment Name: At_Siliques_Sub_P Parameter: Plant Line Value: WS
  misc_feature: MA Experiment 20000355 PARAMETER Experiment Name: At_Siliques_Sub_P Parameter: Tissue Value: Less Than 5mm Siliques vs. Whole Plant
atatattattgacagaaataaaatcggttacgtaaggttcacacattacacaaaacatgtccgatatctccaatggaaataaactctcatacttttctcaagaaagagtgaaaaacaaaaaacttggtttagagaaatgagaggtttaccaaatttctaccattcttacaccttcttcttcttcttcctcttaattctgttccctgcttactctatctctgccaacactttgtcggcttcagaatctctaactatctcaagcaataacaccattgtgtctcctggtaatgtcttcgagcttggtttcttcaaacccggtttagattctcgttggtatcttggaatttggtacaaggcaatctctaagagaacctacgtatgggttgcaaacagagacactcctctctctagttccatcggaactctcaaaatctccgacagtaatcttgtcgttttggatcagtccgatacaccggtttggtcgacgaatctgaccggaggagatgtgagatctccattggtggcagagcttcttgataatggtaattttgtgctcagagactccaagaacagcgctccagatggagttttgtggcagagttttgattttccgacagatactttacttccggagatgaaacttggctgggatgccaaaaccgggttcaacagattcattagatcatggaaatctccagatgatccatcaagtggagatttctcgttcaaactcgaaaccgaaggcttccctgagatttttctatggaacagagaatcacgaatgtaccggagtggtccatggaatggaatccggtttagtggtgtaccggagatgcaaccatttgaatacatggttttcaatttcactacgagtaaagaagaagtgacttactcatttagaatcactaaaagcgacgtttactcgagattaagcataagctcctcaggattgttacaaagattcacttggattgagacagcacagaattggaaccaattctggtacgcaccaaaagaccaatgtgatgagtacaaagagtgtggtgtttacggttattgcgactcgaacacttcacctgtttgtaattgtattaaagggtttaagccgaggaatcctcaagtgtggggattgagagacgggtcggatggttgcgtgaggaagacgctactgagctgtggtggcggagatgggtttgtgcggttgaagaaaatgaaattgccggatactaccacggctagtgtggacagaggaattggtgtgaaagaatgtgaacagaagtgtttaagagattgtaattgcacggcgtttgcgaatacggatatccggggtagcgggtcgggttgtgtgacttggaccggagagctttttgatatcaggaattatgccaaaggtggtcaagatctttacgttagattggctgctactgatctcgaggacaaaagaaacagaagtgcaaaaatcataggttcgagtattggagtgagcgttttgcttcttttaagtttcattatcttcttcttgtggaaaaggaagcagaagcgatcaatactaatcgaaacacctattgttgatcatcaactgagaagccgagatttgctaatgaacgaagttgtaatatcaagtaggagacacatatctagagaaaacaatacagacgatctcgaattgccattgatggagtttgaagaagttgccatggccacaaacaatttttctaacgccaacaagctaggacaaggtggttttggtatagtttataagggaaagttacttgatggtcaagaaatggcagtgaagagactatcaaagacatcagttcaggggactgatgagttcaagaatgaggtaaagttgattgcaaggcttcagcacataaaccttgttaggcttcttgcatgttgcgtcgatgcgggtgagaagatgttgatttacgagtacttggaaaatctaagcctcgactctcatctatttgacaaatcccgaaactctaagctaaattggcaaatgagatttgatatcatcaatggtattgctcgaggacttctatatcttcaccaagattcacggtttagaattatccatagagacttgaaagcaagtaacatcttgcttgataaatatatgactccaaagatctcggatttcggaatggctaggatctttggacgggatgagacagaagctaatacgaggaaggtggttggaacctacggttatatgtctcctgaatatgcaatggacgggatattctcgatgaagtcagatgttttcagttttggggtcttgcttcttgagattataagtagcaagaggaacaaaggattctacaattcggaccgtgaccttaaccttctcggttgtgtgtggaggaattggaaagaaggaaaagggctagagatcatagatccaatcatcacagattcttcatcaacattcaggcaacatgaaatcttaagatgcatacaaattggcctcttgtgtgttcaagaacgtgcagaggacagaccaactatgtccttggtaattttgatgctcggaagcgaatcaacaactattcctcaacctaaagcgcccggttattgcctggagagaagtcttcttgacactgattcttcgtcgagtaaacagcgcgacgatgaatcatggacagtgaaccaaattactgtctcggtccttgatgctcggtaatgtgactgtcaactagccaatcttctatactaagatgactaaattgagcgacaataagaatcaactaggaaagatggtattagttatgtgcatagtattttctctgtacgtctccgttgcaaaggttactacatgattcaattgtcttaattaagcatgtattctgtaattgctttatggataacccaaatagtcctgcagttataggacatcaatgtgatattttgaaagattctcagactttcatattataaattatggctactagaagaggcaaatattgttggttagtag

SEQ ID NO: 100618 - protein, 850 aa, Arabidopsis thaliana
  peptide (1)..(850): Ceres Seq. ID no. 13605634
  misc_feature (77)..(191): Pfam Name: D-mannose binding lectin Pfam Description: D-mannose binding lectin
  misc_feature (11)..(435): Homolog of NCBI NO: 15220351 NR Description: S-locus protein kinase family [Arabidopsis
  misc_feature (510)..(850): Homolog of NCBI NO: 15220351 NR Description: S-locus protein kinase family [Arabidopsis
  misc_feature (7)..(850): Homolog of NCBI NO: 38344784 NR Description: OSJNBa0043L09.4 [Oryza sativa (japonica
  misc_feature (6)..(820): Homolog of NCBI NO: 38344781 NR Description: OSJNBa0043L09.1 [Oryza sativa (japonica
  misc_feature (9)..(850): Homolog of NCBI NO: 38344787 NR Description: OSJNBa0043L09.7 [Oryza sativa (japonica
  misc_feature (10)..(850): Homolog of NCBI NO: 38346886 NR Description: OSJNBb0015G09.5 [Oryza sativa (japonica
  misc_feature (36)..(777): Homolog of NCBI NO: 25956275 NR Description: unnamed protein product [Lotus japonicus]
  misc_feature (14)..(487): Homolog of NCBI NO: 25287705 NR Description: protein T1F9.8 [imported] - Arabidopsis thaliana
  misc_feature (494)..(743): Homolog of NCBI NO: 25287705 NR Description: protein T1F9.8 [imported] - Arabidopsis thaliana
  misc_feature (15)..(473): Homolog of NCBI NO: 7428025 NR Description: S-receptor kinase (EC 2.7.1.-) PK3 precursor -
MRGLPNFYHSYTFFFFFLLILFPAYSISANTLSASESLTISSNNTIVSPGNVFELGFFKPGLDSRWYLGIWYKAISKRTYVWVANRDTPLSSSIGTLKISDSNLVVLDQSDTPVWSTNLTGGDVRSPLVAELLDNGNFVLRDSKNSAPDGVLWQSFDFPTDTLLPEMKLGWDAKTGFNRFIRSWKSPDDPSSGDFSFKLETEGFPEIFLWNRESRMYRSGPWNGIRFSGVPEMQPFEYMVFNFTTSKEEVTYSFRITKSDVYSRLSISSSGLLQRFTWIETAQNWNQFWYAPKDQCDEYKECGVYGYCDSNTSPVCNCIKGFKPRNPQVWGLRDGSDGCVRKTLLSCGGGDGFVRLKKMKLPDTTTASVDRGIGVKECEQKCLRDCNCTAFANTDIRGSGSGCVTWTGELFDIRNYAKGGQDLYVRLAATDLEDKRNRSAKIIGSSIGVSVLLLLSFIIFFLWKRKQKRSILIETPIVDHQLRSRDLLMNEVVISSRRHISRENNTDDLELPLMEFEEVAMATNNFSNANKLGQGGFGIVYKGKLLDGQEMAVKRLSKTSVQGTDEFKNEVKLIARLQHINLVRLLACCVDAGEKMLIYEYLENLSLDSHLFDKSRNSKLNWQMRFDIINGIARGLLYLHQDSRFRIIHRDLKASNILLDKYMTPKISDFGMARIFGRDETEANTRKVVGTYGYMSPEYAMDGIFSMKSDVFSFGVLLLEIISSKRNKGFYNSDRDLNLLGCVWRNWKEGKGLEIIDPIITDSSSTFRQHEILRCIQIGLLCVQERAEDRPTMSLVILMLGSESTTIPQPKAPGYCLERSLLDTDSSSSKQRDDESWTVNQITVSVLDAR

SEQ ID NO: 100619 - protein, 684 aa, Arabidopsis thaliana
  peptide (1)..(684): Ceres Seq. ID no. 13605635
  misc_feature (181)..(289): Pfam Name: PAN domain Pfam Description: PAN domain
  misc_feature (1)..(269): Homolog of NCBI NO: 15220351 NR Description: S-locus protein kinase family [Arabidopsis
  misc_feature (344)..(684): Homolog of NCBI NO: 15220351 NR Description: S-locus protein kinase family [Arabidopsis
  misc_feature (1)..(684): Homolog of NCBI NO: 38344784 NR Description: OSJNBa0043L09.4 [Oryza sativa (japonica
  misc_feature (1)..(654): Homolog of NCBI NO: 38344781 NR Description: OSJNBa0043L09.1 [Oryza sativa (japonica
  misc_feature (1)..(684): Homolog of NCBI NO: 38344787 NR Description: OSJNBa0043L09.7 [Oryza sativa (japonica
  misc_feature (1)..(684): Homolog of NCBI NO: 38346886 NR Description: OSJNBb0015G09.5 [Oryza sativa (japonica
  misc_feature (1)..(611): Homolog of NCBI NO: 25956275 NR Description: unnamed protein product [Lotus japonicus]
  misc_feature (1)..(321): Homolog of NCBI NO: 25287705 NR Description: protein T1F9.8 [imported] - Arabidopsis thaliana
  misc_feature (328)..(577): Homolog of NCBI NO: 25287705 NR Description: protein T1F9.8 [imported] - Arabidopsis thaliana
  misc_feature (1)..(307): Homolog of NCBI NO: 7428025 NR Description: S-receptor kinase (EC 2.7.1.-) PK3 precursor -
MKLGWDAKTGFNRFIRSWKSPDDPSSGDFSFKLETEGFPEIFLWNRESRMYRSGPWNGIRFSGVPEMQPFEYMVFNFTTSKEEVTYSFRITKSDVYSRLSISSSGLLQRFTWIETAQNWNQFWYAPKDQCDEYKECGVYGYCDSNTSPVCNCIKGFKPRNPQVWGLRDGSDGCVRKTLLSCGGGDGFVRLKKMKLPDTTTASVDRGIGVKECEQKCLRDCNCTAFANTDIRGSGSGCVTWTGELFDIRNYAKGGQDLYVRLAATDLEDKRNRSAKIIGSSIGVSVLLLLSFIIFFLWKRKQKRSILIETPIVDHQLRSRDLLMNEVVISSRRHISRENNTDDLELPLMEFEEVAMATNNFSNANKLGQGGFGIVYKGKLLDGQEMAVKRLSKTSVQGTDEFKNEVKLIARLQHINLVRLLACCVDAGEKMLIYEYLENLSLDSHLFDKSRNSKLNWQMRFDIINGIARGLLYLHQDSRFRIIHRDLKASNILLDKYMTPKISDFGMARIFGRDETEANTRKVVGTYGYMSPEYAMDGIFSMKSDVFSFGVLLLEIISSKRNKGFYNSDRDLNLLGCVWRNWKEGKGLEIIDPIITDSSSTFRQHEILRCIQIGLLCVQERAEDRPTMSLVILMLGSESTTIPQPKAPGYCLERSLLDTDSSSSKQRDDESWTVNQITVSVLDAR

SEQ ID NO: 100620 - protein, 635 aa, Arabidopsis thaliana
  peptide (1)..(635): Ceres Seq. ID no. 13605636
  misc_feature (132)..(240): Pfam Name: PAN domain Pfam Description: PAN domain
  misc_feature (1)..(220): Homolog of NCBI NO: 15220351 NR Description: S-locus protein kinase family [Arabidopsis
  misc_feature (295)..(635): Homolog of NCBI NO: 15220351 NR Description: S-locus protein kinase family [Arabidopsis
  misc_feature (1)..(635): Homolog of NCBI NO: 38344784 NR Description: OSJNBa0043L09.4 [Oryza sativa (japonica
  misc_feature (1)..(605): Homolog of NCBI NO: 38344781 NR Description: OSJNBa0043L09.1 [Oryza sativa (japonica
  misc_feature (1)..(635): Homolog of NCBI NO: 38344787 NR Description: OSJNBa0043L09.7 [Oryza sativa (japonica
  misc_feature (1)..(635): Homolog of NCBI NO: 38346886 NR Description: OSJNBb0015G09.5 [Oryza sativa (japonica
  misc_feature (1)..(562): Homolog of NCBI NO: 25956275 NR Description: unnamed protein product [Lotus japonicus]
  misc_feature (1)..(272): Homolog of NCBI NO: 25287705 NR Description: protein T1F9.8 [imported] - Arabidopsis thaliana
  misc_feature (279)..(528): Homolog of NCBI NO: 25287705 NR Description: protein T1F9.8 [imported] - Arabidopsis thaliana
  misc_feature (1)..(258): Homolog of NCBI NO: 7428025 NR Description: S-receptor kinase (EC 2.7.1.-) PK3 precursor -
MYRSGPWNGIRFSGVPEMQPFEYMVFNFTTSKEEVTYSFRITKSDVYSRLSISSSGLLQRFTWIETAQNWNQFWYAPKDQCDEYKECGVYGYCDSNTSPVCNCIKGFKPRNPQVWGLRDGSDGCVRKTLLSCGGGDGFVRLKKMKLPDTTTASVDRGIGVKECEQKCLRDCNCTAFANTDIRGSGSGCVTWTGELFDIRNYAKGGQDLYVRLAATDLEDKRNRSAKIIGSSIGVSVLLLLSFIIFFLWKRKQKRSILIETPIVDHQLRSRDLLMNEVVISSRRHISRENNTDDLELPLMEFEEVAMATNNFSNANKLGQGGFGIVYKGKLLDGQEMAVKRLSKTSVQGTDEFKNEVKLIARLQHINLVRLLACCVDAGEKMLIYEYLENLSLDSHLFDKSRNSKLNWQMRFDIINGIARGLLYLHQDSRFRIIHRDLKASNILLDKYMTPKISDFGMARIFGRDETEANTRKVVGTYGYMSPEYAMDGIFSMKSDVFSFGVLLLEIISSKRNKGFYNSDRDLNLLGCVWRNWKEGKGLEIIDPIITDSSSTFRQHEILRCIQIGLLCVQERAEDRPTMSLVILMLGSESTTIPQPKAPGYCLERSLLDTDSSSSKQRDDESWTVNQITVSVLDAR

SEQ ID NO: 100621 - DNA, 1796 bp, Arabidopsis thaliana
  misc_feature (1)..(1796): Ceres Seq. ID no. 13605637
  misc_feature: MA Experiment ID: 20000437 Result: Down-regulated in Transcription
  misc_feature: MA Experiment 20000437 PARAMETER Experiment Name: At_Drought_P Parameter: Age (day) Value: 8
  misc_feature: MA Experiment 20000437 PARAMETER Experiment Name: At_Drought_P Parameter: Organism Value: A. thaliana
  misc_feature: MA Experiment 20000437 PARAMETER Experiment Name: At_Drought_P Parameter: Plant Line Value: WS
  misc_feature: MA Experiment 20000437 PARAMETER Experiment Name: At_Drought_P Parameter: Timepoint (hr) Value: 24
  misc_feature: MA Experiment 20000437 PARAMETER Experiment Name: At_Drought_P Parameter: Tissue Value: Whole Plant
  misc_feature: MA Experiment 20000437 PARAMETER Experiment Name: At_Drought_P Parameter: Treatment Value: Drought vs. No Drought
gaatctttgactatcttcttcgccggaaccgatgaatatactgagacgaattccggcgaatttgattgcgagcagatattactacactaacagagtaaaaaagacgacactttactcaaaaatcagtcctttaggagacccaaaatcaagtgtttacccagaactccaaaactgggttcaatgcggtaaaaaagtctctgttgctgaacttattcgcatcgttcacgatcttcgtagacgcaaacgcttcctccacgctctcgaggtttcgaaatggatgaatgagactggtgtatgtgtgttctctccgacagaacacgcggttcatcttgatcttattggtagagtttatggatttgtcactgcagaagagtattttgagaatcttaaggaacagtataagaatgataagacttatggagctcttttgaattgttacgttaggcaacagaatgttgagaagtctctgttgcattttgagaagatgaaggagatgggttttgttacttcgtctcttacttacaataacattatgtgtctttacacgaatattggtcagcacgagaaagttcctaaggttttggaggagatgaaggaagagaatgttgctccggataactatagttataggatatgtattaatgcttttggtgctatgtatgatcttgagaggattggtgggaccttgagagatatggagagacgacaggatattactatggattggaacacttatgcggttgcggctaagttttatattgatggtggtgattgtgatagagcggttgagcttttgaagatgtcggagaatagattggagaagaaagatggtgaaggttacaatcatctcattacgctttatgctaggttagggaagaagatagaggttttaaggttatgggatttggagaaagatgtgtgtaaaaggagaataaatcaggactatcttactgtgttgcagtcgcttgtgaagattgatgctttagttgaggctgaggaagtacttacggaatggaaatcatcggggaactgttatgattttcgagtgcctaacactgtgattcgtggttacattggaaaaagtatggaggagaaggcagaagcgatgcttgaagatttagcaagaagagggaaagctactacaccagaatcttgggaacttgtggctactgcttatgcggaaaagggtactttagaaaatgctttcaagtgtatgaaaactgccttaggtgtagaagtgggtagcagaaaatggagacctggattgacgctggttacaagtgttttgagttgggtcggggatgaaggaagtttgaaagaagtagaaagctttgttgcatctcttaggaattgtatcggtgtgaacaaacagatgtatcatgctcttgtcaaggctgatataagagaaggcggacgtaacattgatactctgttgcagcgtatgaaagatgacaaaattgaaatcgatgaagaaaccacagtgattctcagcacaagaagtccatgctaaaagtttcttattcttccttgacgtgatgataccaaagatgtcttctgagacaaggatttaggaatgtgatttcttaacggttgagtcttccttcagcaatacttattagtaccaaatgtaccaaaattttattttgttaagaacactctctagactctgttttcatagcatctatagaacagtctacaagagaatcctctgttcttttttcaaatgcagtgtactatcatattgaatcagcagaaggcaaagttagagctttggcaatttggttccatttttattg

SEQ ID NO: 100622 - protein, 492 aa, Arabidopsis thaliana
  peptide (1)..(492): Ceres Seq. ID no. 13605638
  misc_feature (162)..(196): Pfam Name: PPR repeat Pfam Description: PPR repeat
  misc_feature (1)..(492): Homolog of NCBI NO: 22328859 NR Description: pentatricopeptide (PPR) repeat-containing protein thaliana] >gi|28393142|gb|AAO42004.1| unknown protein thaliana] >gi|28827500|gb|AAO50594.1| unknown protein
  misc_feature (26)..(459): Homolog of NCBI NO: 34393591 NR Description: putative DNA-binding protein [Oryza sativa
  misc_feature (19)..(486): Homolog of NCBI NO: 15219808 NR Description: pentatricopeptide (PPR) repeat-containing protein
  misc_feature (1)..(439): Homolog of NCBI NO: 15225409 NR Description: pentatricopeptide (PPR) repeat-containing protein
  misc_feature (21)..(487): Homolog of NCBI NO: 37535774 NR Description: putative leaf protein [Oryza sativa (japonica group)] >gi|22165052|gb|AAM93669.1| putative leaf protein [Oryza
  misc_feature (22)..(474): Homolog of NCBI NO: 22329290 NR Description: pentatricopeptide (PPR) repeat-containing protein thaliana] >gi|2317908|gb|AAC24372.1| Unknown protein [Arabidopsis
  misc_feature (22)..(474): Homolog of NCBI NO: 20453085 NR Description: At1g02150/T7I23.8 [Arabidopsis thaliana]
  misc_feature (26)..(487): Homolog of NCBI NO: 37535776 NR Description: putative leaf protein [Oryza sativa (japonica group)] >gi|22165054|gb|AAM93671.1| putative leaf protein [Oryza
  misc_feature (19)..(491): Homolog of NCBI NO: 18411800 NR Description: pentatricopeptide (PPR) repeat-containing protein thaliana] >gi|14517494|gb|AAK62637.1| AT4g01990/T7B11_26 thaliana] >gi|16323354|gb|AAL15390.1| AT4g01990/T7B11_26
  misc_feature (19)..(491): Homolog of NCBI NO: 25407143 NR Description: hypothetical protein AT4g01990 [imported] - thaliana >gi|4558568|gb|AAD22661.1|AC007138_25 hypothetical [Arabidopsis thaliana] >gi|7268583|emb|CAB80692.1| hypothetical
MNILRRIPANLIASRYYYTNRVKKTTLYSKISPLGDPKSSVYPELQNWVQCGKKVSVAELIRIVHDLRRRKRFLHALEVSKWMNETGVCVFSPTEHAVHLDLIGRVYGFVTAEEYFENLKEQYKNDKTYGALLNCYVRQQNVEKSLLHFEKMKEMGFVTSSLTYNNIMCLYTNIGQHEKVPKVLEEMKEENVAPDNYSYRICINAFGAMYDLERIGGTLRDMERRQDITMDWNTYAVAAKFYIDGGDCDRAVELLKMSENRLEKKDGEGYNHLITLYARLGKKIEVLRLWDLEKDVCKRRINQDYLTVLQSLVKIDALVEAEEVLTEWKSSGNCYDFRVPNTVIRGYIGKSMEEKAEAMLEDLARRGKATTPESWELVATAYAEKGTLENAFKCMKTALGVEVGSRKWRPGLTLVTSVLSWVGDEGSLKEVESFVASLRNCIGVNKQMYHALVKADIREGGRNIDTLLQRMKDDKIEIDEETTVILSTRSPC

SEQ ID NO: 100623 - protein, 410 aa, Arabidopsis thaliana
  peptide (1)..(410): Ceres Seq. ID no. 13605639
  misc_feature (80)..(114): Pfam Name: PPR repeat Pfam Description: PPR repeat
  misc_feature (1)..(410): Homolog of NCBI NO: 22328859 NR Description: pentatricopeptide (PPR) repeat-containing protein thaliana] >gi|28393142|gb|AAO42004.1| unknown protein thaliana] >gi|28827500|gb|AAO50594.1| unknown protein
  misc_feature (1)..(377): Homolog of NCBI NO: 34393591 NR Description: putative DNA-binding protein [Oryza sativa
  misc_feature (1)..(404): Homolog of NCBI NO: 15219808 NR Description: pentatricopeptide (PPR) repeat-containing protein
  misc_feature (1)..(357): Homolog of NCBI NO: 15225409 NR Description: pentatricopeptide (PPR) repeat-containing protein
  misc_feature (1)..(405): Homolog of NCBI NO: 37535774 NR Description: putative leaf protein [Oryza sativa (japonica group)] >gi|22165052|gb|AAM93669.1| putative leaf protein [Oryza
  misc_feature (1)..(392): Homolog of NCBI NO: 22329290 NR Description: pentatricopeptide (PPR) repeat-containing protein thaliana] >gi|2317908|gb|AAC24372.1| Unknown protein [Arabidopsis
  misc_feature (1)..(392): Homolog of NCBI NO: 20453085 NR Description: At1g02150/T7I23.8 [Arabidopsis thaliana]
  misc_feature (1)..(405): Homolog of NCBI NO: 37535776 NR Description: putative leaf protein [Oryza sativa (japonica group)] >gi|22165054|gb|AAM93671.1| putative leaf protein [Oryza
  misc_feature (1)..(409): Homolog of NCBI NO: 18411800 NR Description: pentatricopeptide (PPR) repeat-containing protein thaliana] >gi|14517494|gb|AAK62637.1| AT4g01990/T7B11_26 thaliana] >gi|16323354|gb|AAL15390.1| AT4g01990/T7B11_26
  misc_feature (1)..(409): Homolog of NCBI NO: 25407143 NR Description: hypothetical protein AT4g01990 [imported] - thaliana >gi|4558568|gb|AAD22661.1|AC007138_25 hypothetical [Arabidopsis thaliana] >gi|7268583|emb|CAB80692.1| hypothetical
MNETGVCVFSPTEHAVHLDLIGRVYGFVTAEEYFENLKEQYKNDKTYGALLNCYVRQQNVEKSLLHFEKMKEMGFVTSSLTYNNIMCLYTNIGQHEKVPKVLEEMKEENVAPDNYSYRICINAFGAMYDLERIGGTLRDMERRQDITMDWNTYAVAAKFYIDGGDCDRAVELLKMSENRLEKKDGEGYNHLITLYARLGKKIEVLRLWDLEKDVCKRRINQDYLTVLQSLVKIDALVEAEEVLTEWKSSGNCYDFRVPNTVIRGYIGKSMEEKAEAMLEDLARRGKATTPESWELVATAYAEKGTLENAFKCMKTALGVEVGSRKWRPGLTLVTSVLSWVGDEGSLKEVESFVASLRNCIGVNKQMYHALVKADIREGGRNIDTLLQRMKDDKIEIDEETTVILSTRSPC

SEQ ID NO: 100624 - protein, 341 aa, Arabidopsis thaliana
  peptide (1)..(341): Ceres Seq. ID no. 13605640
  misc_feature (11)..(45): Pfam Name: PPR repeat Pfam Description: PPR repeat
  misc_feature (1)..(341): Homolog of NCBI NO: 22328859 NR Description: pentatricopeptide (PPR) repeat-containing protein thaliana] >gi|28393142|gb|AAO42004.1| unknown protein thaliana] >gi|28827500|gb|AAO50594.1| unknown protein
  misc_feature (1)..(308): Homolog of NCBI NO: 34393591 NR Description: putative DNA-binding protein [Oryza sativa
  misc_feature (1)..(335): Homolog of NCBI NO: 15219808 NR Description: pentatricopeptide (PPR) repeat-containing protein
  misc_feature (1)..(288): Homolog of NCBI NO: 15225409 NR Description: pentatricopeptide (PPR) repeat-containing protein
  misc_feature (1)..(336): Homolog of NCBI NO: 37535774 NR Description: putative leaf protein [Oryza sativa (japonica group)] >gi|22165052|gb|AAM93669.1| putative leaf protein [Oryza
  misc_feature (1)..(323): Homolog of NCBI NO: 22329290 NR Description: pentatricopeptide (PPR) repeat-containing protein thaliana] >gi|2317908|gb|AAC24372.1| Unknown protein [Arabidopsis
  misc_feature (1)..(323): Homolog of NCBI NO: 20453085 NR Description: At1g02150/T7I23.8 [Arabidopsis thaliana]
  misc_feature (1)..(336): Homolog of NCBI NO: 37535776 NR Description: putative leaf protein [Oryza sativa (japonica group)] >gi|22165054|gb|AAM93671.1| putative leaf protein [Oryza
  misc_feature (1)..(340): Homolog of NCBI NO: 18411800 NR Description: pentatricopeptide (PPR) repeat-containing protein thaliana] >gi|14517494|gb|AAK62637.1| AT4g01990/T7B11_26 thaliana] >gi|16323354|gb|AAL15390.1| AT4g01990/T7B11_26
  misc_feature (1)..(340): Homolog of NCBI NO: 25407143 NR Description: hypothetical protein AT4g01990 [imported] - thaliana >gi|4558568|gb|AAD22661.1|AC007138_25 hypothetical [Arabidopsis thaliana] >gi|7268583|emb|CAB80692.1| hypothetical
MKEMGFVTSSLTYNNIMCLYTNIGQHEKVPKVLEEMKEENVAPDNYSYRICINAFGAMYDLERIGGTLRDMERRQDITMDWNTYAVAAKFYIDGGDCDRAVELLKMSENRLEKKDGEGYNHLITLYARLGKKIEVLRLWDLEKDVCKRRINQDYLTVLQSLVKIDALVEAEEVLTEWKSSGNCYDFRVPNTVIRGYIGKSMEEKAEAMLEDLARRGKATTPESWELVATAYAEKGTLENAFKCMKTALGVEVGSRKWRPGLTLVTSVLSWVGDEGSLKEVESFVASLRNCIGVNKQMYHALVKADIREGGRNIDTLLQRMKDDKIEIDEETTVILSTRSPC

SEQ ID NO: 100625 - DNA, 1277 bp, Arabidopsis thaliana
  misc_feature (1)..(1277): Ceres Seq. ID no. 13605667
  misc_feature: MA Experiment ID: 108434 Result: Down-regulated in Transcription
  misc_feature: MA Experiment 108434 PARAMETER Experiment Name: At_Root_Tips_cDNA_P Parameter: Tissue Value: Root Tips
  misc_feature: MA Experiment ID: 108462 Result: Up-regulated in Transcription
  misc_feature: MA Experiment 108462 PARAMETER Experiment Name: At_Germinating_Seeds_cDNA_P Parameter: Age (day) Value: 2 vs. 0
  misc_feature: MA Experiment 108462 PARAMETER Experiment Name: At_Germinating_Seeds_cDNA_P Parameter: Tissue Value: Germinating Seeds
  misc_feature: MA Experiment ID: 108469 Result: Up-regulated in Transcription
  misc_feature: MA Experiment ID: 108488 Result: Down-regulated in Transcription
  misc_feature: MA Experiment ID: 108573 Result: Up-regulated in Transcription
  misc_feature: MA Experiment 108573 PARAMETER Experiment Name: At_Drought_cDNA_P Parameter: Timepoint (hr) Value: 6
  misc_feature: MA Experiment 108573 PARAMETER Experiment Name: At_Drought_cDNA_P Parameter: Tissue Value: Aerial
  misc_feature: MA Experiment 108573 PARAMETER Experiment Name: At_Drought_cDNA_P Parameter: Treatment Value: Drought vs. No Drought
  misc_feature: MA Experiment ID: 108574 Result: Up-regulated in Transcription
  misc_feature: MA Experiment 108574 PARAMETER Experiment Name: At_Wounding__cDNA_P Parameter: Timepoint (hr) Value: 1
  misc_feature: MA Experiment 108574 PARAMETER Experiment Name: At_Wounding__cDNA_P Parameter: Tissue Value: Aerial
  misc_feature: MA Experiment 108574 PARAMETER Experiment Name: At_Wounding__cDNA_P Parameter: Treatment Value: Wounding vs. No Wounding
  misc_feature: MA Experiment ID: 108576 Result: Up-regulated in Transcription
  misc_feature: MA Experiment 108576 PARAMETER Experiment Name: At_42deg_Heat_cDNA_P Parameter: Temperature (deg C) Value: 42 vs. 22
  misc_feature: MA Experiment 108576 PARAMETER Experiment Name: At_42deg_Heat_cDNA_P Parameter: Timepoint (hr) Value: 1
  misc_feature: MA Experiment 108576 PARAMETER Experiment Name: At_42deg_Heat_cDNA_P Parameter: Tissue Value: Aerial
  misc_feature: MA Experiment ID: 108577 Result: Up-regulated in Transcription
  misc_feature: MA Experiment 108577 PARAMETER Experiment Name: At_42deg_Heat_cDNA_P Parameter: Temperature (deg C) Value: 42 vs. 22
  misc_feature: MA Experiment 108577 PARAMETER Experiment Name: At_42deg_Heat_cDNA_P Parameter: Timepoint (hr) Value: 6
  misc_feature: MA Experiment 108577 PARAMETER Experiment Name: At_42deg_Heat_cDNA_P Parameter: Tissue Value: Aerial
  misc_feature: MA Experiment ID: 108579 Result: Up-regulated in Transcription
  misc_feature: MA Experiment 108579 PARAMETER Experiment Name: At_4deg_Cold_cDNA_P Parameter: Temperature (deg C) Value: 4 vs. 22
  misc_feature: MA Experiment 108579 PARAMETER Experiment Name: At_4deg_Cold_cDNA_P Parameter: Timepoint (hr) Value: 6
  misc_feature: MA Experiment 108579 PARAMETER Experiment Name: At_4deg_Cold_cDNA_P Parameter: Tissue Value: Aerial
  misc_feature: MA Experiment ID: 108585 Result: Up-regulated in Transcription
  misc_feature: MA Experiment 108585 PARAMETER Experiment Name: At_5mM_NaNP_cDNA_P Parameter: Timepoint (hr) Value: 6
  misc_feature: MA Experiment 108585 PARAMETER Experiment Name: At_5mM_NaNP_cDNA_P Parameter: Tissue Value: Aerial
  misc_feature: MA Experiment 108585 PARAMETER Experiment Name: At_5mM_NaNP_cDNA_P Parameter: Treatment Value: null
  misc_feature: MA Experiment ID: 108595 Result: Up-regulated in Transcription
  misc_feature: MA Experiment 108595 PARAMETER Experiment Name: At_Ler-pi_Ovule_cDNA_P Parameter: Plant Line Value: null
  misc_feature: MA Experiment ID: 20000070 Result: Down-regulated in Transcription
  misc_feature: MA Experiment 20000070 PARAMETER Experiment Name: At_100uM_ABA_Mutants_cDNA_P Parameter: Plant Line Value: CS24
  misc_feature: MA Experiment 20000070 PARAMETER Experiment Name: At_100uM_ABA_Mutants_cDNA_P Parameter: Timepoint (hr) Value: 6
  misc_feature: MA Experiment 20000070 PARAMETER Experiment Name: At_100uM_ABA_Mutants_cDNA_P Parameter: Tissue Value: Aerial
  misc_feature: MA Experiment 20000070 PARAMETER Experiment Name: At_100uM_ABA_Mutants_cDNA_P Parameter: Treatment Value: 100uM ABA vs. No Treatment
  misc_feature: MA Experiment ID: 20000089 Result: Down-regulated in Transcription
  misc_feature: MA Experiment ID: 20000093 Result: Up-regulated in Transcription
  misc_feature: MA Experiment 20000093 PARAMETER Experiment Name: At_42deg_Heat_cDNA_P Parameter: Temperature (deg C) Value: 42 vs. 22
  misc_feature: MA Experiment 20000093 PARAMETER Experiment Name: At_42deg_Heat_cDNA_P Parameter: Timepoint (hr) Value: 0.5
  misc_feature: MA Experiment 20000093 PARAMETER Experiment Name: At_42deg_Heat_cDNA_P Parameter: Tissue Value: Aerial
  misc_feature: MA Experiment ID: 20000111 Result: Up-regulated in Transcription
  misc_feature: MA Experiment 20000111 PARAMETER Experiment Name: At_42deg_Heat_cDNA_P Parameter: Temperature (deg C) Value: 42 vs. 22
  misc_feature: MA Experiment 20000111 PARAMETER Experiment Name: At_42deg_Heat_cDNA_P Parameter: Timepoint (hr) Value: 6
  misc_feature: MA Experiment 20000111 PARAMETER Experiment Name: At_42deg_Heat_cDNA_P Parameter: Tissue Value: Aerial
  misc_feature: MA Experiment ID: 20000113 Result: Up-regulated in Transcription
  misc_feature: MA Experiment 20000113 PARAMETER Experiment Name: At_42deg_Heat_cDNA_P Parameter: Temperature (deg C) Value: 42 vs. 22
  misc_feature: MA Experiment 20000113 PARAMETER Experiment Name: At_42deg_Heat_cDNA_P Parameter: Timepoint (hr) Value: 8
  misc_feature: MA Experiment 20000113 PARAMETER Experiment Name: At_42deg_Heat_cDNA_P Parameter: Tissue Value: Aerial
  misc_feature: MA Experiment ID: 20000171 Result: Up-regulated in Transcription
  misc_feature: MA Experiment 20000171 PARAMETER Experiment Name: At_42deg_Heat_P Parameter: Age (day) Value: 14
  misc_feature: MA Experiment 20000171 PARAMETER Experiment Name: At_42deg_Heat_P Parameter: Organism Value: A. thaliana
  misc_feature: MA Experiment 20000171 PARAMETER Experiment Name: At_42deg_Heat_P Parameter: Plant Line Value: WS
  misc_feature: MA Experiment 20000171 PARAMETER Experiment Name: At_42deg_Heat_P Parameter: Temperature (deg C) Value: 42 vs. 22
  misc_feature: MA Experiment 20000171 PARAMETER Experiment Name: At_42deg_Heat_P Parameter: Timepoint (hr) Value: 1
  misc_feature: MA Experiment 20000171 PARAMETER Experiment Name: At_42deg_Heat_P Parameter: Tissue Value: Aerial
  misc_feature: MA Experiment ID: 20000173 Result: Up-regulated in Transcription
  misc_feature: MA Experiment 20000173 PARAMETER Experiment Name: At_42deg_Heat_P Parameter: Age (day) Value: 14
  misc_feature: MA Experiment 20000173 PARAMETER Experiment Name: At_42deg_Heat_P Parameter: Organism Value: A. thaliana
  misc_feature: MA Experiment 20000173 PARAMETER Experiment Name: At_42deg_Heat_P Parameter: Plant Line Value: WS
  misc_feature: MA Experiment 20000173 PARAMETER Experiment Name: At_42deg_Heat_P Parameter: Temperature (deg C) Value: 42 vs. 22
  misc_feature: MA Experiment 20000173 PARAMETER Experiment Name: At_42deg_Heat_P Parameter: Timepoint (hr) Value: 6
  misc_feature: MA Experiment 20000173 PARAMETER Experiment Name: At_42deg_Heat_P Parameter: Tissue Value: Aerial
  misc_feature: MA Experiment ID: 20000182 Result: Up-regulated in Transcription
  misc_feature: MA Experiment 20000182 PARAMETER Experiment Name: At_2mM_SA_P Parameter: Age (day) Value: 14
  misc_feature: MA Experiment 20000182 PARAMETER Experiment Name: At_2mM_SA_P Parameter: Organism Value: A. thaliana
  misc_feature: MA Experiment 20000182 PARAMETER Experiment Name: At_2mM_SA_P Parameter: Plant Line Value: WS
  misc_feature: MA Experiment 20000182 PARAMETER Experiment Name: At_2mM_SA_P Parameter: Timepoint (hr) Value: 6
  misc_feature: MA Experiment 20000182 PARAMETER Experiment Name: At_2mM_SA_P Parameter: Tissue Value: Aerial
  misc_feature: MA Experiment 20000182 PARAMETER Experiment Name: At_2mM_SA_P Parameter: Treatment Value: 2mM SA vs. No Treatment
  misc_feature: MA Experiment ID: 20000185 Result: Down-regulated in Transcription
  misc_feature: MA Experiment 20000185 PARAMETER Experiment Name: At_Roots__P Parameter: Age (day) Value: 7 vs. 21
  misc_feature: MA Experiment 20000185 PARAMETER Experiment Name: At_Roots__P Parameter: Organism Value: A. thaliana
  misc_feature: MA Experiment 20000185 PARAMETER Experiment Name: At_Roots__P Parameter: Tissue Value: Roots vs. Whole Plant
  misc_feature: MA Experiment ID: 20000224 Result: Down-regulated in Transcription
  misc_feature: MA Experiment ID: 20000227 Result: Down-regulated in Transcription
  misc_feature: MA Experiment 20000227 PARAMETER Experiment Name: At_Root-Tips-vs-Tops_P Parameter: Tissue Value: Root Tips vs. Root Tops
  misc_feature: MA Experiment ID: 20000234 Result: Down-regulated in Transcription
  misc_feature: MA Experiment 20000234 PARAMETER Experiment Name: At_Siliques_P Parameter: Age (day) Value: 21
  misc_feature: MA Experiment 20000234 PARAMETER Experiment Name: At_Siliques_P Parameter: Organism Value: A. thaliana
  misc_feature: MA Experiment 20000234 PARAMETER Experiment Name: At_Siliques_P Parameter: Plant Line Value: WS
  misc_feature: MA Experiment 20000234 PARAMETER Experiment Name: At_Siliques_P Parameter: Tissue Value: Less Than 5mm Siliques vs. Whole Plant
  misc_feature: MA Experiment ID: 20000264 Result: Down-regulated in Transcription
  misc_feature: MA Experiment 20000264 PARAMETER Experiment Name: At_Open_Flower_P Parameter: Age (day) Value: 21
  misc_feature: MA Experiment 20000264 PARAMETER Experiment Name: At_Open_Flower_P Parameter: Plant Line Value: WS
  misc_feature: MA Experiment 20000264 PARAMETER Experiment Name: At_Open_Flower_P Parameter: Tissue Value: Open Flower vs. Whole Plant
  misc_feature: MA Experiment ID: 20000265 Result: Down-regulated in Transcription
  misc_feature: MA Experiment 20000265 PARAMETER Experiment Name: At_Open_Flower_P Parameter: Age (day) Value: 21
  misc_feature: MA Experiment 20000265 PARAMETER Experiment Name: At_Open_Flower_P Parameter: Plant Line Value: WS
  misc_feature: MA Experiment 20000265 PARAMETER Experiment Name: At_Open_Flower_P Parameter: Tissue Value: Closed Flower vs. Whole Plant
  misc_feature: MA Experiment ID: 20000286 Result: Down-regulated in Transcription
  misc_feature: MA Experiment 20000286 PARAMETER Experiment Name: At_Open_Flower_P Parameter: Age (day) Value: 21
  misc_feature: MA Experiment 20000286 PARAMETER Experiment Name: At_Open_Flower_P Parameter: Plant Line Value: WS
  misc_feature: MA Experiment 20000286 PARAMETER Experiment Name: At_Open_Flower_P Parameter: Tissue Value: Half Open vs. Whole Plant
  misc_feature: MA Experiment ID: 20000438 Result: Down-regulated in Transcription
  misc_feature: MA Experiment 20000438 PARAMETER Experiment Name: At_Shoots__P Parameter: Age (day) Value: 14
  misc_feature: MA Experiment 20000438 PARAMETER Experiment Name: At_Shoots__P Parameter: Tissue Value: Shoots vs. Whole Plant
  misc_feature: MA Experiment ID: 20000439 Result: Down-regulated in Transcription
  misc_feature: MA Experiment 20000439 PARAMETER Experiment Name: At_Roots__P Parameter: Age (day) Value: 14 vs. 21
  misc_feature: MA Experiment 20000439 PARAMETER Experiment Name: At_Roots__P Parameter: Organism Value: A. thaliana
  misc_feature: MA Experiment 20000439 PARAMETER Experiment Name: At_Roots__P Parameter: Tissue Value: Roots vs. Whole Plant
  misc_feature: MA Experiment ID: 20000441 Result: Up-regulated in Transcription
  misc_feature: MA Experiment 20000441 PARAMETER Experiment Name: At_1uM_BR-BRZ__P Parameter: Tissue Value: Shoot Apices
  misc_feature: MA Experiment 20000441 PARAMETER Experiment Name: At_1uM_BR-BRZ__P Parameter: Treatment Value: 1uM BR vs. No Treatment
  misc_feature: MA Experiment ID: 20000443 Result: Up-regulated in Transcription
  misc_feature: MA Experiment 20000443 PARAMETER Experiment Name: At_1uM_BR-BRZ__P Parameter: Tissue Value: Shoot Apices
  misc_feature: MA Experiment 20000443 PARAMETER Experiment Name: At_1uM_BR-BRZ__P Parameter: Treatment Value: 1uM BRZ vs. No Treatment
  misc_feature: MA Experiment ID: 20000460 Result: Up-regulated in Transcription
  misc_feature: MA Experiment 20000460 PARAMETER Experiment Name: At_10percent_PEG_P Parameter: Age (day) Value: 12
  misc_feature: MA Experiment 20000460 PARAMETER Experiment Name: At_10percent_PEG_P Parameter: Organism Value: A. thaliana
  misc_feature: MA Experiment 20000460 PARAMETER Experiment Name: At_10percent_PEG_P Parameter: Plant Line Value: WS
  misc_feature: MA Experiment 20000460 PARAMETER Experiment Name: At_10percent_PEG_P Parameter: Timepoint (day) Value: 12
  misc_feature: MA Experiment 20000460 PARAMETER Experiment Name: At_10percent_PEG_P Parameter: Tissue Value: Whole Plant
  misc_feature: MA Experiment 20000460 PARAMETER Experiment Name: At_10percent_PEG_P Parameter: Treatment Value: 10percent PEG vs. No Treatment
  misc_feature: MA Experiment ID: 20000495 Result: Down-regulated in Transcription
  misc_feature: MA Experiment 20000495 PARAMETER Experiment Name: At_Guard_Cells_P Parameter: Harvest Date Value: 8/2/2002
  misc_feature: MA Experiment 20000495 PARAMETER Experiment Name: At_Guard_Cells_P Parameter: Organism Value: A. thaliana
  misc_feature: MA Experiment 20000495 PARAMETER Experiment Name: At_Guard_Cells_P Parameter: Tissue Value: Guard Cells vs. Leaves
  misc_feature: MA Experiment ID: 20000573 Result: Down-regulated in Transcription
  misc_feature: MA Experiment 20000573 PARAMETER Experiment Name: At_100uM_ABA_Mutants__P Parameter: Organism Value: A. thaliana
  misc_feature: MA Experiment 20000573 PARAMETER Experiment Name: At_100uM_ABA_Mutants__P Parameter: Plant Line Value: CS22 vs. Ler wt
  misc_feature: MA Experiment 20000573 PARAMETER Experiment Name: At_100uM_ABA_Mutants__P Parameter: Timepoint (hr) Value: N/A
  misc_feature: MA Experiment 20000573 PARAMETER Experiment Name: At_100uM_ABA_Mutants__P Parameter: Tissue Value: Whole Plant
  misc_feature: MA Experiment 20000573 PARAMETER Experiment Name: At_100uM_ABA_Mutants__P Parameter: Treatment Value: None
  misc_feature: MA Experiment ID: 20000574 Result: Down-regulated in Transcription
  misc_feature: MA Experiment 20000574 PARAMETER Experiment Name: At_100uM_ABA_Mutants__P Parameter: Organism Value: A. thaliana
  misc_feature: MA Experiment 20000574 PARAMETER Experiment Name: At_100uM_ABA_Mutants__P Parameter: Plant Line Value: CS23 vs. Ler wt
  misc_feature: MA Experiment 20000574 PARAMETER Experiment Name: At_100uM_ABA_Mutants__P Parameter: Timepoint (hr) Value: N/A
  misc_feature: MA Experiment 20000574 PARAMETER Experiment Name: At_100uM_ABA_Mutants__P Parameter: Tissue Value: Whole Plant
  misc_feature: MA Experiment 20000574 PARAMETER Experiment Name: At_100uM_ABA_Mutants__P Parameter: Treatment Value: None
  misc_feature: MA Experiment ID: 20001557 Result: Up-regulated in Transcription
  misc_feature: MA Experiment 20001557 PARAMETER Experiment Name: At_Drought_Soil_Dry_P Parameter: Age (day) Value: 27
  misc_feature: MA Experiment 20001557 PARAMETER Experiment Name: At_Drought_Soil_Dry_P Parameter: Organism Value: A. thaliana
  misc_feature: MA Experiment 20001557 PARAMETER Experiment Name: At_Drought_Soil_Dry_P Parameter: Plant Line Value: WS
  misc_feature: MA Experiment 20001557 PARAMETER Experiment Name: At_Drought_Soil_Dry_P Parameter: Post Timepoint (hr) Value: 3
  misc_feature: MA Experiment 20001557 PARAMETER Experiment Name: At_Drought_Soil_Dry_P Parameter: Post-Treatment Value: Re-Water vs. No Drought
  misc_feature: MA Experiment 20001557 PARAMETER Experiment Name: At_Drought_Soil_Dry_P Parameter: Timepoint (day) Value: 13
  misc_feature: MA Experiment 20001557 PARAMETER Experiment Name: At_Drought_Soil_Dry_P Parameter: Treatment Value: Drought vs. No Drought
  misc_feature: MA Experiment ID: 20001761 Result: Down-regulated in Transcription
  misc_feature: MA Experiment 20001761 PARAMETER Experiment Name: At_50mM_NH4NO3_L-to-H_P Parameter: Timepoint (hr) Value: 4
  misc_feature: MA Experiment 20001761 PARAMETER Experiment Name: At_50mM_NH4NO3_L-to-H_P Parameter: Tissue Value: Siliques
  misc_feature: MA Experiment 20001761 PARAMETER Experiment Name: At_50mM_NH4NO3_L-to-H_P Parameter: Treatment Value: 50mM NH4NO3 vs 100mM Mannitol
acttttcttttcctcatcataaaaaacattctcagagcaaatttcaagtttatttcattcaatttcgatccgagtaaccatggagtgtagatcattggatctgacgattatatctgcggaggatctcaaagacgttcaattgatcggtaaacaagacttgtacgccgtcgtttccatcaacggcgacgctaggacgaagcagaagacaaaggttgataaagattgcggcaccaaacctaaatggaagcatcaaatgaagctcaccgtcgatgacgcagcggcgcgtgacaatcgtcttactcttgttttcgagatcgtggcggatcgtcccatcgctggtgataaacctgtcggtgaggttagcgttccggtgaaggagcttttggatcagaataaaggtgacgaggagaaaacggttacttacgccgtgaggttgcctaacgggaaggcgaaaggatctctcaaattctcgttcaaatttggggaaaagtatacttatggatcttcgagtggtcctcacgcgccggtcccttcggctatggatcataagactatggatcagcccgtcaccgcttacccgcccggacacggtgcaccgtctgcataccctgctcctcccgcgggtccttcttccggatatccaccacaaggacatgacgataagcacgatggtgtttatggatacccgcagcaggctggatatccagctggaaccggtggttatccgccacctggtgcatacccacaacagggaggttaccctggatatccgcctcagcaacagggtggatacccgggttatccgccacagggtccatatggttacccgcaacaaggttatccaccacagggtccatacggttacccgcaacagcaagctcatggtaaaccgcagaaaccgaagaagcatggtaaggctggagctggaatgggactaggacttgggcttggagctggtttattgggtgggttgttggttggtgaagcggtttctgacatcgctgatatgggtgacatgggtgacatgggtgacatgggtggtttcgatttctgattgctgtgttatcaagttttaatttcttaggataattgctctaatgtttttcgtttgatgaatcatgtgaagaacgtgagagatcaagttttatcttgtgtttatgtctccggttacttattttcttctaatgaatgtaacattatgatatttccaatctctggctgttgaatagaatgcaatgaaacattggaaatatagtgttgactttgtcacctttatt

SEQ ID NO: 100626 - protein, 324 aa, Arabidopsis thaliana
  peptide (1)..(324): Ceres Seq. ID no. 13605668
  misc_feature (6)..(95): Pfam Name: C2 domain Pfam Description: C2 domain
  misc_feature (1)..(324): Homolog of NCBI NO: 18390977 NR Description: C2 domain-containing protein [Arabidopsis
  misc_feature (1)..(324): Homolog of NCBI NO: 11358845 NR Description: shock protein SRC2 homolog [imported] -
MECRSLDLTIISAEDLKDVQLIGKQDLYAVVSINGDARTKQKTKVDKDCGTKPKWKHQMKLTVDDAAARDNRLTLVFEIVADRPIAGDKPVGEVSVPVKELLDQNKGDEEKTVTYAVRLPNGKAKGSLKFSFKFGEKYTYGSSSGPHAPVPSAMDHKTMDQPVTAYPPGHGAPSAYPAPPAGPSSGYPPQGHDDKHDGVYGYPQQAGYPAGTGGYPPPGAYPQQGGYPGYPPQQQGGYPGYPPQGPYGYPQQGYPPQGPYGYPQQQAHGKPQKPKKHGKAGAGMGLGLGLGAGLLGGLLVGEAVSDIADMGDMGDMGDMGGFDF

SEQ ID NO: 100627 - protein, 266 aa, Arabidopsis thaliana
  peptide (1)..(266): Ceres Seq. ID no. 13605669
  misc_feature (77)..(223): Pfam Name: High molecular weight glutenin subunit Pfam Description: High molecular weight glutenin subunit
  misc_feature (1)..(266): Homolog of NCBI NO: 18390977 NR Description: C2 domain-containing protein [Arabidopsis
  misc_feature (1)..(266): Homolog of NCBI NO: 11358845 NR Description: shock protein SRC2 homolog [imported] -
MKLTVDDAAARDNRLTLVFEIVADRPIAGDKPVGEVSVPVKELLDQNKGDEEKTVTYAVRLPNGKAKGSLKFSFKFGEKYTYGSSSGPHAPVPSAMDHKTMDQPVTAYPPGHGAPSAYPAPPAGPSSGYPPQGHDDKHDGVYGYPQQAGYPAGTGGYPPPGAYPQQGGYPGYPPQQQGGYPGYPPQGPYGYPQQGYPPQGPYGYPQQQAHGKPQKPKKHGKAGAGMGLGLGLGAGLLGGLLVGEAVSDIADMGDMGDMGDMGGFDF

SEQ ID NO: 100628 - protein, 171 aa, Arabidopsis thaliana
  peptide (1)..(171): Ceres Seq. ID no. 13605670
  misc_feature (1)..(128): Pfam Name: High molecular weight glutenin subunit Pfam Description: High molecular weight glutenin subunit
  misc_feature (1)..(171): Homolog of NCBI NO: 18390977 NR Description: C2 domain-containing protein [Arabidopsis
  misc_feature (1)..(171): Homolog of NCBI NO: 11358845 NR Description: shock protein SRC2 homolog [imported] -
MDHKTMDQPVTAYPPGHGAPSAYPAPPAGPSSGYPPQGHDDKHDGVYGYPQQAGYPAGTGGYPPPGAYPQQGGYPGYPPQQQGGYPGYPPQGPYGYPQQGYPPQGPYGYPQQQAHGKPQKPKKHGKAGAGMGLGLGLGAGLLGGLLVGEAVSDIADMGDMGDMGDMGGFDF

SEQ ID NO: 100629 - DNA, 2115 bp, Arabidopsis thaliana
  misc_feature (1)..(2115): Ceres Seq. ID no. 13605671
  misc_feature: MA Experiment ID: 20000179 Result: Down-regulated in Transcription
  misc_feature: MA Experiment 20000179 PARAMETER Experiment Name: At_Germinating_Seeds_P Parameter: Age (hr) Value: 6 vs. 0
  misc_feature: MA Experiment 20000179 PARAMETER Experiment Name: At_Germinating_Seeds_P Parameter: Tissue Value: Germinating Seeds
  misc_feature: MA Experiment ID: 20000180 Result: Down-regulated in Transcription
  misc_feature: MA Experiment 20000180 PARAMETER Experiment Name: At_Germinating_Seeds_P Parameter: Age (hr) Value: 24 vs. 0
  misc_feature: MA Experiment 20000180 PARAMETER Experiment Name: At_Germinating_Seeds_P Parameter: Tissue Value: Germinating Seeds
  misc_feature: MA Experiment ID: 20000234 Result: Down-regulated in Transcription
  misc_feature: MA Experiment 20000234 PARAMETER Experiment Name: At_Siliques_P Parameter: Age (day) Value: 21
  misc_feature: MA Experiment 20000234 PARAMETER Experiment Name: At_Siliques_P Parameter: Organism Value: A. thaliana
  misc_feature: MA Experiment 20000234 PARAMETER Experiment Name: At_Siliques_P Parameter: Plant Line Value: WS
  misc_feature: MA Experiment 20000234 PARAMETER Experiment Name: At_Siliques_P Parameter: Tissue Value: Less Than 5mm Siliques vs. Whole Plant
  misc_feature: MA Experiment ID: 20000264 Result: Down-regulated in Transcription
  misc_feature: MA Experiment 20000264 PARAMETER Experiment Name: At_Open_Flower_P Parameter: Age (day) Value: 21
  misc_feature: MA Experiment 20000264 PARAMETER Experiment Name: At_Open_Flower_P Parameter: Plant Line Value: WS
  misc_feature: MA Experiment 20000264 PARAMETER Experiment Name: At_Open_Flower_P Parameter: Tissue Value: Open Flower vs. Whole Plant
  misc_feature: MA Experiment ID: 20000265 Result: Down-regulated in Transcription
  misc_feature: MA Experiment 20000265 PARAMETER Experiment Name: At_Open_Flower_P Parameter: Age (day) Value: 21
  misc_feature: MA Experiment 20000265 PARAMETER Experiment Name: At_Open_Flower_P Parameter: Plant Line Value: WS
  misc_feature: MA Experiment 20000265 PARAMETER Experiment Name: At_Open_Flower_P Parameter: Tissue Value: Closed Flower vs. Whole Plant
  misc_feature: MA Experiment ID: 20000286 Result: Down-regulated in Transcription
  misc_feature: MA Experiment 20000286 PARAMETER Experiment Name: At_Open_Flower_P Parameter: Age (day) Value: 21
  misc_feature: MA Experiment 20000286 PARAMETER Experiment Name: At_Open_Flower_P Parameter: Plant Line Value: WS
  misc_feature: MA Experiment 20000286 PARAMETER Experiment Name: At_Open_Flower_P Parameter: Tissue Value: Half Open vs. Whole Plant
  misc_feature: MA Experiment ID: 20000794 Result: Down-regulated in Transcription
  misc_feature: MA Experiment 20000794 PARAMETER Experiment Name: At_Petals_P Parameter: Age (day) Value: 23-25 days
  misc_feature: MA Experiment 20000794 PARAMETER Experiment Name: At_Petals_P Parameter: Plant Line Value: WS
  misc_feature: MA Experiment 20000794 PARAMETER Experiment Name: At_Petals_P Parameter: Tissue Value: Petals vs. Whole plant
  misc_feature: MA Experiment ID: 20001451 Result: Up-regulated in Transcription
  misc_feature: MA Experiment 20001451 PARAMETER Experiment Name: At_Far-red-induction_P Parameter: Age (day) Value: 7
  misc_feature: MA Experiment 20001451 PARAMETER Experiment Name: At_Far-red-induction_P Parameter: Light Value: Far-red vs. White
  misc_feature: MA Experiment 20001451 PARAMETER Experiment Name: At_Far-red-induction_P Parameter: Organism Value: A. thaliana
  misc_feature: MA Experiment 20001451 PARAMETER Experiment Name: At_Far-red-induction_P Parameter: Plant Line Value: Columbia
  misc_feature: MA Experiment 20001451 PARAMETER Experiment Name: At_Far-red-induction_P Parameter: Timepoint (hr) Value: 24
  misc_feature: MA Experiment 20001451 PARAMETER Experiment Name: At_Far-red-induction_P Parameter: Tissue Value: Whole Plant
  misc_feature: MA Experiment ID: 20001458 Result: Up-regulated in Transcription
  misc_feature: MA Experiment 20001458 PARAMETER Experiment Name: At_50mM_NH4NO3_L-to-H_P Parameter: Age (day) Value: Undefined
  misc_feature: MA Experiment 20001458 PARAMETER Experiment Name: At_50mM_NH4NO3_L-to-H_P Parameter: Organism Value: Undefined
  misc_feature: MA Experiment 20001458 PARAMETER Experiment Name: At_50mM_NH4NO3_L-to-H_P Parameter: Plant Line Value: Undefined
  misc_feature: MA Experiment 20001458 PARAMETER Experiment Name: At_50mM_NH4NO3_L-to-H_P Parameter: Timepoint (hr) Value: 2
  misc_feature: MA Experiment 20001458 PARAMETER Experiment Name: At_50mM_NH4NO3_L-to-H_P Parameter: Tissue Value: Siliques
  misc_feature: MA Experiment 20001458 PARAMETER Experiment Name: At_50mM_NH4NO3_L-to-H_P Parameter: Treatment Value: 50mM NH4NO3 vs. 100mM Manitol
  misc_feature: MA Experiment ID: 20001755 Result: Down-regulated in Transcription
  misc_feature: MA Experiment 20001755 PARAMETER Experiment Name: At_50mM_NH4NO3_L-to-H_P Parameter: Timepoint (hr) Value: 2
  misc_feature: MA Experiment 20001755 PARAMETER Experiment Name: At_50mM_NH4NO3_L-to-H_P Parameter: Tissue Value: Leaf
  misc_feature: MA Experiment 20001755 PARAMETER Experiment Name: At_50mM_NH4NO3_L-to-H_P Parameter: Treatment Value: 50mM NH4NO3 vs 100mM Mannitol
acaaacgagatcgaagaagagttctcaacaacgaaaaatgatttttatcaaggaaaacacagcgaagatgacgaggaacaaagctattgcgtgtttggtttttctgactgtgcttgattttttaatgaatattggagcagctttgatgtcaagtttggcaatagaaggcgaagagcagaaactggggacggtgatagggatcgatctagggactacatattcatgtgttggtgtctatcataacaaacatgtggaaatcatagcaaacgatcaaggaaacagaattacaccatcttgggttgcatttactgataccgaacgtctcatcggggaagctgctaagaatcaagcagccaagaacccggagcgaaccatcttcgacccgaaacgtctgattggaagaaaatttgatgatcctgatgtacaaagggatatcaaattcttgccatacaaggttgtgaacaaagatgggaagccttacattcaagtgaaggttaaaggtgaagagaaattgtttagccctgaggaaataagtgctatgatactaaccaagatgaaagaaacagctgaagctttcttgggaaagaagattaaagatgctgtgatcacggttccagcgtatttcaatgatgcgcagaggcaagccacaaaggatgcaggggcaatcgcggggcttaacgtggttcgtataatcaatgagccaacgggtgctgccatagcttatggtttagacaaaaaaggtggggagtcaaacattctcgtatatgatcttggtggtggaacattcgatgttagtatccttaccatagacaatggagtctttgaagtcttatccacaagtggagacactcaccttggtggagaagattttgaccacagagtgatggactatttcatcaaacttgtcaagaagaagtataacaaagacattagcaaggatcacaaagcccttggtaaacttaggcgtgaatgtgagcttgcgaaacgatctttgagcaaccagcaccaagtccgtgttgagattgagtcgctctttgatggagttgatttctctgagcctttaacgagagcaagattcgaggaactcaacatggatttgttcaagaagactatggagccagtgaagaaggctcttaaagatgcgggtttgaagaaatctgatatcgacgagattgttcttgttggaggaagcactcgaatcccaaaagttcagcagatgttaaaggatttcttcgacggcaaggaacccagcaaagggactaaccctgatgaggctgtggcctatggcgccgcggtccaaggtggagtattaagtggtgaaggtggagaagaaacacaaaatattctactgcttgatgttgcgcctttgagtctcggtattgaaactgtcggaggcgtgatgacaaacattattccgaggaacacggtgatcccaacgaagaagtctcaggtgttcactacttaccaagatcagcaaactactgtgactatcaacgtctacgaaggcgagagaagcatgacgaaagataaccgcgagcttggaaaattcgatctcacaggcattcttcctgcacccaggggagtgccacagattgaggtgactttcgaagtggacgcaaatgggatcctgcaggtgaaagctgaagacaaagttgctaagacgtcacaatcgattacaataacgaacgataaaggtcgtttgacagaagaagagattgaggaaatgatcagagaagcagaggagtttgctgaggaagataagattatgaaggagaagattgatgcgaggaacaagcttgaaacgtatgtgtacaacatgaaaagtacagtggccgataaggagaagcttgcgaagaagataagtgatgaagataaagagaagatggaaggggttttgaaggaggctttggagtggttagaagagaatgtgaatgcagagaaggaagattatgatgagaaactgaaggaggtggagttggtttgtgacccggttattaagtcggtttacgagaaaaccgagggagagaatgaggacacgatggagatgatcacgatgagttatagaatcgtataattgaaggtcttttgagtcggttagctataggatttgcagct

SEQ ID NO: 100630 - protein, 690 aa, Arabidopsis thaliana
  peptide (1)..(690): Ceres Seq. ID no. 13605672
  misc_feature (64)..(670): Pfam Name: Hsp70 protein Pfam Description: Hsp70 protein
  misc_feature (48)..(674): Homolog of NCBI NO: 7635897 NR Description: luminal binding protein [Pseudotsuga menziesii]
  misc_feature (26)..(674): Homolog of NCBI NO: 729620 NR Description: Luminal binding protein 4 precursor (BiP 4) (78
  misc_feature (36)..(674): Homolog of NCBI NO: 15241844 NR Description: luminal binding protein 1 precursor (BiP-1) [Arabidopsis thaliana] >gi|18206379|sp|Q9LKR3|BIP1_ARATH Luminal protein 1 precursor (BiP1) (AtBP1) >gi|9502169|gb|AAF88019.1|
  misc_feature (32)..(674): Homolog of NCBI NO: 729623 NR Description: Luminal binding protein 5 precursor (BiP 5) (78
  misc_feature (36)..(674): Homolog of NCBI NO: 30693962 NR Description: luminal binding protein 2 precursor (BiP-2) [Arabidopsis thaliana] >gi|12643245|sp|Q39043|BIP2_ARATH Luminal protein 2 precursor (BiP2) (AtBP2) >gi|9757947|dbj|BAB08435.1|
  misc_feature (36)..(674): Homolog of NCBI NO: 1695719 NR Description: luminal binding protein [Arabidopsis thaliana]
  misc_feature (36)..(674): Homolog of NCBI NO: 2129639 NR Description: dnaK-type molecular chaperone BiP - Arabidopsis >gi|1303695|dbj|BAA12348.1| luminal binding protein (BiP)
  misc_feature (44)..(681): Homolog of NCBI NO: 31981722 NR Description: heat shock 70kD protein 5 (glucose-regulated
  misc_feature (44)..(681): Homolog of NCBI NO: 1304157 NR Description: 78 kDa glucose-regulated protein [Mus musculus]
  misc_feature (40)..(681): Homolog of NCBI NO: 31419302 NR Description: Unknown (protein for MGC:55994) [Danio rerio]
QTRSKKSSQQRKMIFIKENTAKMTRNKAIACLVFLTVLDFLMNIGAALMSSLAIEGEEQKLGTVIGIDLGTTYSCVGVYHNKHVEIIANDQGNRITPSWVAFTDTERLIGEAAKNQAAKNPERTIFDPKRLIGRKFDDPDVQRDIKFLPYKVVNKDGKPYIQVKVKGEEKLFSPEEISAMILTKMKETAEAFLGKKIKDAVITVPAYFNDAQRQATKDAGAIAGLNVVRIINEPTGAAIAYGLDKKGGESNILVYDLGGGTFDVSILTIDNGVFEVLSTSGDTHLGGEDFDHRVMDYFIKLVKKKYNKDISKDHKALGKLRRECELAKRSLSNQHQVRVEIESLFDGVDFSEPLTRARFEELNMDLFKKTMEPVKKALKDAGLKKSDIDEIVLVGGSTRIPKVQQMLKDFFDGKEPSKGTNPDEAVAYGAAVQGGVLSGEGGEETQNILLLDVAPLSLGIETVGGVMTNIIPRNTVIPTKKSQVFTTYQDQQTTVTINVYEGERSMTKDNRELGKFDLTGILPAPRGVPQIEVTFEVDANGILQVKAEDKVAKTSQSITITNDKGRLTEEEIEEMIREAEEFAEEDKIMKEKIDARNKLETYVYNMKSTVADKEKLAKKISDEDKEKMEGVLKEALEWLEENVNAEKEDYDEKLKEVELVCDPVIKSVYEKTEGENEDTMEMITMSYRIV

SEQ ID NO: 100631 - protein, 678 aa, Arabidopsis thaliana
  peptide (1)..(678): Ceres Seq. ID no. 13605673
  misc_feature (52)..(658): Pfam Name: Hsp70 protein Pfam Description: Hsp70 protein
  misc_feature (36)..(662): Homolog of NCBI NO: 7635897 NR Description: luminal binding protein [Pseudotsuga menziesii]
  misc_feature (14)..(662): Homolog of NCBI NO: 729620 NR Description: Luminal binding protein 4 precursor (BiP 4) (78
  misc_feature (24)..(662): Homolog of NCBI NO: 15241844 NR Description: luminal binding protein 1 precursor (BiP-1) [Arabidopsis thaliana] >gi|18206379|sp|Q9LKR3|BIP1_ARATH Luminal protein 1 precursor (BiP1) (AtBP1) >gi|9502169|gb|AAF88019.1|
  misc_feature (20)..(662): Homolog of NCBI NO: 729623 NR Description: Luminal binding protein 5 precursor (BiP 5) (78
  misc_feature (24)..(662): Homolog of NCBI NO: 30693962 NR Description: luminal binding protein 2 precursor (BiP-2) [Arabidopsis thaliana] >gi|12643245|sp|Q39043|BIP2_ARATH Luminal protein 2 precursor (BiP2) (AtBP2) >gi|9757947|dbj|BAB08435.1|
  misc_feature (24)..(662): Homolog of NCBI NO: 1695719 NR Description: luminal binding protein [Arabidopsis thaliana]
  misc_feature (24)..(662): Homolog of NCBI NO: 2129639 NR Description: dnaK-type molecular chaperone BiP - Arabidopsis >gi|1303695|dbj|BAA12348.1| luminal binding protein (BiP)
  misc_feature (32)..(669): Homolog of NCBI NO: 31981722 NR Description: heat shock 70kD protein 5 (glucose-regulated
  misc_feature (32)..(669): Homolog of NCBI NO: 1304157 NR Description: 78 kDa glucose-regulated protein [Mus musculus]
  misc_feature (28)..(669): Homolog of NCBI NO: 31419302 NR Description: Unknown (protein for MGC:55994) [Danio rerio]
MIFIKENTAKMTRNKAIACLVFLTVLDFLMNIGAALMSSLAIEGEEQKLGTVIGIDLGTTYSCVGVYHNKHVEIIANDQGNRITPSWVAFTDTERLIGEAAKNQAAKNPERTIFDPKRLIGRKFDDPDVQRDIKFLPYKVVNKDGKPYIQVKVKGEEKLFSPEEISAMILTKMKETAEAFLGKKIKDAVITVPAYFNDAQRQATKDAGAIAGLNVVRIINEPTGAAIAYGLDKKGGESNILVYDLGGGTFDVSILTIDNGVFEVLSTSGDTHLGGEDFDHRVMDYFIKLVKKKYNKDISKDHKALGKLRRECELAKRSLSNQHQVRVEIESLFDGVDFSEPLTRARFEELNMDLFKKTMEPVKKALKDAGLKKSDIDEIVLVGGSTRIPKVQQMLKDFFDGKEPSKGTNPDEAVAYGAAVQGGVLSGEGGEETQNILLLDVAPLSLGIETVGGVMTNIIPRNTVIPTKKSQVFTTYQDQQTTVTINVYEGERSMTKDNRELGKFDLTGILPAPRGVPQIEVTFEVDANGILQVKAEDKVAKTSQSITITNDKGRLTEEEIEEMIREAEEFAEEDKIMKEKIDARNKLETYVYNMKSTVADKEKLAKKISDEDKEKMEGVLKEALEWLEENVNAEKEDYDEKLKEVELVCDPVIKSVYEKTEGENEDTMEMITMSYRIV

SEQ ID NO: 100632 - protein, 668 aa, Arabidopsis thaliana
  peptide (1)..(668): Ceres Seq. ID no. 13605674
  misc_feature (42)..(648): Pfam Name: Hsp70 protein Pfam Description: Hsp70 protein
  misc_feature (26)..(652): Homolog of NCBI NO: 7635897 NR Description: luminal binding protein [Pseudotsuga menziesii]
  misc_feature (4)..(652): Homolog of NCBI NO: 729620 NR Description: Luminal binding protein 4 precursor (BiP 4) (78
  misc_feature (14)..(652): Homolog of NCBI NO: 15241844 NR Description: luminal binding protein 1 precursor (BiP-1) [Arabidopsis thaliana] >gi|18206379|sp|Q9LKR3|BIP1_ARATH Luminal protein 1 precursor (BiP1) (AtBP1) >gi|9502169|gb|AAF88019.1|
  misc_feature (10)..(652): Homolog of NCBI NO: 729623 NR Description: Luminal binding protein 5 precursor (BiP 5) (78
  misc_feature (14)..(652): Homolog of NCBI NO: 30693962 NR Description: luminal binding protein 2 precursor (BiP-2) [Arabidopsis thaliana] >gi|12643245|sp|Q39043|BIP2_ARATH Luminal protein 2 precursor (BiP2) (AtBP2) >gi|9757947|dbj|BAB08435.1|
  misc_feature (14)..(652): Homolog of NCBI NO: 1695719 NR Description: luminal binding protein [Arabidopsis thaliana]
  misc_feature (14)..(652): Homolog of NCBI NO: 2129639 NR Description: dnaK-type molecular chaperone BiP - Arabidopsis >gi|1303695|dbj|BAA12348.1| luminal binding protein (BiP)
  misc_feature (22)..(659): Homolog of NCBI NO: 31981722 NR Description: heat shock 70kD protein 5 (glucose-regulated
  misc_feature (22)..(659): Homolog of NCBI NO: 1304157 NR Description: 78 kDa glucose-regulated protein [Mus musculus]
  misc_feature (18)..(659): Homolog of NCBI NO: 31419302 NR Description: Unknown (protein for MGC:55994) [Danio rerio]
MTRNKAIACLVFLTVLDFLMNIGAALMSSLAIEGEEQKLGTVIGIDLGTTYSCVGVYHNKHVEIIANDQGNRITPSWVAFTDTERLIGEAAKNQAAKNPERTIFDPKRLIGRKFDDPDVQRDIKFLPYKVVNKDGKPYIQVKVKGEEKLFSPEEISAMILTKMKETAEAFLGKKIKDAVITVPAYFNDAQRQATKDAGAIAGLNVVRIINEPTGAAIAYGLDKKGGESNILVYDLGGGTFDVSILTIDNGVFEVLSTSGDTHLGGEDFDHRVMDYFIKLVKKKYNKDISKDHKALGKLRRECELAKRSLSNQHQVRVEIESLFDGVDFSEPLTRARFEELNMDLFKKTMEPVKKALKDAGLKKSDIDEIVLVGGSTRIPKVQQMLKDFFDGKEPSKGTNPDEAVAYGAAVQGGVLSGEGGEETQNILLLDVAPLSLGIETVGGVMTNIIPRNTVIPTKKSQVFTTYQDQQTTVTINVYEGERSMTKDNRELGKFDLTGILPAPRGVPQIEVTFEVDANGILQVKAEDKVAKTSQSITITNDKGRLTEEEIEEMIREAEEFAEEDKIMKEKIDARNKLETYVYNMKSTVADKEKLAKKISDEDKEKMEGVLKEALEWLEENVNAEKEDYDEKLKEVELVCDPVIKSVYEKTEGENEDTMEMITMSYRIV

SEQ ID NO: 100633 - DNA, 1421 bp, Arabidopsis thaliana
  misc_feature (1)..(1421): Ceres Seq. ID no. 13605684
  misc_feature: MA Experiment ID: 20000307 Result: Up-regulated in Transcription
  misc_feature: MA Experiment 20000307 PARAMETER Experiment Name: At_Germinating_Seeds_Sub_P Parameter: Age (hr) Value: 24 vs. 0
  misc_feature: MA Experiment 20000307 PARAMETER Experiment Name: At_Germinating_Seeds_Sub_P Parameter: Organism Value: A. thaliana
  misc_feature: MA Experiment 20000307 PARAMETER Experiment Name: At_Germinating_Seeds_Sub_P Parameter: Plant Line Value: WS
  misc_feature: MA Experiment 20000307 PARAMETER Experiment Name: At_Germinating_Seeds_Sub_P Parameter: Tissue Value: Germinating Seeds
atggagttagaaaaagttcacgtggttttgttcccatacttgtccaaagggcacatgattcctatgctccaattagctcgtctcctcttatcccactccttcgccggagacatctccgtcaccgtcttcaccactcctttgaaccgtcctttcatcgttgactcactctccggcaccaaagcgaccatcgtcgacgtacctttccctgataacgtcccggagatcccacccggcgtcgagtgcactgacaaactccctgctttgtcgtcctccctcttcgttcctttcacaagagccaccaagtcaatgcaggcagactttgagcgagagctcatgtcactgccacgtgtcagtttcatggtctcagacggtttcttgtggtggacgcaagagtcagctcgaaagctagggtttcctcggcttgttttctttggtatgaattgcgcttccaccgttatatgtgacagtgtttttcaaaaccagcttctatctaatgttaagtccgagacggagccagtttctgtaccggagtttccgtggattaaggttaggaaatgtgatttcgttaaagatatgtttgatccaaaaaccaccacagatcctggattcaagcttatcctagatcaagtcacgtctatgaatcaaagccaaggtatcatattcaatacatttgacgaccttgaacccgtgtttattgatttctacaagcgtaaacgcaaactcaagctttgggcagttggaccgctttgttacgtaaataacttcttggatgatgaagtagaagagaaggtcaaacctagttggatgaaatggctagatgaaaagcgagacaagggatgcaatgttctgtatgtggctttcgggtcacaagccgagatctcgagagaacaactagaggagattgcgttagggttggaagaatcgaaggtgaacttcttgtgggtggtcaaaggaaatgaaataggaaaagggtttgaagagagagtgggagaaagaggaatgatggtgagagatgaatgggttgatcagaggaagatattagagcacgagagtgttagagggttcttgagccattgtgggtggaattctctgacggagagcatttgctcggaggttccaatcttggcgtttcctttagcagcggagcaacctctgaatgcgattttggtggtggaagagctgagagtggcggagagagtggtggcggcgagtgaaggggttgtgagaagagaagagattgcagagaaagtgaaggagttgatggagggagagaaagggaaagagctgaggaggaatgtcgaggcatatggtaagatggcgaagaaggctttggaggaaggtattggttcgtctaggaagaatttagacaaccttatcaacgagttttgtaacaatggaacatgatgatgtatgttaacacc

SEQ ID NO: 100634 - protein, 467 aa, Arabidopsis thaliana
  peptide (1)..(467): Ceres Seq. ID no. 13605685
  misc_feature (1)..(467): Homolog of NCBI NO: 4914344 NR Description: F14N23.30 [Arabidopsis thaliana]
  misc_feature (103)..(467): Homolog of NCBI NO: 30681693 NR Description: glycosyltransferase family [Arabidopsis thaliana]
  misc_feature (103)..(467): Homolog of NCBI NO: 26449653 NR Description: putative glucosyl transferase [Arabidopsis
  misc_feature (7)..(465): Homolog of NCBI NO: 30679796 NR Description: glycosyltransferase family [Arabidopsis thaliana]
  misc_feature (7)..(465): Homolog of NCBI NO: 21553613 NR Description: putative glucosyltransferase [Arabidopsis
  misc_feature (7)..(465): Homolog of NCBI NO: 15241515 NR Description: glycosyltransferase family [Arabidopsis thaliana]
  misc_feature (7)..(310): Homolog of NCBI NO: 30679790 NR Description: glycosyltransferase family [Arabidopsis thaliana] putative glucosyltransferase [Arabidopsis thaliana]
  misc_feature (2)..(463): Homolog of NCBI NO: 21742764 NR Description: OSJNBa0023J03.6 [Oryza sativa (japonica
  misc_feature (6)..(461): Homolog of NCBI NO: 15228034 NR Description: UDP-glycosyltransferase family [Arabidopsis
  misc_feature (7)..(461): Homolog of NCBI NO: 7433911 NR Description: probable glucosyltransferase twi1 (EC 2.4.1.-) - (fragment) >gi|1359905|emb|CAA59450.1| homologous to
MELEKVHVVLFPYLSKGHMIPMLQLARLLLSHSFAGDISVTVFTTPLNRPFIVDSLSGTKATIVDVPFPDNVPEIPPGVECTDKLPALSSSLFVPFTRATKSMQADFERELMSLPRVSFMVSDGFLWWTQESARKLGFPRLVFFGMNCASTVICDSVFQNQLLSNVKSETEPVSVPEFPWIKVRKCDFVKDMFDPKTTTDPGFKLILDQVTSMNQSQGIIFNTFDDLEPVFIDFYKRKRKLKLWAVGPLCYVNNFLDDEVEEKVKPSWMKWLDEKRDKGCNVLYVAFGSQAEISREQLEEIALGLEESKVNFLWVVKGNEIGKGFEERVGERGMMVRDEWVDQRKILEHESVRGFLSHCGWNSLTESICSEVPILAFPLAAEQPLNAILVVEELRVAERVVAASEGVVRREEIAEKVKELMEGEKGKELRRNVEAYGKMAKKALEEGIGSSRKNLDNLINEFCNNGT

SEQ ID NO: 100635 - protein, 449 aa, Arabidopsis thaliana
  peptide (1)..(449): Ceres Seq. ID no. 13605686
  misc_feature (1)..(449): Homolog of NCBI NO: 4914344 NR Description: F14N23.30 [Arabidopsis thaliana]
  misc_feature (85)..(449): Homolog of NCBI NO: 30681693 NR Description: glycosyltransferase family [Arabidopsis thaliana]
  misc_feature (85)..(449): Homolog of NCBI NO: 26449653 NR Description: putative glucosyl transferase [Arabidopsis
  misc_feature (1)..(447): Homolog of NCBI NO: 30679796 NR Description: glycosyltransferase family [Arabidopsis thaliana]
  misc_feature (1)..(447): Homolog of NCBI NO: 21553613 NR Description: putative glucosyltransferase [Arabidopsis
  misc_feature (1)..(447): Homolog of NCBI NO: 15241515 NR Description: glycosyltransferase family [Arabidopsis thaliana]
  misc_feature (1)..(292): Homolog of NCBI NO: 30679790 NR Description: glycosyltransferase family [Arabidopsis thaliana] putative glucosyltransferase [Arabidopsis thaliana]
  misc_feature (1)..(445): Homolog of NCBI NO: 21742764 NR Description: OSJNBa0023J03.6 [Oryza sativa (japonica
  misc_feature (1)..(443): Homolog of NCBI NO: 15228034 NR Description: UDP-glycosyltransferase family [Arabidopsis
  misc_feature (1)..(443): Homolog of NCBI NO: 7433911 NR Description: probable glucosyltransferase twi1 (EC 2.4.1.-) - (fragment) >gi|1359905|emb|CAA59450.1| homologous to
MIPMLQLARLLLSHSFAGDISVTVFTTPLNRPFIVDSLSGTKATIVDVPFPDNVPEIPPGVECTDKLPALSSSLFVPFTRATKSMQADFERELMSLPRVSFMVSDGFLWWTQESARKLGFPRLVFFGMNCASTVICDSVFQNQLLSNVKSETEPVSVPEFPWIKVRKCDFVKDMFDPKTTTDPGFKLILDQVTSMNQSQGIIFNTFDDLEPVFIDFYKRKRKLKLWAVGPLCYVNNFLDDEVEEKVKPSWMKWLDEKRDKGCNVLYVAFGSQAEISREQLEEIALGLEESKVNFLWVVKGNEIGKGFEERVGERGMMVRDEWVDQRKILEHESVRGFLSHCGWNSLTESICSEVPILAFPLAAEQPLNAILVVEELRVAERVVAASEGVVRREEIAEKVKELMEGEKGKELRRNVEAYGKMAKKALEEGIGSSRKNLDNLINEFCNNGT

SEQ ID NO: 100636 - protein, 446 aa, Arabidopsis thaliana
  peptide (1)..(446): Ceres Seq. ID no. 13605687
  misc_feature (1)..(446): Homolog of NCBI NO: 4914344 NR Description: F14N23.30 [Arabidopsis thaliana]
  misc_feature (82)..(446): Homolog of NCBI NO: 30681693 NR Description: glycosyltransferase family [Arabidopsis thaliana]
  misc_feature (82)..(446): Homolog of NCBI NO: 26449653 NR Description: putative glucosyl transferase [Arabidopsis
  misc_feature (1)..(444): Homolog of NCBI NO: 30679796 NR Description: glycosyltransferase family [Arabidopsis thaliana]
  misc_feature (1)..(444): Homolog of NCBI NO: 21553613 NR Description: putative glucosyltransferase [Arabidopsis
  misc_feature (1)..(444): Homolog of NCBI NO: 15241515 NR Description: glycosyltransferase family [Arabidopsis thaliana]
  misc_feature (1)..(289): Homolog of NCBI NO: 30679790 NR Description: glycosyltransferase family [Arabidopsis thaliana] putative glucosyltransferase [Arabidopsis thaliana]
  misc_feature (1)..(442): Homolog of NCBI NO: 21742764 NR Description: OSJNBa0023J03.6 [Oryza sativa (japonica
  misc_feature (1)..(440): Homolog of NCBI NO: 15228034 NR Description: UDP-glycosyltransferase family [Arabidopsis
  misc_feature (1)..(440): Homolog of NCBI NO: 7433911 NR Description: probable glucosyltransferase twi1 (EC 2.4.1.-) - (fragment) >gi|1359905|emb|CAA59450.1| homologous to
MLQLARLLLSHSFAGDISVTVFTTPLNRPFIVDSLSGTKATIVDVPFPDNVPEIPPGVECTDKLPALSSSLFVPFTRATKSMQADFERELMSLPRVSFMVSDGFLWWTQESARKLGFPRLVFFGMNCASTVICDSVFQNQLLSNVKSETEPVSVPEFPWIKVRKCDFVKDMFDPKTTTDPGFKLILDQVTSMNQSQGIIFNTFDDLEPVFIDFYKRKRKLKLWAVGPLCYVNNFLDDEVEEKVKPSWMKWLDEKRDKGCNVLYVAFGSQAEISREQLEEIALGLEESKVNFLWVVKGNEIGKGFEERVGERGMMVRDEWVDQRKILEHESVRGFLSHCGWNSLTESICSEVPILAFPLAAEQPLNAILVVEELRVAERVVAASEGVVRREEIAEKVKELMEGEKGKELRRNVEAYGKMAKKALEEGIGSSRKNLDNLINEFCNNGT

SEQ ID NO: 100637 - DNA, 596 bp, Arabidopsis thaliana
  misc_feature (1)..(596): Ceres Seq. ID no. 13605691
  misc_feature: MA Experiment ID: 108434 Result: Up-regulated in Transcription
  misc_feature: MA Experiment 108434 PARAMETER Experiment Name: At_Root_Tips_cDNA_P Parameter: Tissue Value: Root Tips
  misc_feature: MA Experiment ID: 108462 Result: Down-regulated in Transcription
  misc_feature: MA Experiment 108462 PARAMETER Experiment Name: At_Germinating_Seeds_cDNA_P Parameter: Age (day) Value: 2 vs. 0
  misc_feature: MA Experiment 108462 PARAMETER Experiment Name: At_Germinating_Seeds_cDNA_P Parameter: Tissue Value: Germinating Seeds
  misc_feature: MA Experiment ID: 108463 Result: Down-regulated in Transcription
  misc_feature: MA Experiment 108463 PARAMETER Experiment Name: At_Germinating_Seeds_cDNA_P Parameter: Age (day) Value: 3 vs. 0
  misc_feature: MA Experiment 108463 PARAMETER Experiment Name: At_Germinating_Seeds_cDNA_P Parameter: Tissue Value: Germinating Seeds
  misc_feature: MA Experiment ID: 108464 Result: Down-regulated in Transcription
  misc_feature: MA Experiment 108464 PARAMETER Experiment Name: At_Germinating_Seeds_cDNA_P Parameter: Age (day) Value: 4 vs. 0
  misc_feature: MA Experiment 108464 PARAMETER Experiment Name: At_Germinating_Seeds_cDNA_P Parameter: Tissue Value: Germinating Seeds
  misc_feature: MA Experiment ID: 108573 Result: Down-regulated in Transcription
  misc_feature: MA Experiment 108573 PARAMETER Experiment Name: At_Drought_cDNA_P Parameter: Timepoint (hr) Value: 6
  misc_feature: MA Experiment 108573 PARAMETER Experiment Name: At_Drought_cDNA_P Parameter: Tissue Value: Aerial
  misc_feature: MA Experiment 108573 PARAMETER Experiment Name: At_Drought_cDNA_P Parameter: Treatment Value: Drought vs. No Drought
  misc_feature: MA Experiment ID: 108576 Result: Up-regulated in Transcription
  misc_feature: MA Experiment 108576 PARAMETER Experiment Name: At_42deg_Heat_cDNA_P Parameter: Temperature (deg C) Value: 42 vs. 22
  misc_feature: MA Experiment 108576 PARAMETER Experiment Name: At_42deg_Heat_cDNA_P Parameter: Timepoint (hr) Value: 1
  misc_feature: MA Experiment 108576 PARAMETER Experiment Name: At_42deg_Heat_cDNA_P Parameter: Tissue Value: Aerial
  misc_feature: MA Experiment ID: 108585 Result: Down-regulated in Transcription
  misc_feature: MA Experiment 108585 PARAMETER Experiment Name: At_5mM_NaNP_cDNA_P Parameter: Timepoint (hr) Value: 6
  misc_feature: MA Experiment 108585 PARAMETER Experiment Name: At_5mM_NaNP_cDNA_P Parameter: Tissue Value: Aerial
  misc_feature: MA Experiment 108585 PARAMETER Experiment Name: At_5mM_NaNP_cDNA_P Parameter: Treatment Value: null
  misc_feature: MA Experiment ID: 108595 Result: Up-regulated in Transcription
  misc_feature: MA Experiment 108595 PARAMETER Experiment Name: At_Ler-pi_Ovule_cDNA_P Parameter: Plant Line Value: null
  misc_feature: MA Experiment ID: 20000070 Result: Up-regulated in Transcription
  misc_feature: MA Experiment 20000070 PARAMETER Experiment Name: At_100uM_ABA_Mutants_cDNA_P Parameter: Plant Line Value: CS24
  misc_feature: MA Experiment 20000070 PARAMETER Experiment Name: At_100uM_ABA_Mutants_cDNA_P Parameter: Timepoint (hr) Value: 6
  misc_feature: MA Experiment 20000070 PARAMETER Experiment Name: At_100uM_ABA_Mutants_cDNA_P Parameter: Tissue Value: Aerial
  misc_feature: MA Experiment 20000070 PARAMETER Experiment Name: At_100uM_ABA_Mutants_cDNA_P Parameter: Treatment Value: 100uM ABA vs. No Treatment
  misc_feature: MA Experiment ID: 20000093 Result: Up-regulated in Transcription
  misc_feature: MA Experiment 20000093 PARAMETER Experiment Name: At_42deg_Heat_cDNA_P Parameter: Temperature (deg C) Value: 42 vs. 22
  misc_feature: MA Experiment 20000093 PARAMETER Experiment Name: At_42deg_Heat_cDNA_P Parameter: Timepoint (hr) Value: 0.5
  misc_feature: MA Experiment 20000093 PARAMETER Experiment Name: At_42deg_Heat_cDNA_P Parameter: Tissue Value: Aerial
  misc_feature: MA Experiment ID: 20000111 Result: Up-regulated in Transcription
  misc_feature: MA Experiment 20000111 PARAMETER Experiment Name: At_42deg_Heat_cDNA_P Parameter: Temperature (deg C) Value: 42 vs. 22
  misc_feature: MA Experiment 20000111 PARAMETER Experiment Name: At_42deg_Heat_cDNA_P Parameter: Timepoint (hr) Value: 6
  misc_feature: MA Experiment 20000111 PARAMETER Experiment Name: At_42deg_Heat_cDNA_P Parameter: Tissue Value: Aerial
  misc_feature: MA Experiment ID: 20000112 Result: Up-regulated in Transcription
  misc_feature: MA Experiment 20000112 PARAMETER Experiment Name: At_42deg_Heat_cDNA_P Parameter: Temperature (deg C) Value: 42 vs. 22
  misc_feature: MA Experiment 20000112 PARAMETER Experiment Name: At_42deg_Heat_cDNA_P Parameter: Timepoint (hr) Value: 2
  misc_feature: MA Experiment 20000112 PARAMETER Experiment Name: At_42deg_Heat_cDNA_P Parameter: Tissue Value: Aerial
  misc_feature: MA Experiment ID: 20000113 Result: Up-regulated in Transcription
  misc_feature: MA Experiment 20000113 PARAMETER Experiment Name: At_42deg_Heat_cDNA_P Parameter: Temperature (deg C) Value: 42 vs. 22
  misc_feature: MA Experiment 20000113 PARAMETER Experiment Name: At_42deg_Heat_cDNA_P Parameter: Timepoint (hr) Value: 8
  misc_feature: MA Experiment 20000113 PARAMETER Experiment Name: At_42deg_Heat_cDNA_P Parameter: Tissue Value: Aerial
  misc_feature: MA Experiment ID: 20000144 Result: Up-regulated in Transcription
  misc_feature: MA Experiment 20000144 PARAMETER Experiment Name: At_42deg_Heat_cDNA_P Parameter: Temperature (deg C) Value: 42 vs. 22
  misc_feature: MA Experiment 20000144 PARAMETER Experiment Name: At_42deg_Heat_cDNA_P Parameter: Timepoint (hr) Value: 1
  misc_feature: MA Experiment 20000144 PARAMETER Experiment Name: At_42deg_Heat_cDNA_P Parameter: Tissue Value: Aerial
tgaagagagcgagatggcaacggcgtcgtttaggtggatcttgcagctccacagagacgtaccaaaagcggctcgattctatgagaaaggtctcgatttctccgtcaatgtcgttaccttacgttgggctgaacttcagtcaggtcccctcaagctagctcttatgcaagctcccagcgagcatgtgatgagtgagaaaggatactcttcgttactatcgttcactgtagcagacattaatacaacaatctctaaacttatggaattaggagctgaactcgatggctctatcaaatatgaagtccatggcaaggttgcttctgtgagatgtcttgatggtcatgtgctcggactctatgaaccttcatgagttttctattcagttcggattatgtggatttgattttgtttttttcgatccgattttggttgaataatgtttcaaaattttgctaatcggatgtttggtaaggacttagctctaagacaaatgtaaatctaatatatccggcgcagaaaagtcgttaattgattgttcaactaatcgtctagacattcgatctattaaagacaggggagatatgttttacaaattt

SEQ ID NO: 100638 - protein, 122 aa, Arabidopsis thaliana
  peptide (1)..(122): Ceres Seq. ID no. 13605692
  misc_feature (9)..(118): Pfam Name: Glyoxalase/Bleomycin resistance Pfam Description: Glyoxalase/Bleomycin resistance
  misc_feature (5)..(122): Homolog of NCBI NO: 18407989 NR Description: expressed protein [Arabidopsis thaliana]
  misc_feature (3)..(105): Homolog of NCBI NO: 25404929 NR Description: protein F22C12.6 [imported] - Arabidopsis >gi|6692116|gb|AAF24581.1|AC007764_23 F22C12.6 [Arabidopsis
  misc_feature (5)..(120): Homolog of NCBI NO: 15238137 NR Description: expressed protein [Arabidopsis thaliana] gb|AAF24581.1~gene_id:MBK23.15~similar to unknown protein thaliana] >gi|26452670|dbj|BAC43418.1| unknown protein
  misc_feature (6)..(55): Homolog of NCBI NO: 34898280 NR Description: hypothetical protein~predicted by GENSCAN etc.
  misc_feature (7)..(122): Homolog of NCBI NO: 37523202 NR Description: hypothetical protein glr3633 [Gloeobacter
  misc_feature (7)..(122): Homolog of NCBI NO: 23039663 NR Description: hypothetical protein [Trichodesmium erythraeum
EESEMATASFRWILQLHRDVPKAARFYEKGLDFSVNVVTLRWAELQSGPLKLALMQAPSEHVMSEKGYSSLLSFTVADINTTISKLMELGAELDGSIKYEVHGKVASVRCLDGHVLGLYEPS

SEQ ID NO: 100639 - protein, 118 aa, Arabidopsis thaliana; identical to SEQ ID NO: 28436
  peptide (1)..(118): Ceres Seq. ID no. 13605693
  misc_feature (5)..(114): Pfam Name: Glyoxalase/Bleomycin resistance Pfam Description: Glyoxalase/Bleomycin resistance
  misc_feature (1)..(118): Homolog of NCBI NO: 18407989 NR Description: expressed protein [Arabidopsis thaliana]
  misc_feature (1)..(101): Homolog of NCBI NO: 25404929 NR Description: protein F22C12.6 [imported] - Arabidopsis >gi|6692116|gb|AAF24581.1|AC007764_23 F22C12.6 [Arabidopsis
  misc_feature (1)..(116): Homolog of NCBI NO: 15238137 NR Description: expressed protein [Arabidopsis thaliana] gb|AAF24581.1~gene_id:MBK23.15~similar to unknown protein thaliana] >gi|26452670|dbj|BAC43418.1| unknown protein
  misc_feature (2)..(51): Homolog of NCBI NO: 34898280 NR Description: hypothetical protein~predicted by GENSCAN etc.
  misc_feature (3)..(118): Homolog of NCBI NO: 37523202 NR Description: hypothetical protein glr3633 [Gloeobacter
  misc_feature (3)..(118): Homolog of NCBI NO: 23039663 NR Description: hypothetical protein [Trichodesmium erythraeum

SEQ ID NO: 100640 - protein, 68 aa, Arabidopsis thaliana; identical to SEQ ID NO: 28437
  peptide (1)..(68): Ceres Seq. ID no. 13605694
  misc_feature (1)..(64): Pfam Name: Glyoxalase/Bleomycin resistance Pfam Description: Glyoxalase/Bleomycin resistance
  misc_feature (1)..(68): Homolog of NCBI NO: 18407989 NR Description: expressed protein [Arabidopsis thaliana]
  misc_feature (1)..(51): Homolog of NCBI NO: 25404929 NR Description: protein F22C12.6 [imported] - Arabidopsis >gi|6692116|gb|AAF24581.1|AC007764_23 F22C12.6 [Arabidopsis
  misc_feature (1)..(66): Homolog of NCBI NO: 15238137 NR Description: expressed protein [Arabidopsis thaliana] gb|AAF24581.1~gene_id:MBK23.15~similar to unknown protein thaliana] >gi|26452670|dbj|BAC43418.1| unknown protein
  misc_feature (1)..(68): Homolog of NCBI NO: 37523202 NR Description: hypothetical protein glr3633 [Gloeobacter
  misc_feature (1)..(68): Homolog of NCBI NO: 23039663 NR Description: hypothetical protein [Trichodesmium erythraeum

SEQ ID NO: 100641 - DNA, 1146 bp, Arabidopsis thaliana
  misc_feature (1)..(1146): Ceres Seq. ID no. 13605703
  misc_feature: MA Experiment ID: 108461 Result: Down-regulated in Transcription
  misc_feature: MA Experiment 108461 PARAMETER Experiment Name: At_Germinating_Seeds_cDNA_P Parameter: Age (day) Value: 1 vs. 0
  misc_feature: MA Experiment 108461 PARAMETER Experiment Name: At_Germinating_Seeds_cDNA_P Parameter: Tissue Value: Germinating Seeds
  misc_feature: MA Experiment ID: 108462 Result: Down-regulated in Transcription
  misc_feature: MA Experiment 108462 PARAMETER Experiment Name: At_Germinating_Seeds_cDNA_P Parameter: Age (day) Value: 2 vs. 0
  misc_feature: MA Experiment 108462 PARAMETER Experiment Name: At_Germinating_Seeds_cDNA_P Parameter: Tissue Value: Germinating Seeds
  misc_feature: MA Experiment ID: 108464 Result: Down-regulated in Transcription
  misc_feature: MA Experiment 108464 PARAMETER Experiment Name: At_Germinating_Seeds_cDNA_P Parameter: Age (day) Value: 4 vs. 0
  misc_feature: MA Experiment 108464 PARAMETER Experiment Name: At_Germinating_Seeds_cDNA_P Parameter: Tissue Value: Germinating Seeds
  misc_feature: MA Experiment ID: 20000180 Result: Down-regulated in Transcription
  misc_feature: MA Experiment 20000180 PARAMETER Experiment Name: At_Germinating_Seeds_P Parameter: Age (hr) Value: 24 vs. 0
  misc_feature: MA Experiment 20000180 PARAMETER Experiment Name: At_Germinating_Seeds_P Parameter: Tissue Value: Germinating Seeds
ttttctctcaatcctccaattcccaaatttcaacaacaagacgaagcaaacgatgtggattgaaatcatctgcggtctcgtcatctacaaactcgtccgccgtttcttctacgacgacgaattctccgacgtcgaaacttccgattccactgctctcttctccgttgctcacagacttgagaaactttatggtggaaaagcttatgtaggacttcgaattccagatgccgacactgcttctagacaagacattgatgttgttcttgttactaaaggagatgttgtagtgatttctgtgaagaatctatcggggattgttacggtaactagtgatggtagctgggtttgtgaaggtggcaagcatcatactactgagactttccctgatcctctggcggaggtcaagaaacaagcttcagttcttgaatcatatcttgaacagaggggagttactttactagaaggaaatgtgtcttgcaaagttgtcattcccaatccaagttttcgtacaattcatgcattcccgagtgaggtaattacctatgaagattggcaacagctaaaaccagtatcaaaaagtaaaatttctggttgggttaaaggcgcattcagcaccggaaaagagatgcaggaatcttcgcatcaaaaacttaatttcatccttggcacagcaccaacgtgggatagagtggagcttaaaagtagcaaaattgtgttaggggaattcctcgagtttaaaggaaagcaggaagataccctggctttaagaaatatcaaaaggtcaaaagtcgaccgtgtctctattcagaaaacaagcatgtttggattagctccttcgaggttgcaggttctgtattcgtatagggactacagaagtgaaggcagttcaggggcagagtcgaaagaagtgactgtcaggtcgagcactgaggttctgtttcagccacgagactccacaaagatgaagaaattcaagctatcgtcgcttgtctccatttcactaagtgcctaactatgaagtgagcttattagcatgcagcagaggaagttgtcaatgtttattgtaacaattacattgtccatgactgaagtaagcttatgttattctcaagagtattgacctctttatggaaatgttttcttcgt

SEQ ID NO: 100642 - protein, 336 aa, Arabidopsis thaliana
  peptide (1)..(336): Ceres Seq. ID no. 13605704
  misc_feature (18)..(336): Homolog of NCBI NO: 15220924 NR Description: hypothetical protein [Arabidopsis thaliana]
  misc_feature (18)..(276): Homolog of NCBI NO: 25373168 NR Description: hypothetical protein F16G16.1 [imported] - thaliana >gi|6227000|gb|AAF06036.1|AC009360_1 EST gb|AI998705
  misc_feature (18)..(336): Homolog of NCBI NO: 37537134 NR Description: unknown protein [Oryza sativa (japonica
FLSILQFPNFNNKTKQTMWIEIICGLVIYKLVRRFFYDDEFSDVETSDSTALFSVAHRLEKLYGGKAYVGLRIPDADTASRQDIDVVLVTKGDVVVISVKNLSGIVTVTSDGSWVCEGGKHHTTETFPDPLAEVKKQASVLESYLEQRGVTLLEGNVSCKVVIPNPSFRTIHAFPSEVITYEDWQQLKPVSKSKISGWVKGAFSTGKEMQESSHQKLNFILGTAPTWDRVELKSSKIVLGEFLEFKGKQEDTLALRNIKRSKVDRVSIQKTSMFGLAPSRLQVLYSYRDYRSEGSSGAESKEVTVRSSTEVLFQPRDSTKMKKFKLSSLVSISLSA

SEQ ID NO: 100643 - protein, 319 aa, Arabidopsis thaliana
  peptide (1)..(319): Ceres Seq. ID no. 13605705
  misc_feature (1)..(319): Homolog of NCBI NO: 15220924 NR Description: hypothetical protein [Arabidopsis thaliana]
  misc_feature (1)..(259): Homolog of NCBI NO: 25373168 NR Description: hypothetical protein F16G16.1 [imported] - thaliana >gi|6227000|gb|AAF06036.1|AC009360_1 EST gb|AI998705
  misc_feature (1)..(319): Homolog of NCBI NO: 37537134 NR Description: unknown protein [Oryza sativa (japonica
MWIEIICGLVIYKLVRRFFYDDEFSDVETSDSTALFSVAHRLEKLYGGKAYVGLRIPDADTASRQDIDVVLVTKGDVVVISVKNLSGIVTVTSDGSWVCEGGKHHTTETFPDPLAEVKKQASVLESYLEQRGVTLLEGNVSCKVVIPNPSFRTIHAFPSEVITYEDWQQLKPVSKSKISGWVKGAFSTGKEMQESSHQKLNFILGTAPTWDRVELKSSKIVLGEFLEFKGKQEDTLALRNIKRSKVDRVSIQKTSMFGLAPSRLQVLYSYRDYRSEGSSGAESKEVTVRSSTEVLFQPRDSTKMKKFKLSSLVSISLSA

SEQ ID NO: 100644 - DNA, 1212 bp, Arabidopsis thaliana
  misc_feature (1)..(1212): Ceres Seq. ID no. 13605706
  misc_feature: MA Experiment ID: 20000173 Result: Down-regulated in Transcription
  misc_feature: MA Experiment 20000173 PARAMETER Experiment Name: At_42deg_Heat_P Parameter: Age (day) Value: 14
  misc_feature: MA Experiment 20000173 PARAMETER Experiment Name: At_42deg_Heat_P Parameter: Organism Value: A. thaliana
  misc_feature: MA Experiment 20000173 PARAMETER Experiment Name: At_42deg_Heat_P Parameter: Plant Line Value: WS
  misc_feature: MA Experiment 20000173 PARAMETER Experiment Name: At_42deg_Heat_P Parameter: Temperature (deg C) Value: 42 vs. 22
  misc_feature: MA Experiment 20000173 PARAMETER Experiment Name: At_42deg_Heat_P Parameter: Timepoint (hr) Value: 6
  misc_feature: MA Experiment 20000173 PARAMETER Experiment Name: At_42deg_Heat_P Parameter: Tissue Value: Aerial
  misc_feature: MA Experiment ID: 20000179 Result: Down-regulated in Transcription
  misc_feature: MA Experiment 20000179 PARAMETER Experiment Name: At_Germinating_Seeds_P Parameter: Age (hr) Value: 6 vs. 0
  misc_feature: MA Experiment 20000179 PARAMETER Experiment Name: At_Germinating_Seeds_P Parameter: Tissue Value: Germinating Seeds
  misc_feature: MA Experiment ID: 20000185 Result: Up-regulated in Transcription
  misc_feature: MA Experiment 20000185 PARAMETER Experiment Name: At_Roots__P Parameter: Age (day) Value: 7 vs. 21
  misc_feature: MA Experiment 20000185 PARAMETER Experiment Name: At_Roots__P Parameter: Organism Value: A. thaliana
  misc_feature: MA Experiment 20000185 PARAMETER Experiment Name: At_Roots__P Parameter: Tissue Value: Roots vs. Whole Plant
  misc_feature: MA Experiment ID: 20000234 Result: Up-regulated in Transcription
  misc_feature: MA Experiment 20000234 PARAMETER Experiment Name: At_Siliques_P Parameter: Age (day) Value: 21
  misc_feature: MA Experiment 20000234 PARAMETER Experiment Name: At_Siliques_P Parameter: Organism Value: A. thaliana
  misc_feature: MA Experiment 20000234 PARAMETER Experiment Name: At_Siliques_P Parameter: Plant Line Value: WS
  misc_feature: MA Experiment 20000234 PARAMETER Experiment Name: At_Siliques_P Parameter: Tissue Value: Less Than 5mm Siliques vs. Whole Plant
  misc_feature: MA Experiment ID: 20000235 Result: Up-regulated in Transcription
  misc_feature: MA Experiment 20000235 PARAMETER Experiment Name: At_Siliques_P Parameter: Age (day) Value: 21
  misc_feature: MA Experiment 20000235 PARAMETER Experiment Name: At_Siliques_P Parameter: Organism Value: A. thaliana
  misc_feature: MA Experiment 20000235 PARAMETER Experiment Name: At_Siliques_P Parameter: Plant Line Value: WS
  misc_feature: MA Experiment 20000235 PARAMETER Experiment Name: At_Siliques_P Parameter: Tissue Value: 5-10mm Siliques vs. Whole Plant
  misc_feature: MA Experiment ID: 20000264 Result: Up-regulated in Transcription
  misc_feature: MA Experiment 20000264 PARAMETER Experiment Name: At_Open_Flower_P Parameter: Age (day) Value: 21
  misc_feature: MA Experiment 20000264 PARAMETER Experiment Name: At_Open_Flower_P Parameter: Plant Line Value: WS
  misc_feature: MA Experiment 20000264 PARAMETER Experiment Name: At_Open_Flower_P Parameter: Tissue Value: Open Flower vs. Whole Plant
  misc_feature: MA Experiment ID: 20000794 Result: Up-regulated in Transcription
  misc_feature: MA Experiment 20000794 PARAMETER Experiment Name: At_Petals_P Parameter: Age (day) Value: 23-25 days
  misc_feature: MA Experiment 20000794 PARAMETER Experiment Name: At_Petals_P Parameter: Plant Line Value: WS
  misc_feature: MA Experiment 20000794 PARAMETER Experiment Name: At_Petals_P Parameter: Tissue Value: Petals vs. Whole plant
aaaaacttgcaaaactctcgtccgagatatatcgactccgcgaccctccactactctgctgatctacacacacacacaaaaaaaaaaaaactcaatcgccagcaacaatggcgaagctcacacttctcttcttcctttcctttctcatcttctcctcatccatcgctttccaatcagacgagctcctcgttgacgacgacgaatttggtctagaaggagcaaagccccgctccaccgatctttacacatcttcttcttcttcgccacagcagcagcaacagactccaactatccggagaagatactcagatcctaccgatttggattcaaaagtccaatttactctcgaacatgccttcggtgactctgatttctcccccgccggtactttctccgctcgtctcaaaacctggagtcatggcggaaagacattaacgaagctgcgattctctagaaatgatttttctgctgaagagaaagatgcattcaagaatctgctgaaaggagatgacttttatcggattcggcttccatctaatgtggttagtccaccagggagagagtttgtgattgcatcagtgagagctagatgtctaccacgggatggcttggatgagcatttcattatacacatggaaggtgctaacatcttggcagttagttatggttctcctggggcgtgtcaatatcctcgccaattgaaacttccagcaaaatggtcgtttaactctcacacaattctgaaaagcagtgagcaggcgccaagaactccaatattcactgaggagattctaggcagtgagaatgtagagggagaagttgaaccaccaccagagagatcattttgggcgaaatattggatgtatttgataccgctgggactcgtagtgatgaatgccgtgacacaagcatcaaacatggctgaagaacctgcgggtggacaggcaggaggtgcacaagtgcaaccagctgccaggagaagatgattccacttttacttctcccaaagcaatgaaagctgcagctggttagagatgatgattcaacagatcttcatgtaaaccatcttgccatcatttggttttatgtaacctttaattttaatcctcgatcggtgtgtttttgtactcaccaatcgggaaatcaaaaatcttgtcttcatgacatatcaagaacaaagacatttagcagcttccatatcttgttttgatc

SEQ ID NO: 100645 - protein, 292 aa, Arabidopsis thaliana
  peptide (1)..(292): Ceres Seq. ID no. 13605707
  misc_feature (1)..(292): Homolog of NCBI NO: 18408239 NR Description: expressed protein [Arabidopsis thaliana]
  misc_feature (1)..(292): Homolog of NCBI NO: 21594383 NR Description: unknown [Arabidopsis thaliana]
  misc_feature (58)..(284): Homolog of NCBI NO: 27503262 NR Description: Unknown (protein for IMAGE:5570892) [Xenopus
  misc_feature (58)..(282): Homolog of NCBI NO: 38181935 NR Description: Unknown (protein for MGC:76288) [Silurana
  misc_feature (76)..(283): Homolog of NCBI NO: 21432049 NR Description: LOC284361 protein [Homo sapiens]
  misc_feature (76)..(282): Homolog of NCBI NO: 37574074 NR Description: RIKEN cDNA 2310044H10 [Mus musculus]
  misc_feature (112)..(282): Homolog of NCBI NO: 13543832 NR Description: 2310044H10Rik protein [Mus musculus]
  misc_feature (76)..(282): Homolog of NCBI NO: 34856025 NR Description: similar to 2310044H10Rik protein [Rattus
MAKLTLLFFLSFLIFSSSIAFQSDELLVDDDEFGLEGAKPRSTDLYTSSSSSPQQQQQTPTIRRRYSDPTDLDSKVQFTLEHAFGDSDFSPAGTFSARLKTWSHGGKTLTKLRFSRNDFSAEEKDAFKNLLKGDDFYRIRLPSNVVSPPGREFVIASVRARCLPRDGLDEHFIIHMEGANILAVSYGSPGACQYPRQLKLPAKWSFNSHTILKSSEQAPRTPIFTEEILGSENVEGEVEPPPERSFWAKYWMYLIPLGLVVMNAVTQASNMAEEPAGGQAGGAQVQPAARRR

SEQ ID NO: 100646 - DNA, 1253 bp, Arabidopsis thaliana
  misc_feature (1)..(1253): Ceres Seq. ID no. 13605708
  misc_feature: MA Experiment ID: 108461 Result: Down-regulated in Transcription
  misc_feature: MA Experiment 108461 PARAMETER Experiment Name: At_Germinating_Seeds_cDNA_P Parameter: Age (day) Value: 1 vs. 0
  misc_feature: MA Experiment 108461 PARAMETER Experiment Name: At_Germinating_Seeds_cDNA_P Parameter: Tissue Value: Germinating Seeds
  misc_feature: MA Experiment ID: 108462 Result: Down-regulated in Transcription
  misc_feature: MA Experiment 108462 PARAMETER Experiment Name: At_Germinating_Seeds_cDNA_P Parameter: Age (day) Value: 2 vs. 0
  misc_feature: MA Experiment 108462 PARAMETER Experiment Name: At_Germinating_Seeds_cDNA_P Parameter: Tissue Value: Germinating Seeds
  misc_feature: MA Experiment ID: 108463 Result: Down-regulated in Transcription
  misc_feature: MA Experiment 108463 PARAMETER Experiment Name: At_Germinating_Seeds_cDNA_P Parameter: Age (day) Value: 3 vs. 0
  misc_feature: MA Experiment 108463 PARAMETER Experiment Name: At_Germinating_Seeds_cDNA_P Parameter: Tissue Value: Germinating Seeds
  misc_feature: MA Experiment ID: 108464 Result: Down-regulated in Transcription
  misc_feature: MA Experiment 108464 PARAMETER Experiment Name: At_Germinating_Seeds_cDNA_P Parameter: Age (day) Value: 4 vs. 0
  misc_feature: MA Experiment 108464 PARAMETER Experiment Name: At_Germinating_Seeds_cDNA_P Parameter: Tissue Value: Germinating Seeds
  misc_feature: MA Experiment ID: 108576 Result: Up-regulated in Transcription
  misc_feature: MA Experiment 108576 PARAMETER Experiment Name: At_42deg_Heat_cDNA_P Parameter: Temperature (deg C) Value: 42 vs. 22
  misc_feature: MA Experiment 108576 PARAMETER Experiment Name: At_42deg_Heat_cDNA_P Parameter: Timepoint (hr) Value: 1
  misc_feature: MA Experiment 108576 PARAMETER Experiment Name: At_42deg_Heat_cDNA_P Parameter: Tissue Value: Aerial
  misc_feature: MA Experiment ID: 108577 Result: Up-regulated in Transcription
  misc_feature: MA Experiment 108577 PARAMETER Experiment Name: At_42deg_Heat_cDNA_P Parameter: Temperature (deg C) Value: 42 vs. 22
  misc_feature: MA Experiment 108577 PARAMETER Experiment Name: At_42deg_Heat_cDNA_P Parameter: Timepoint (hr) Value: 6
  misc_feature: MA Experiment 108577 PARAMETER Experiment Name: At_42deg_Heat_cDNA_P Parameter: Tissue Value: Aerial
  misc_feature: MA Experiment ID: 20000112 Result: Up-regulated in Transcription
  misc_feature: MA Experiment 20000112 PARAMETER Experiment Name: At_42deg_Heat_cDNA_P Parameter: Temperature (deg C) Value: 42 vs. 22
  misc_feature: MA Experiment 20000112 PARAMETER Experiment Name: At_42deg_Heat_cDNA_P Parameter: Timepoint (hr) Value: 2
  misc_feature: MA Experiment 20000112 PARAMETER Experiment Name: At_42deg_Heat_cDNA_P Parameter: Tissue Value: Aerial
acactcgtcttaccaaactctctcctacacaaccaaaaccatctctttgcaacaaaacttgttgtaactcatcttcttcttcttcttctccatcacagactcataacaaatgggagaagtttcagtggtggagaacaagaaagtgatactaaagaattatgtagatggtattcctacagaaacagacatggaagtgaaactcggagaaacaattgagctaaaagcaccaaaaggatcttcttgtttcctcgtcaaaaatctatacttgtcttgtgatccttacatgagaggtcgtatgcgtgattttcacggttcctatctcccgccttttgttcctggccaacgtatcgaagggtttggtttagcaagagtgatagattctgatgatactaattataagcccggcgatatagtctctggtatcattggttgggaagaatacagtttgctacgtagttcagataacctacagttgagaaatattcagttagacgacgacattccgctttcttatcatctcggacttctcgggatggctggatttacagcatatgcagggtttaatgagatatgttgtcctaagaaaggggacagtgtttttgtctctgcagcatgtggagcagttggacaacttgttggtcagctagctaagttgcacggctgctatgttgttggtagcgccggtagtaagcaaaaggttgagatccttaaaaacgagcttggatatgatgaagcctttaactacaaggaagaggctgatcttgatactgctttgaagaggtacttcccggaggggatagatatctacttcgataacgtgggtggatccatgcttgatgcagcgctcctcaacatgaaggtacgtggaagaatcgcgctctgtggaatggtgtctttgcaaagcctctcaacttcatcacaaggaatcaagaacctatacagcgctatctacaaacgtttaaggttagaagggttcttgcagagcgattaccttcatatcttcccacagtttcttgaaaatgtcaagagatattacaaagaaggcaagattgtctacgtcgaagatatatctgaaggcctcgacctcgctcccgctgcacttgttgggctgttttccgggaaaaatatcggtaaacaggttgttcgggttgctaaagagtgattgtttctgaaagtatattgcaagtgatttaagaacatacattggatgaaataaagccactataagtctcttatggaaaaacgttagttaa

SEQ ID NO: 100647 - protein, 350 aa, Arabidopsis thaliana; identical to SEQ ID NO: 77649
  peptide (1)..(350): Ceres Seq. ID no. 13605709
  misc_feature (81)..(347): Pfam Name: Zinc-binding dehydrogenase Pfam Description: Zinc-binding dehydrogenase
  misc_feature (1)..(350): Homolog of NCBI NO: 15218717 NR Description: allyl alcohol dehydrogenase, putative
  misc_feature (78)..(350): Homolog of NCBI NO: 25404554 NR Description: hypothetical protein F5I14.9 [imported] -
  misc_feature (1)..(79): Homolog of NCBI NO: 25404554 NR Description: hypothetical protein F5I14.9 [imported] -
  misc_feature (1)..(350): Homolog of NCBI NO: 34907532 NR Description: putative allyl alcohol dehydrogenase [Oryza
  misc_feature (7)..(350): Homolog of NCBI NO: 6692816 NR Description: allyl alcohol dehydrogenase [Nicotiana tabacum]
  misc_feature (142)..(350): Homolog of NCBI NO: 14335114 NR Description: At1g65560/F5I14_32 [Arabidopsis thaliana]
  misc_feature (9)..(350): Homolog of NCBI NO: 38345384 NR Description: OSJNBa0067K08.13 [Oryza sativa (japonica
  misc_feature (5)..(350): Homolog of NCBI NO: 15228456 NR Description: NADP-dependent oxidoreductase (P2), putative
  misc_feature (9)..(350): Homolog of NCBI NO: 15237888 NR Description: NADP-dependent oxidoreductase (P1), putative
  misc_feature (9)..(350): Homolog of NCBI NO: 15237890 NR Description: allyl alcohol dehydrogenase, putative

SEQ ID NO: 100648 - protein, 324 aa, Arabidopsis thaliana; identical to SEQ ID NO: 77650
  peptide (1)..(324): Ceres Seq. ID no. 13605710
  misc_feature (55)..(321): Pfam Name: Zinc-binding dehydrogenase Pfam Description: Zinc-binding dehydrogenase
  misc_feature (1)..(324): Homolog of NCBI NO: 15218717 NR Description: allyl alcohol dehydrogenase, putative
  misc_feature (52)..(324): Homolog of NCBI NO: 25404554 NR Description: hypothetical protein F5I14.9 [imported] -
  misc_feature (1)..(53): Homolog of NCBI NO: 25404554 NR Description: hypothetical protein F5I14.9 [imported] -
  misc_feature (1)..(324): Homolog of NCBI NO: 34907532 NR Description: putative allyl alcohol dehydrogenase [Oryza
  misc_feature (1)..(324): Homolog of NCBI NO: 6692816 NR Description: allyl alcohol dehydrogenase [Nicotiana tabacum]
  misc_feature (116)..(324): Homolog of NCBI NO: 14335114 NR Description: At1g65560/F5I14_32 [Arabidopsis thaliana]
  misc_feature (1)..(324): Homolog of NCBI NO: 38345384 NR Description: OSJNBa0067K08.13 [Oryza sativa (japonica
  misc_feature (1)..(324): Homolog of NCBI NO: 15228456 NR Description: NADP-dependent oxidoreductase (P2), putative
  misc_feature (1)..(324): Homolog of NCBI NO: 15237888 NR Description: NADP-dependent oxidoreductase (P1), putative
  misc_feature (1)..(324): Homolog of NCBI NO: 15237890 NR Description: allyl alcohol dehydrogenase, putative

SEQ ID NO: 100649 - protein, 292 aa, Arabidopsis thaliana; identical to SEQ ID NO: 77651
  peptide (1)..(292): Ceres Seq. ID no. 13605711
  misc_feature (23)..(289): Pfam Name: Zinc-binding dehydrogenase Pfam Description: Zinc-binding dehydrogenase
  misc_feature (1)..(292): Homolog of NCBI NO: 15218717 NR Description: allyl alcohol dehydrogenase, putative
  misc_feature (20)..(292): Homolog of NCBI NO: 25404554 NR Description: hypothetical protein F5I14.9 [imported] -
  misc_feature (1)..(21): Homolog of NCBI NO: 25404554 NR Description: hypothetical protein F5I14.9 [imported] -
  misc_feature (1)..(292): Homolog of NCBI NO: 34907532 NR Description: putative allyl alcohol dehydrogenase [Oryza
  misc_feature (1)..(292): Homolog of NCBI NO: 6692816 NR Description: allyl alcohol dehydrogenase [Nicotiana tabacum]
  misc_feature (84)..(292): Homolog of NCBI NO: 14335114 NR Description: At1g65560/F5I14_32 [Arabidopsis thaliana]
  misc_feature (1)..(292): Homolog of NCBI NO: 38345384 NR Description: OSJNBa0067K08.13 [Oryza sativa (japonica
  misc_feature (1)..(292): Homolog of NCBI NO: 15228456 NR Description: NADP-dependent oxidoreductase (P2), putative
  misc_feature (1)..(292): Homolog of NCBI NO: 15237888 NR Description: NADP-dependent oxidoreductase (P1), putative
  misc_feature (1)..(292): Homolog of NCBI NO: 15237890 NR Description: allyl alcohol dehydrogenase, putative

SEQ ID NO: 100650 - DNA, 650 bp, Arabidopsis thaliana
  misc_feature (1)..(650): Ceres Seq. ID no. 13605712
  misc_feature: MA Experiment ID: 108461 Result: Down-regulated in Transcription
  misc_feature: MA Experiment 108461 PARAMETER Experiment Name: At_Germinating_Seeds_cDNA_P Parameter: Age (day) Value: 1 vs. 0
  misc_feature: MA Experiment 108461 PARAMETER Experiment Name: At_Germinating_Seeds_cDNA_P Parameter: Tissue Value: Germinating Seeds
  misc_feature: MA Experiment ID: 108462 Result: Down-regulated in Transcription
  misc_feature: MA Experiment 108462 PARAMETER Experiment Name: At_Germinating_Seeds_cDNA_P Parameter: Age (day) Value: 2 vs. 0
  misc_feature: MA Experiment 108462 PARAMETER Experiment Name: At_Germinating_Seeds_cDNA_P Parameter: Tissue Value: Germinating Seeds
  misc_feature: MA Experiment ID: 108463 Result: Down-regulated in Transcription
  misc_feature: MA Experiment 108463 PARAMETER Experiment Name: At_Germinating_Seeds_cDNA_P Parameter: Age (day) Value: 3 vs. 0
  misc_feature: MA Experiment 108463 PARAMETER Experiment Name: At_Germinating_Seeds_cDNA_P Parameter: Tissue Value: Germinating Seeds
  misc_feature: MA Experiment ID: 108464 Result: Down-regulated in Transcription
  misc_feature: MA Experiment 108464 PARAMETER Experiment Name: At_Germinating_Seeds_cDNA_P Parameter: Age (day) Value: 4 vs. 0
  misc_feature: MA Experiment 108464 PARAMETER Experiment Name: At_Germinating_Seeds_cDNA_P Parameter: Tissue Value: Germinating Seeds
  misc_feature: MA Experiment ID: 20000180 Result: Down-regulated in Transcription
  misc_feature: MA Experiment 20000180 PARAMETER Experiment Name: At_Germinating_Seeds_P Parameter: Age (hr) Value: 24 vs. 0
  misc_feature: MA Experiment 20000180 PARAMETER Experiment Name: At_Germinating_Seeds_P Parameter: Tissue Value: Germinating Seeds
  misc_feature: MA Experiment ID: 20000184 Result: Down-regulated in Transcription
  misc_feature: MA Experiment 20000184 PARAMETER Experiment Name: At_Shoots__P Parameter: Age (day) Value: 7
  misc_feature: MA Experiment 20000184 PARAMETER Experiment Name: At_Shoots__P Parameter: Tissue Value: Shoots vs. Whole Plant
  misc_feature: MA Experiment ID: 20000308 Result: Up-regulated in Transcription
  misc_feature: MA Experiment 20000308 PARAMETER Experiment Name: At_100mM_NaCl__P Parameter: Age (day) Value: 17
  misc_feature: MA Experiment 20000308 PARAMETER Experiment Name: At_100mM_NaCl__P Parameter: Organism Value: A. thaliana
  misc_feature: MA Experiment 20000308 PARAMETER Experiment Name: At_100mM_NaCl__P Parameter: Plant Line Value: WS
  misc_feature: MA Experiment 20000308 PARAMETER Experiment Name: At_100mM_NaCl__P Parameter: Timepoint (hr) Value: 72
  misc_feature: MA Experiment 20000308 PARAMETER Experiment Name: At_100mM_NaCl__P Parameter: Tissue Value: Whole Plant
  misc_feature: MA Experiment 20000308 PARAMETER Experiment Name: At_100mM_NaCl__P Parameter: Treatment Value: 100mM NaCl vs. No Treatment
  misc_feature: MA Experiment ID: 20001247 Result: Down-regulated in Transcription
  misc_feature: MA Experiment 20001247 PARAMETER Experiment Name: At_Far-red-induction_P Parameter: Age (day) Value: 7
  misc_feature: MA Experiment 20001247 PARAMETER Experiment Name: At_Far-red-induction_P Parameter: Light Value: Far-red vs. White
  misc_feature: MA Experiment 20001247 PARAMETER Experiment Name: At_Far-red-induction_P Parameter: Organism Value: A. thaliana
  misc_feature: MA Experiment 20001247 PARAMETER Experiment Name: At_Far-red-induction_P Parameter: Plant Line Value: Columbia
  misc_feature: MA Experiment 20001247 PARAMETER Experiment Name: At_Far-red-induction_P Parameter: Timepoint (hr) Value: 1
  misc_feature: MA Experiment 20001247 PARAMETER Experiment Name: At_Far-red-induction_P Parameter: Tissue Value: Whole Plant
  misc_feature: MA Experiment ID: 20001558 Result: Up-regulated in Transcription
  misc_feature: MA Experiment 20001558 PARAMETER Experiment Name: At_Drought_Soil_Dry_P Parameter: Age (day) Value: 27
  misc_feature: MA Experiment 20001558 PARAMETER Experiment Name: At_Drought_Soil_Dry_P Parameter: Organism Value: A. thaliana
  misc_feature: MA Experiment 20001558 PARAMETER Experiment Name: At_Drought_Soil_Dry_P Parameter: Plant Line Value: WS
  misc_feature: MA Experiment 20001558 PARAMETER Experiment Name: At_Drought_Soil_Dry_P Parameter: Post Timepoint (hr) Value: 6
  misc_feature: MA Experiment 20001558 PARAMETER Experiment Name: At_Drought_Soil_Dry_P Parameter: Post-Treatment Value: Re-Water vs. No Drought
  misc_feature: MA Experiment 20001558 PARAMETER Experiment Name: At_Drought_Soil_Dry_P Parameter: Timepoint (day) Value: 13
  misc_feature: MA Experiment 20001558 PARAMETER Experiment Name: At_Drought_Soil_Dry_P Parameter: Treatment Value: Drought vs. No Drought
  misc_feature: MA Experiment ID: 20001560 Result: Up-regulated in Transcription
  misc_feature: MA Experiment 20001560 PARAMETER Experiment Name: At_Drought_Soil_Dry_P Parameter: Age (day) Value: 28
  misc_feature: MA Experiment 20001560 PARAMETER Experiment Name: At_Drought_Soil_Dry_P Parameter: Organism Value: A. thaliana
  misc_feature: MA Experiment 20001560 PARAMETER Experiment Name: At_Drought_Soil_Dry_P Parameter: Plant Line Value: WS
  misc_feature: MA Experiment 20001560 PARAMETER Experiment Name: At_Drought_Soil_Dry_P Parameter: Post Timepoint (hr) Value: None
  misc_feature: MA Experiment 20001560 PARAMETER Experiment Name: At_Drought_Soil_Dry_P Parameter: Post-Treatment Value: None
  misc_feature: MA Experiment 20001560 PARAMETER Experiment Name: At_Drought_Soil_Dry_P Parameter: Timepoint (day) Value: 14
  misc_feature: MA Experiment 20001560 PARAMETER Experiment Name: At_Drought_Soil_Dry_P Parameter: Treatment Value: Drought vs. No Drought
aaaaacacacgccggagagttttctaagaacaacagtgacgaaaaggtttttagggtttctttaccaatcagaatctccgccaagtaacgattttcagattccgaagcagcaaagttcaaataatttccgaactgtaacatggcggcaactactggacttgagactctcgtcgatcagattatttcggtgattacaaatgacggacgcaacattgtgggagttcttaaaggttttgaccaggctacaaatataatccttgatgaatctcatgaacgtgtgttttccacaaaggaaggagtacaacaacatgtgttgggtttgtacatcatcagaggggacaacataggtgttatcggggagctggacgaggagcttgatgctagtctggatttttcgaagctgagagcccatccgttgaaacccgtagtgcattgattgaatatagttatggtgagaaaatctaattctctcattcaaagcctaaaaacaaagagaagatttgattgtaaacaatttggatagtttgttttgatgtctggagttgtcttatttgtgtatcctaaggacaaaagctatatgatattttatgtcttaaacgttttggtcggaaacttaaatcatacaatcttttggacggacctaggtttgc

SEQ ID NO: 100651 - protein, 98 aa, Arabidopsis thaliana; identical to SEQ ID NO: 21579
  peptide (1)..(98): Ceres Seq. ID no. 13605713
  misc_feature (5)..(74): Pfam Name: LSM domain Pfam Description: LSM domain
  misc_feature (7)..(98): Homolog of NCBI NO: 25404943 NR Description: protein F1E22.8 [imported] - Arabidopsis thaliana
  misc_feature (1)..(98): Homolog of NCBI NO: 15218779 NR Description: small nuclear ribonucleo protein -related thaliana] >gi|17979539|gb|AAL50104.1| At1g65700/F1E22_3 thaliana] >gi|20334918|gb|AAM16215.1| At1g65700/F1E22_3
  misc_feature (5)..(98): Homolog of NCBI NO: 31240533 NR Description: ENSANGP00000020162 [Anopheles gambiae]
  misc_feature (4)..(98): Homolog of NCBI NO: 7706425 NR Description: U6 snRNA-associated Sm-like protein LSm8 [Homo
  misc_feature (5)..(98): Homolog of NCBI NO: 24655606 NR Description: CG2021-PA [Drosophila melanogaster]
  misc_feature (4)..(96): Homolog of NCBI NO: 17544148 NR Description: SM protein (10.8 kD) [Caenorhabditis elegans]
  misc_feature (4)..(96): Homolog of NCBI NO: 39584186 NR Description: Hypothetical protein CBG05470 [Caenorhabditis
  misc_feature (4)..(69): Homolog of NCBI NO: 28279736 NR Description: Similar to U6 snRNA-associated Sm-like protein
  misc_feature (7)..(98): Homolog of NCBI NO: 19076009 NR Description: splicing factor [Schizosaccharomyces pombe]
  misc_feature (3)..(96): Homolog of NCBI NO: 23612724 NR Description: u6 snRNA-associated sm-like protein, putative

SEQ ID NO: 100652 - protein, 62 aa, Arabidopsis thaliana; identical to SEQ ID NO: 21580
  peptide (1)..(62): Ceres Seq. ID no. 13605714
  misc_feature (6)..(58): Homolog of NCBI NO: 25404943 NR Description: protein F1E22.8 [imported] - Arabidopsis thaliana

SEQ ID NO: 100653 - DNA, 1560 bp, Arabidopsis thaliana
  misc_feature (1)..(1560): Ceres Seq. ID no. 13605720
  misc_feature: MA Experiment ID: 20000185 Result: Down-regulated in Transcription
  misc_feature: MA Experiment 20000185 PARAMETER Experiment Name: At_Roots__P Parameter: Age (day) Value: 7 vs. 21
  misc_feature: MA Experiment 20000185 PARAMETER Experiment Name: At_Roots__P Parameter: Organism Value: A. thaliana
  misc_feature: MA Experiment 20000185 PARAMETER Experiment Name: At_Roots__P Parameter: Tissue Value: Roots vs. Whole Plant
  misc_feature: MA Experiment ID: 20000234 Result: Up-regulated in Transcription
  misc_feature: MA Experiment 20000234 PARAMETER Experiment Name: At_Siliques_P Parameter: Age (day) Value: 21
  misc_feature: MA Experiment 20000234 PARAMETER Experiment Name: At_Siliques_P Parameter: Organism Value: A. thaliana
  misc_feature: MA Experiment 20000234 PARAMETER Experiment Name: At_Siliques_P Parameter: Plant Line Value: WS
  misc_feature: MA Experiment 20000234 PARAMETER Experiment Name: At_Siliques_P Parameter: Tissue Value: Less Than 5mm Siliques vs. Whole Plant
  misc_feature: MA Experiment ID: 20000264 Result: Up-regulated in Transcription
  misc_feature: MA Experiment 20000264 PARAMETER Experiment Name: At_Open_Flower_P Parameter: Age (day) Value: 21
  misc_feature: MA Experiment 20000264 PARAMETER Experiment Name: At_Open_Flower_P Parameter: Plant Line Value: WS
  misc_feature: MA Experiment 20000264 PARAMETER Experiment Name: At_Open_Flower_P Parameter: Tissue Value: Open Flower vs. Whole Plant
  misc_feature: MA Experiment ID: 20000265 Result: Up-regulated in Transcription
  misc_feature: MA Experiment 20000265 PARAMETER Experiment Name: At_Open_Flower_P Parameter: Age (day) Value: 21
  misc_feature: MA Experiment 20000265 PARAMETER Experiment Name: At_Open_Flower_P Parameter: Plant Line Value: WS
  misc_feature: MA Experiment 20000265 PARAMETER Experiment Name: At_Open_Flower_P Parameter: Tissue Value: Closed Flower vs. Whole Plant
  misc_feature: MA Experiment ID: 20000286 Result: Up-regulated in Transcription
  misc_feature: MA Experiment 20000286 PARAMETER Experiment Name: At_Open_Flower_P Parameter: Age (day) Value: 21
  misc_feature: MA Experiment 20000286 PARAMETER Experiment Name: At_Open_Flower_P Parameter: Plant Line Value: WS
  misc_feature: MA Experiment 20000286 PARAMETER Experiment Name: At_Open_Flower_P Parameter: Tissue Value: Half Open vs. Whole Plant
  misc_feature: MA Experiment ID: 20001558 Result: Up-regulated in Transcription
  misc_feature: MA Experiment 20001558 PARAMETER Experiment Name: At_Drought_Soil_Dry_P Parameter: Age (day) Value: 27
  misc_feature: MA Experiment 20001558 PARAMETER Experiment Name: At_Drought_Soil_Dry_P Parameter: Organism Value: A. thaliana
  misc_feature: MA Experiment 20001558 PARAMETER Experiment Name: At_Drought_Soil_Dry_P Parameter: Plant Line Value: WS
  misc_feature: MA Experiment 20001558 PARAMETER Experiment Name: At_Drought_Soil_Dry_P Parameter: Post Timepoint (hr) Value: 6
  misc_feature: MA Experiment 20001558 PARAMETER Experiment Name: At_Drought_Soil_Dry_P Parameter: Post-Treatment Value: Re-Water vs. No Drought
  misc_feature: MA Experiment 20001558 PARAMETER Experiment Name: At_Drought_Soil_Dry_P Parameter: Timepoint (day) Value: 13
  misc_feature: MA Experiment 20001558 PARAMETER Experiment Name: At_Drought_Soil_Dry_P Parameter: Treatment Value: Drought vs. No Drought
  misc_feature: MA Experiment ID: 20001905 Result: Down-regulated in Transcription
  misc_feature: MA Experiment 20001905 PARAMETER Experiment Name: At_Drought_Reproduction_P Parameter: Age (day) Value: 40
  misc_feature: MA Experiment 20001905 PARAMETER Experiment Name: At_Drought_Reproduction_P Parameter: Organism Value: A. thaliana
  misc_feature: MA Experiment 20001905 PARAMETER Experiment Name: At_Drought_Reproduction_P Parameter: Plant Line Value: WS
  misc_feature: MA Experiment 20001905 PARAMETER Experiment Name: At_Drought_Reproduction_P Parameter: Timepoint (day) Value: 10
  misc_feature: MA Experiment 20001905 PARAMETER Experiment Name: At_Drought_Reproduction_P Parameter: Tissue Value: Rosettes
  misc_feature: MA Experiment 20001905 PARAMETER Experiment Name: At_Drought_Reproduction_P Parameter: Treatment Value: Drought vs. No Drought
  misc_feature: MA Experiment ID: 20001906 Result: Down-regulated in Transcription
  misc_feature: MA Experiment 20001906 PARAMETER Experiment Name: At_Drought_Reproduction_P Parameter: Age (day) Value: 35
  misc_feature: MA Experiment 20001906 PARAMETER Experiment Name: At_Drought_Reproduction_P Parameter: Organism Value: A. thaliana
  misc_feature: MA Experiment 20001906 PARAMETER Experiment Name: At_Drought_Reproduction_P Parameter: Plant Line Value: WS
  misc_feature: MA Experiment 20001906 PARAMETER Experiment Name: At_Drought_Reproduction_P Parameter: Timepoint (day) Value: 5
  misc_feature: MA Experiment 20001906 PARAMETER Experiment Name: At_Drought_Reproduction_P Parameter: Tissue Value: Siliques
  misc_feature: MA Experiment 20001906 PARAMETER Experiment Name: At_Drought_Reproduction_P Parameter: Treatment Value: Drought vs. No Drought
ttaaaaaaaaaaaaaaaaaaacagaacaatttcttcttcctctgggatccataagttttgagattttggtggtcagtgtctgatggagtgtaatgcaaagccaccgtttcaatgggaattggaaaacttgatatcttttggcacttctacagctgaagttcctagaaagctaaaaccaatggagtgggaaattgatggatttgattgcacctctctgtattcttcaagctttgcctatgctggtagttcaggttctgatatagctcatgctttctctaaaagctcaaagtcaacttccattagctcttcatcagctgaagtaagaacacacaattttacatccgaaactggtgaaagtcttcctggagaatttgcaaaggggattgatacttctccaagtcttgaactttcttttggctctggtgatccggttctcggtttaaagcttggtaaacgaacgtactttgaagacttttgggaagtggagaatgctaaaggtttgggacttccagtgactctggcttcatcttctgtttctcccgtgaagaaatcgaaatccattcctcagaggttacaaactcctcactgtcaagttgaaggctgtaatcttgatctttcatcagctaaagactatcatcggaaacataggatttgtgaaaatcattcaaagtttcctaaagtcgttgtgagtggcgtagagcgtcggttctgccaacaatgtagcaggttccactgtctctctgagtttgatgagaagaaacgtagctgtcgccgacgtctctcagatcacaatgcaagacgtcgcaagccaaatcctggaaggacatatgatgggaaaccacaggtggattttgtatggaacagatttgcacttatccatccaagaagtgaggaaaagtttatatggccaagttcgaagcacgtaccatcaagagtgttaatgccgcaacctgcaaagactgagatttccgataccgagcacaatagatttggattgttggaccccaaaaccaaaaccgcaagagccgagttattcagtaaagaaaaggtcacaatctcttcacacatgggtgcttctcaagatcttgatggtgctctctctcttctgtcaaattcaacaacatgggtttcttcctctgaccaaccaaggcgttttacccttgatcaccatccctcaagcaacctccaacccgtagctcaccggtctgcggctcaactcaattcagtttccggctattggcagccggacccacccgcagttgaaggcccgaccgctctgcatagaaatggggtaggccagtttaatgaaaactacttcagcttgaaccagttttataactgaaaattgtatgcctttaaatcctaataagatatttgatgttaaaggatcaagcaagctagtgataagttaagataggagctttgaaacttgcaagacaccaaatcctctcttgtttttttgtccaaatattttcatgggttagagagctttgacaattgtcttaatatcatctttgtcgtgttatacattaggattataaatcttgatggtgtactacg

SEQ ID NO: 100654 - protein, 419 aa, Arabidopsis thaliana
  peptide (1)..(419): Ceres Seq. ID no. 13605721
  misc_feature (168)..(246): Pfam Name: SBP domain Pfam Description: SBP domain
  misc_feature (1)..(419): Homolog of NCBI NO: 15239820 NR Description: squamosa promoter binding protein-related 2 [Arabidopsis thaliana] >gi|30694251|ref|NP_851122.1| squamosa
  misc_feature (1)..(419): Homolog of NCBI NO: 25456646 NR Description: squamosa promoter binding protein 2 [imported] -
  misc_feature (1)..(275): Homolog of NCBI NO: 22329813 NR Description: squamosa-promoter binding protein 2 -related thaliana] >gi|25456667|pir||T52596 squamosa promoter binding
  misc_feature (1)..(275): Homolog of NCBI NO: 18650611 NR Description: At1g27370/F17L21_16 [Arabidopsis thaliana]
  misc_feature (9)..(275): Homolog of NCBI NO: 9802546 NR Description: F17L21.15 [Arabidopsis thaliana]
  misc_feature (1)..(280): Homolog of NCBI NO: 18396302 NR Description: squamosa-promoter binding protein 2 -related
  misc_feature (10)..(280): Homolog of NCBI NO: 25403307 NR Description: protein F17L21.14 [imported] - Arabidopsis >gi|9802531|gb|AAF99733.1|AC004557_12 F17L21.14 [Arabidopsis
  misc_feature (113)..(350): Homolog of NCBI NO: 25352584 NR Description: squamosa promoter binding protein-homolog 4 - garden snapdragon (fragment) >gi|5931641|emb|CAB56569.1|
  misc_feature (153)..(390): Homolog of NCBI NO: 13877707 NR Description: similar to squamosa-promoter binding protein 1
  misc_feature (153)..(390): Homolog of NCBI NO: 30697804 NR Description: squamosa-promoter binding protein -related
MECNAKPPFQWELENLISFGTSTAEVPRKLKPMEWEIDGFDCTSLYSSSFAYAGSSGSDIAHAFSKSSKSTSISSSSAEVRTHNFTSETGESLPGEFAKGIDTSPSLELSFGSGDPVLGLKLGKRTYFEDFWEVENAKGLGLPVTLASSSVSPVKKSKSIPQRLQTPHCQVEGCNLDLSSAKDYHRKHRICENHSKFPKVVVSGVERRFCQQCSRFHCLSEFDEKKRSCRRRLSDHNARRRKPNPGRTYDGKPQVDFVWNRFALIHPRSEEKFIWPSSKHVPSRVLMPQPAKTEISDTEHNRFGLLDPKTKTARAELFSKEKVTISSHMGASQDLDGALSLLSNSTTWVSSSDQPRRFTLDHHPSSNLQPVAHRSAAQLNSVSGYWQPDPPAVEGPTALHRNGVGQFNENYFSLNQFYN

SEQ ID NO: 100655 - protein, 387 aa, Arabidopsis thaliana
  peptide (1)..(387): Ceres Seq. ID no. 13605722
  misc_feature (136)..(214): Pfam Name: SBP domain Pfam Description: SBP domain
  misc_feature (1)..(387): Homolog of NCBI NO: 15239820 NR Description: squamosa promoter binding protein-related 2 [Arabidopsis thaliana] >gi|30694251|ref|NP_851122.1| squamosa
  misc_feature (1)..(387): Homolog of NCBI NO: 25456646 NR Description: squamosa promoter binding protein 2 [imported] -
  misc_feature (1)..(243): Homolog of NCBI NO: 22329813 NR Description: squamosa-promoter binding protein 2 -related thaliana] >gi|25456667|pir||T52596 squamosa promoter binding
  misc_feature (1)..(243): Homolog of NCBI NO: 18650611 NR Description: At1g27370/F17L21_16 [Arabidopsis thaliana]
  misc_feature (1)..(243): Homolog of NCBI NO: 9802546 NR Description: F17L21.15 [Arabidopsis thaliana]
  misc_feature (1)..(248): Homolog of NCBI NO: 18396302 NR Description: squamosa-promoter binding protein 2 -related
  misc_feature (1)..(248): Homolog of NCBI NO: 25403307 NR Description: protein F17L21.14 [imported] - Arabidopsis >gi|9802531|gb|AAF99733.1|AC004557_12 F17L21.14 [Arabidopsis
  misc_feature (81)..(318): Homolog of NCBI NO: 25352584 NR Description: squamosa promoter binding protein-homolog 4 - garden snapdragon (fragment) >gi|5931641|emb|CAB56569.1|
  misc_feature (121)..(358): Homolog of NCBI NO: 13877707 NR Description: similar to squamosa-promoter binding protein 1
  misc_feature (121)..(358): Homolog of NCBI NO: 30697804 NR Description: squamosa-promoter binding protein -related
MEWEIDGFDCTSLYSSSFAYAGSSGSDIAHAFSKSSKSTSISSSSAEVRTHNFTSETGESLPGEFAKGIDTSPSLELSFGSGDPVLGLKLGKRTYFEDFWEVENAKGLGLPVTLASSSVSPVKKSKSIPQRLQTPHCQVEGCNLDLSSAKDYHRKHRICENHSKFPKVVVSGVERRFCQQCSRFHCLSEFDEKKRSCRRRLSDHNARRRKPNPGRTYDGKPQVDFVWNRFALIHPRSEEKFIWPSSKHVPSRVLMPQPAKTEISDTEHNRFGLLDPKTKTARAELFSKEKVTISSHMGASQDLDGALSLLSNSTTWVSSSDQPRRFTLDHHPSSNLQPVAHRSAAQLNSVSGYWQPDPPAVEGPTALHRNGVGQFNENYFSLNQFYN

SEQ ID NO: 100656 - DNA, 1133 bp, Arabidopsis thaliana
  misc_feature (1)..(1133): Ceres Seq. ID no. 13605727
  misc_feature: MA Experiment ID: 20000182 Result: Up-regulated in Transcription
  misc_feature: MA Experiment 20000182 PARAMETER Experiment Name: At_2mM_SA_P Parameter: Age (day) Value: 14
  misc_feature: MA Experiment 20000182 PARAMETER Experiment Name: At_2mM_SA_P Parameter: Organism Value: A. thaliana
  misc_feature: MA Experiment 20000182 PARAMETER Experiment Name: At_2mM_SA_P Parameter: Plant Line Value: WS
  misc_feature: MA Experiment 20000182 PARAMETER Experiment Name: At_2mM_SA_P Parameter: Timepoint (hr) Value: 6
  misc_feature: MA Experiment 20000182 PARAMETER Experiment Name: At_2mM_SA_P Parameter: Tissue Value: Aerial
  misc_feature: MA Experiment 20000182 PARAMETER Experiment Name: At_2mM_SA_P Parameter: Treatment Value: 2mM SA vs. No Treatment
  misc_feature: MA Experiment ID: 20000227 Result: Down-regulated in Transcription
  misc_feature: MA Experiment 20000227 PARAMETER Experiment Name: At_Root-Tips-vs-Tops_P Parameter: Tissue Value: Root Tips vs. Root Tops
  misc_feature: MA Experiment ID: 20000436 Result: Up-regulated in Transcription
  misc_feature: MA Experiment 20000436 PARAMETER Experiment Name: At_Drought_P Parameter: Age (day) Value: 7
  misc_feature: MA Experiment 20000436 PARAMETER Experiment Name: At_Drought_P Parameter: Organism Value: A. thaliana
  misc_feature: MA Experiment 20000436 PARAMETER Experiment Name: At_Drought_P Parameter: Plant Line Value: WS
  misc_feature: MA Experiment 20000436 PARAMETER Experiment Name: At_Drought_P Parameter: Timepoint (hr) Value: 12
  misc_feature: MA Experiment 20000436 PARAMETER Experiment Name: At_Drought_P Parameter: Tissue Value: Whole Plant
  misc_feature: MA Experiment 20000436 PARAMETER Experiment Name: At_Drought_P Parameter: Treatment Value: Drought vs. No Drought
  misc_feature: MA Experiment ID: 20000437 Result: Up-regulated in Transcription
  misc_feature: MA Experiment 20000437 PARAMETER Experiment Name: At_Drought_P Parameter: Age (day) Value: 8
  misc_feature: MA Experiment 20000437 PARAMETER Experiment Name: At_Drought_P Parameter: Organism Value: A. thaliana
  misc_feature: MA Experiment 20000437 PARAMETER Experiment Name: At_Drought_P Parameter: Plant Line Value: WS
  misc_feature: MA Experiment 20000437 PARAMETER Experiment Name: At_Drought_P Parameter: Timepoint (hr) Value: 24
  misc_feature: MA Experiment 20000437 PARAMETER Experiment Name: At_Drought_P Parameter: Tissue Value: Whole Plant
  misc_feature: MA Experiment 20000437 PARAMETER Experiment Name: At_Drought_P Parameter: Treatment Value: Drought vs. No Drought
  misc_feature: MA Experiment ID: 20000453 Result: Up-regulated in Transcription
  misc_feature: MA Experiment 20000453 PARAMETER Experiment Name: At_100uM_ABA_P Parameter: Age (day) Value: 15
  misc_feature: MA Experiment 20000453 PARAMETER Experiment Name: At_100uM_ABA_P Parameter: Organism Value: A. thaliana
  misc_feature: MA Experiment 20000453 PARAMETER Experiment Name: At_100uM_ABA_P Parameter: Plant Line Value: WS
  misc_feature: MA Experiment 20000453 PARAMETER Experiment Name: At_100uM_ABA_P Parameter: Timepoint (hr) Value: 24
  misc_feature: MA Experiment 20000453 PARAMETER Experiment Name: At_100uM_ABA_P Parameter: Tissue Value: Aerial
  misc_feature: MA Experiment 20000453 PARAMETER Experiment Name: At_100uM_ABA_P Parameter: Treatment Value: 100uM ABA vs. No Treatment
  misc_feature: MA Experiment ID: 20000794 Result: Up-regulated in Transcription
  misc_feature: MA Experiment 20000794 PARAMETER Experiment Name: At_Petals_P Parameter: Age (day) Value: 23-25 days
  misc_feature: MA Experiment 20000794 PARAMETER Experiment Name: At_Petals_P Parameter: Plant Line Value: WS
  misc_feature: MA Experiment 20000794 PARAMETER Experiment Name: At_Petals_P Parameter: Tissue Value: Petals vs. Whole plant
  misc_feature: MA Experiment ID: 20001557 Result: Up-regulated in Transcription
  misc_feature: MA Experiment 20001557 PARAMETER Experiment Name: At_Drought_Soil_Dry_P Parameter: Age (day) Value: 27
  misc_feature: MA Experiment 20001557 PARAMETER Experiment Name: At_Drought_Soil_Dry_P Parameter: Organism Value: A. thaliana
  misc_feature: MA Experiment 20001557 PARAMETER Experiment Name: At_Drought_Soil_Dry_P Parameter: Plant Line Value: WS
  misc_feature: MA Experiment 20001557 PARAMETER Experiment Name: At_Drought_Soil_Dry_P Parameter: Post Timepoint (hr) Value: 3
  misc_feature: MA Experiment 20001557 PARAMETER Experiment Name: At_Drought_Soil_Dry_P Parameter: Post-Treatment Value: Re-Water vs. No Drought
  misc_feature: MA Experiment 20001557 PARAMETER Experiment Name: At_Drought_Soil_Dry_P Parameter: Timepoint (day) Value: 13
  misc_feature: MA Experiment 20001557 PARAMETER Experiment Name: At_Drought_Soil_Dry_P Parameter: Treatment Value: Drought vs. No Drought
  misc_feature: MA Experiment ID: 20001558 Result: Up-regulated in Transcription
  misc_feature: MA Experiment 20001558 PARAMETER Experiment Name: At_Drought_Soil_Dry_P Parameter: Age (day) Value: 27
  misc_feature: MA Experiment 20001558 PARAMETER Experiment Name: At_Drought_Soil_Dry_P Parameter: Organism Value: A. thaliana
  misc_feature: MA Experiment 20001558 PARAMETER Experiment Name: At_Drought_Soil_Dry_P Parameter: Plant Line Value: WS
  misc_feature: MA Experiment 20001558 PARAMETER Experiment Name: At_Drought_Soil_Dry_P Parameter: Post Timepoint (hr) Value: 6
  misc_feature: MA Experiment 20001558 PARAMETER Experiment Name: At_Drought_Soil_Dry_P Parameter: Post-Treatment Value: Re-Water vs. No Drought
  misc_feature: MA Experiment 20001558 PARAMETER Experiment Name: At_Drought_Soil_Dry_P Parameter: Timepoint (day) Value: 13
  misc_feature: MA Experiment 20001558 PARAMETER Experiment Name: At_Drought_Soil_Dry_P Parameter: Treatment Value: Drought vs. No Drought
  misc_feature: MA Experiment ID: 20001911 Result: Up-regulated in Transcription
  misc_feature: MA Experiment 20001911 PARAMETER Experiment Name: At_Drought_Reproduction_P Parameter: Age (day) Value: 40
  misc_feature: MA Experiment 20001911 PARAMETER Experiment Name: At_Drought_Reproduction_P Parameter: Organism Value: A. thaliana
  misc_feature: MA Experiment 20001911 PARAMETER Experiment Name: At_Drought_Reproduction_P Parameter: Plant Line Value: WS
  misc_feature: MA Experiment 20001911 PARAMETER Experiment Name: At_Drought_Reproduction_P Parameter: Timepoint (day) Value: 10
  misc_feature: MA Experiment 20001911 PARAMETER Experiment Name: At_Drought_Reproduction_P Parameter: Tissue Value: Flowers
  misc_feature: MA Experiment 20001911 PARAMETER Experiment Name: At_Drought_Reproduction_P Parameter: Treatment Value: Drought vs. No Drought
cttctaggcgttgttgttgttttgtctcattgttgctctgtttcttgaggttttataaatggatcctggtactttaaactcggtgatcaataggttgcttgaagctagagaaaaaccaggaaagattgttcagttgtctgaaacagagatcaaacagctctgtttcgtctctagagatatcttcttgagacaaccaaatctcttggaacttgaagctcctgttaaaatatgtggggacattcatggacaatatccggatctcttgagactattcgaacatggcggataccctcctaattcaaactacttgtttcttggagattatgtcgatcgcggcaagcaaagcctcgaaacgatttgtcttttacttgcttacaagattaagttccctgaaaacttcttccttctcagaggaaaccatgaaagtgcatcaatcaatcgtatttacggcttctatgacgagtgtaaacgtagattcagtgtcaagatttggcgaatcttcactgattgcttcaactgtctccccgtcgctgcactcatcgatgagcggattttttgtatgcatggtgggctctccccggagctgctaagcttgaggcagattagggatattcgtcgtccaacggatattcctgatcgtggtttactctgtgatctcttgtggtctgatcctgataaagatgttagaggttgggggcctaacgatcgcggagtttcttacacttttggatcagatatagtttctggatttcttaaaagactcgatcttgacctcatttgtagggctcaccaggttgttgaagatggattcgagttctttgcgaataagcagctcgtaacgatattctctgcgccgaattactgtggggaatttgacaatgcaggtgcgatgatgagtgtgtctgaggatttgacctgctcttttcagatcttaaaatctaatgacaagaaatcaaagttcagtttcggaagcagaggtggtgctaaaactagcttcccttatcctaaagtgaaggtatgtattaatcacatcactttttaatttgtggatatactgtagcacaaaaaataaatatggtaaatgcatataatttgctctaaaaaaaaaaaaaaaaaaaccctgacgtagctcg

SEQ ID NO: 100657 - protein, 327 aa, Arabidopsis thaliana
  peptide (1)..(327): Ceres Seq. ID no. 13605728
  misc_feature (1)..(327): Homolog of NCBI NO: 18422326 NR Description: serine/threonine protein phosphatase type [Arabidopsis thaliana] >gi|26454643|sp|O82733|PP17_ARATH protein phosphatase PP1 isozyme 7 >gi|2780349|dbj|BAA24283.1|
  misc_feature (1)..(319): Homolog of NCBI NO: 30694273 NR Description: serine/threonine protein phosphatase type [Arabidopsis thaliana] >gi|22531251|gb|AAM97129.1| expressed [Arabidopsis thaliana] >gi|25084010|gb|AAN72154.1| expressed
  misc_feature (1)..(313): Homolog of NCBI NO: 3153201 NR Description: serine/threonine protein phosphatase type one
  misc_feature (1)..(314): Homolog of NCBI NO: 7435133 NR Description: phosphoprotein phosphatase (EC 3.1.3.16) 1
  misc_feature (1)..(305): Homolog of NCBI NO: 7435129 NR Description: phosphoprotein phosphatase (EC 3.1.3.16),
  misc_feature (1)..(319): Homolog of NCBI NO: 7435136 NR Description: phosphoprotein phosphatase (EC 3.1.3.16) 1a
  misc_feature (9)..(310): Homolog of NCBI NO: 7435132 NR Description: phosphoprotein phosphatase (EC 3.1.3.16) 1,
  misc_feature (1)..(314): Homolog of NCBI NO: 4506005 NR Description: protein phosphatase 1, catalytic subunit, beta [Homo sapiens] >gi|6981388|ref|NP_037197.1| protein phosphatase catalytic subunit, beta isoform [Rattus norvegicus]
  misc_feature (1)..(314): Homolog of NCBI NO: 27884151 NR Description: SI:zC214P16.4 (novel protein similar to human phosphatase 1, catalytic subunit, beta isoform (PPP1CB)) [Danio
  misc_feature (1)..(314): Homolog of NCBI NO: 227436 NR Description: protein phosphatase 1 delta
MDPGTLNSVINRLLEAREKPGKIVQLSETEIKQLCFVSRDIFLRQPNLLELEAPVKICGDIHGQYPDLLRLFEHGGYPPNSNYLFLGDYVDRGKQSLETICLLLAYKIKFPENFFLLRGNHESASINRIYGFYDECKRRFSVKIWRIFTDCFNCLPVAALIDERIFCMHGGLSPELLSLRQIRDIRRPTDIPDRGLLCDLLWSDPDKDVRGWGPNDRGVSYTFGSDIVSGFLKRLDLDLICRAHQVVEDGFEFFANKQLVTIFSAPNYCGEFDNAGAMMSVSEDLTCSFQILKSNDKKSKFSFGSRGGAKTSFPYPKVKVCINHITF

SEQ ID NO: 100658 - DNA, 795 bp, Arabidopsis thaliana
  misc_feature (1)..(795): Ceres Seq. ID no. 13605733
  misc_feature: MA Experiment ID: 108434 Result: Up-regulated in Transcription
  misc_feature: MA Experiment 108434 PARAMETER Experiment Name: At_Root_Tips_cDNA_P Parameter: Tissue Value: Root Tips
  misc_feature: MA Experiment ID: 108573 Result: Up-regulated in Transcription
  misc_feature: MA Experiment 108573 PARAMETER Experiment Name: At_Drought_cDNA_P Parameter: Timepoint (hr) Value: 6
  misc_feature: MA Experiment 108573 PARAMETER Experiment Name: At_Drought_cDNA_P Parameter: Tissue Value: Aerial
  misc_feature: MA Experiment 108573 PARAMETER Experiment Name: At_Drought_cDNA_P Parameter: Treatment Value: Drought vs. No Drought
  misc_feature: MA Experiment ID: 108585 Result: Up-regulated in Transcription
  misc_feature: MA Experiment 108585 PARAMETER Experiment Name: At_5mM_NaNP_cDNA_P Parameter: Timepoint (hr) Value: 6
  misc_feature: MA Experiment 108585 PARAMETER Experiment Name: At_5mM_NaNP_cDNA_P Parameter: Tissue Value: Aerial
  misc_feature: MA Experiment 108585 PARAMETER Experiment Name: At_5mM_NaNP_cDNA_P Parameter: Treatment Value: null
  misc_feature: MA Experiment ID: 20000111 Result: Up-regulated in Transcription
  misc_feature: MA Experiment 20000111 PARAMETER Experiment Name: At_42deg_Heat_cDNA_P Parameter: Temperature (deg C) Value: 42 vs. 22
  misc_feature: MA Experiment 20000111 PARAMETER Experiment Name: At_42deg_Heat_cDNA_P Parameter: Timepoint (hr) Value: 6
  misc_feature: MA Experiment 20000111 PARAMETER Experiment Name: At_42deg_Heat_cDNA_P Parameter: Tissue Value: Aerial
  misc_feature: MA Experiment ID: 20000224 Result: Down-regulated in Transcription
  misc_feature: MA Experiment ID: 20000286 Result: Down-regulated in Transcription
  misc_feature: MA Experiment 20000286 PARAMETER Experiment Name: At_Open_Flower_P Parameter: Age (day) Value: 21
  misc_feature: MA Experiment 20000286 PARAMETER Experiment Name: At_Open_Flower_P Parameter: Plant Line Value: WS
  misc_feature: MA Experiment 20000286 PARAMETER Experiment Name: At_Open_Flower_P Parameter: Tissue Value: Half Open vs. Whole Plant
  misc_feature: MA Experiment ID: 20000439 Result: Down-regulated in Transcription
  misc_feature: MA Experiment 20000439 PARAMETER Experiment Name: At_Roots__P Parameter: Age (day) Value: 14 vs. 21
  misc_feature: MA Experiment 20000439 PARAMETER Experiment Name: At_Roots__P Parameter: Organism Value: A. thaliana
  misc_feature: MA Experiment 20000439 PARAMETER Experiment Name: At_Roots__P Parameter: Tissue Value: Roots vs. Whole Plant
  misc_feature: MA Experiment ID: 20000452 Result: Down-regulated in Transcription
  misc_feature: MA Experiment 20000452 PARAMETER Experiment Name: At_CS6879_Shoots-Roots_P Parameter: Age (day) Value: 14
  misc_feature: MA Experiment 20000452 PARAMETER Experiment Name: At_CS6879_Shoots-Roots_P Parameter: Organism Value: A. thaliana
  misc_feature: MA Experiment 20000452 PARAMETER Experiment Name: At_CS6879_Shoots-Roots_P Parameter: Plant Line Value: CS6879 vs. WS
  misc_feature: MA Experiment 20000452 PARAMETER Experiment Name: At_CS6879_Shoots-Roots_P Parameter: Tissue Value: Shoots
  misc_feature: MA Experiment ID: 20001450 Result: Up-regulated in Transcription
  misc_feature: MA Experiment 20001450 PARAMETER Experiment Name: At_Far-red-induction_P Parameter: Age (day) Value: 7
  misc_feature: MA Experiment 20001450 PARAMETER Experiment Name: At_Far-red-induction_P Parameter: Light Value: Far-red vs. White
  misc_feature: MA Experiment 20001450 PARAMETER Experiment Name: At_Far-red-induction_P Parameter: Organism Value: A. thaliana
  misc_feature: MA Experiment 20001450 PARAMETER Experiment Name: At_Far-red-induction_P Parameter: Plant Line Value: Columbia
  misc_feature: MA Experiment 20001450 PARAMETER Experiment Name: At_Far-red-induction_P Parameter: Timepoint (hr) Value: 8
  misc_feature: MA Experiment 20001450 PARAMETER Experiment Name: At_Far-red-induction_P Parameter: Tissue Value: Whole Plant
  misc_feature: MA Experiment ID: 20001451 Result: Up-regulated in Transcription
  misc_feature: MA Experiment 20001451 PARAMETER Experiment Name: At_Far-red-induction_P Parameter: Age (day) Value: 7
  misc_feature: MA Experiment 20001451 PARAMETER Experiment Name: At_Far-red-induction_P Parameter: Light Value: Far-red vs. White
  misc_feature: MA Experiment 20001451 PARAMETER Experiment Name: At_Far-red-induction_P Parameter: Organism Value: A. thaliana
  misc_feature: MA Experiment 20001451 PARAMETER Experiment Name: At_Far-red-induction_P Parameter: Plant Line Value: Columbia
  misc_feature: MA Experiment 20001451 PARAMETER Experiment Name: At_Far-red-induction_P Parameter: Timepoint (hr) Value: 24
  misc_feature: MA Experiment 20001451 PARAMETER Experiment Name: At_Far-red-induction_P Parameter: Tissue Value: Whole Plant
aaataaacctaaaccaatagaaccgcagtttttcctcctcgccgaaacgaagaagattctccttctctccgtcagacaaatctacgaacaagcgagcctgagcttaagaccaaactcatagagatgggtttcttctcttttcttggaagagttctcttcgcttctctctttatcctctccgcttggcaaatgttcaatgatggtggtcctgcagctaaagaattggctccaaagcttgatttggttaaggcacatttatcttctagattaggagtaacattgcccaaaatagaggtgagacaagtcgttgctactattattgccctgaaaggagtcggaggcttactctttgttatcggaaacaccttcggtgcttatcttctggcttcctacttggtggttttcggtcctattctctatgatttctacaactacggacctcaggaacgtcatttctctcttctgttgacagagttcttgcagagcgttgcactctttggagcgttactcttctttatcggaatgaagaactcgacacccgccaagaagaatttgaagaagaggacacctaagccgaaagctgcctagtatcaatattagttttcttctggttttgccatgagcaagcaataccttgccttttccttttttcccgacaaaatctttccttagaacttttgttttctttctgttttaggattcttagattagctcatgatcttatactaatactgtgatttgatattggggatcttgaagttttggtttgttgaaactggaaccatgcagctacag

SEQ ID NO: 100659 - protein, 154 aa, Arabidopsis thaliana
  peptide (1)..(154): Ceres Seq. ID no. 13605734
  misc_feature (1)..(134): Pfam Name: HR-like lesion-inducing Pfam Description: HR-like lesion-inducing
  misc_feature (1)..(154): Homolog of NCBI NO: 15239873 NR Description: Nicotiana lesion-inducing like [Arabidopsis
  misc_feature (1)..(154): Homolog of NCBI NO: 21592798 NR Description: Nicotiana lesion-inducing like [Arabidopsis
  misc_feature (1)..(154): Homolog of NCBI NO: 15219714 NR Description: lesion-inducing ORF protein - related
  misc_feature (1)..(148): Homolog of NCBI NO: 40287494 NR Description: putative lesion-inducing protein [Capsicum annuum]
  misc_feature (1)..(152): Homolog of NCBI NO: 27261473 NR Description: Unknown protein [Oryza sativa (japonica
  misc_feature (1)..(152): Homolog of NCBI NO: 38346190 NR Description: OSJNBa0027O01.6 [Oryza sativa (japonica
  misc_feature (26)..(153): Homolog of NCBI NO: 37534824 NR Description: putative RNA-binding protein [Oryza sativa
  misc_feature (1)..(24): Homolog of NCBI NO: 37534824 NR Description: putative RNA-binding protein [Oryza sativa
  misc_feature (1)..(153): Homolog of NCBI NO: 15236497 NR Description: elicitor like protein [Arabidopsis thaliana]
  misc_feature (27)..(153): Homolog of NCBI NO: 3885517 NR Description: similar to Nicotiana HR lesion-inducing ORF
MGFFSFLGRVLFASLFILSAWQMFNDGGPAAKELAPKLDLVKAHLSSRLGVTLPKIEVRQVVATIIALKGVGGLLFVIGNTFGAYLLASYLVVFGPILYDFYNYGPQERHFSLLLTEFLQSVALFGALLFFIGMKNSTPAKKNLKKRTPKPKAA

SEQ ID NO: 100660 - protein, 132 aa, Arabidopsis thaliana
  peptide (1)..(132): Ceres Seq. ID no. 13605735
  misc_feature (1)..(112): Pfam Name: HR-like lesion-inducing Pfam Description: HR-like lesion-inducing
  misc_feature (1)..(132): Homolog of NCBI NO: 15239873 NR Description: Nicotiana lesion-inducing like [Arabidopsis
  misc_feature (1)..(132): Homolog of NCBI NO: 21592798 NR Description: Nicotiana lesion-inducing like [Arabidopsis
  misc_feature (1)..(132): Homolog of NCBI NO: 15219714 NR Description: lesion-inducing ORF protein - related
  misc_feature (1)..(126): Homolog of NCBI NO: 40287494 NR Description: putative lesion-inducing protein [Capsicum annuum]
  misc_feature (1)..(130): Homolog of NCBI NO: 27261473 NR Description: Unknown protein [Oryza sativa (japonica
  misc_feature (1)..(130): Homolog of NCBI NO: 38346190 NR Description: OSJNBa0027O01.6 [Oryza sativa (japonica
  misc_feature (4)..(131): Homolog of NCBI NO: 37534824 NR Description: putative RNA-binding protein [Oryza sativa
  misc_feature (1)..(131): Homolog of NCBI NO: 15236497 NR Description: elicitor like protein [Arabidopsis thaliana]
  misc_feature (5)..(131): Homolog of NCBI NO: 3885517 NR Description: similar to Nicotiana HR lesion-inducing ORF
  misc_feature (1)..(130): Homolog of NCBI NO: 7489144 NR Description: hypothetical protein (clone NF22) - common tobacco
MFNDGGPAAKELAPKLDLVKAHLSSRLGVTLPKIEVRQVVATIIALKGVGGLLFVIGNTFGAYLLASYLVVFGPILYDFYNYGPQERHFSLLLTEFLQSVALFGALLFFIGMKNSTPAKKNLKKRTPKPKAA

SEQ ID NO: 100661 - DNA, 2934 bp, Arabidopsis thaliana
  misc_feature (1)..(2934): Ceres Seq. ID no. 13605736
  misc_feature: MA Experiment ID: 20000173 Result: Up-regulated in Transcription
  misc_feature: MA Experiment 20000173 PARAMETER Experiment Name: At_42deg_Heat_P Parameter: Age (day) Value: 14
  misc_feature: MA Experiment 20000173 PARAMETER Experiment Name: At_42deg_Heat_P Parameter: Organism Value: A. thaliana
  misc_feature: MA Experiment 20000173 PARAMETER Experiment Name: At_42deg_Heat_P Parameter: Plant Line Value: WS
  misc_feature: MA Experiment 20000173 PARAMETER Experiment Name: At_42deg_Heat_P Parameter: Temperature (deg C) Value: 42 vs. 22
  misc_feature: MA Experiment 20000173 PARAMETER Experiment Name: At_42deg_Heat_P Parameter: Timepoint (hr) Value: 6
  misc_feature: MA Experiment 20000173 PARAMETER Experiment Name: At_42deg_Heat_P Parameter: Tissue Value: Aerial
  misc_feature: MA Experiment ID: 20000184 Result: Up-regulated in Transcription
  misc_feature: MA Experiment 20000184 PARAMETER Experiment Name: At_Shoots__P Parameter: Age (day) Value: 7
  misc_feature: MA Experiment 20000184 PARAMETER Experiment Name: At_Shoots__P Parameter: Tissue Value: Shoots vs. Whole Plant
  misc_feature: MA Experiment ID: 20000185 Result: Up-regulated in Transcription
  misc_feature: MA Experiment 20000185 PARAMETER Experiment Name: At_Roots__P Parameter: Age (day) Value: 7 vs. 21
  misc_feature: MA Experiment 20000185 PARAMETER Experiment Name: At_Roots__P Parameter: Organism Value: A. thaliana
  misc_feature: MA Experiment 20000185 PARAMETER Experiment Name: At_Roots__P Parameter: Tissue Value: Roots vs. Whole Plant
  misc_feature: MA Experiment ID: 20000213 Result: Up-regulated in Transcription
  misc_feature: MA Experiment 20000213 PARAMETER Experiment Name: At_4deg_Cold_P Parameter: Timepoint (hr) Value: 2
  misc_feature: MA Experiment ID: 20000234 Result: Up-regulated in Transcription
  misc_feature: MA Experiment 20000234 PARAMETER Experiment Name: At_Siliques_P Parameter: Age (day) Value: 21
  misc_feature: MA Experiment 20000234 PARAMETER Experiment Name: At_Siliques_P Parameter: Organism Value: A. thaliana
  misc_feature: MA Experiment 20000234 PARAMETER Experiment Name: At_Siliques_P Parameter: Plant Line Value: WS
  misc_feature: MA Experiment 20000234 PARAMETER Experiment Name: At_Siliques_P Parameter: Tissue Value: Less Than 5mm Siliques vs. Whole Plant
  misc_feature: MA Experiment ID: 20000264 Result: Up-regulated in Transcription
  misc_feature: MA Experiment 20000264 PARAMETER Experiment Name: At_Open_Flower_P Parameter: Age (day) Value: 21
  misc_feature: MA Experiment 20000264 PARAMETER Experiment Name: At_Open_Flower_P Parameter: Plant Line Value: WS
  misc_feature: MA Experiment 20000264 PARAMETER Experiment Name: At_Open_Flower_P Parameter: Tissue Value: Open Flower vs. Whole Plant
  misc_feature: MA Experiment ID: 20000286 Result: Up-regulated in Transcription
  misc_feature: MA Experiment 20000286 PARAMETER Experiment Name: At_Open_Flower_P Parameter: Age (day) Value: 21
  misc_feature: MA Experiment 20000286 PARAMETER Experiment Name: At_Open_Flower_P Parameter: Plant Line Value: WS
  misc_feature: MA Experiment 20000286 PARAMETER Experiment Name: At_Open_Flower_P Parameter: Tissue Value: Half Open vs. Whole Plant
  misc_feature: MA Experiment ID: 20000438 Result: Up-regulated in Transcription
  misc_feature: MA Experiment 20000438 PARAMETER Experiment Name: At_Shoots__P Parameter: Age (day) Value: 14
  misc_feature: MA Experiment 20000438 PARAMETER Experiment Name: At_Shoots__P Parameter: Tissue Value: Shoots vs. Whole Plant
  misc_feature: MA Experiment ID: 20000439 Result: Up-regulated in Transcription
  misc_feature: MA Experiment 20000439 PARAMETER Experiment Name: At_Roots__P Parameter: Age (day) Value: 14 vs. 21
  misc_feature: MA Experiment 20000439 PARAMETER Experiment Name: At_Roots__P Parameter: Organism Value: A. thaliana
  misc_feature: MA Experiment 20000439 PARAMETER Experiment Name: At_Roots__P Parameter: Tissue Value: Roots vs. Whole Plant
  misc_feature: MA Experiment ID: 20000496 Result: Up-regulated in Transcription
  misc_feature: MA Experiment 20000496 PARAMETER Experiment Name: At_Guard_Cells_P Parameter: Harvest Date Value: 7/19/2002
  misc_feature: MA Experiment 20000496 PARAMETER Experiment Name: At_Guard_Cells_P Parameter: Organism Value: Canola
  misc_feature: MA Experiment 20000496 PARAMETER Experiment Name: At_Guard_Cells_P Parameter: Tissue Value: Guard Cells vs. Leaves
  misc_feature: MA Experiment ID: 20001248 Result: Down-regulated in Transcription
  misc_feature: MA Experiment 20001248 PARAMETER Experiment Name: At_Far-red-induction_P Parameter: Age (day) Value: 7
  misc_feature: MA Experiment 20001248 PARAMETER Experiment Name: At_Far-red-induction_P Parameter: Light Value: Far-red vs. White
  misc_feature: MA Experiment 20001248 PARAMETER Experiment Name: At_Far-red-induction_P Parameter: Organism Value: A. thaliana
  misc_feature: MA Experiment 20001248 PARAMETER Experiment Name: At_Far-red-induction_P Parameter: Plant Line Value: Columbia
  misc_feature: MA Experiment 20001248 PARAMETER Experiment Name: At_Far-red-induction_P Parameter: Timepoint (hr) Value: 4
  misc_feature: MA Experiment 20001248 PARAMETER Experiment Name: At_Far-red-induction_P Parameter: Tissue Value: Whole Plant
  misc_feature: MA Experiment ID: 20001905 Result: Up-regulated in Transcription
  misc_feature: MA Experiment 20001905 PARAMETER Experiment Name: At_Drought_Reproduction_P Parameter: Age (day) Value: 40
  misc_feature: MA Experiment 20001905 PARAMETER Experiment Name: At_Drought_Reproduction_P Parameter: Organism Value: A. thaliana
  misc_feature: MA Experiment 20001905 PARAMETER Experiment Name: At_Drought_Reproduction_P Parameter: Plant Line Value: WS
  misc_feature: MA Experiment 20001905 PARAMETER Experiment Name: At_Drought_Reproduction_P Parameter: Timepoint (day) Value: 10
  misc_feature: MA Experiment 20001905 PARAMETER Experiment Name: At_Drought_Reproduction_P Parameter: Tissue Value: Rosettes
  misc_feature: MA Experiment 20001905 PARAMETER Experiment Name: At_Drought_Reproduction_P Parameter: Treatment Value: Drought vs. No Drought
  misc_feature: MA Experiment ID: 20001906 Result: Up-regulated in Transcription
  misc_feature: MA Experiment 20001906 PARAMETER Experiment Name: At_Drought_Reproduction_P Parameter: Age (day) Value: 35
  misc_feature: MA Experiment 20001906 PARAMETER Experiment Name: At_Drought_Reproduction_P Parameter: Organism Value: A. thaliana
  misc_feature: MA Experiment 20001906 PARAMETER Experiment Name: At_Drought_Reproduction_P Parameter: Plant Line Value: WS
  misc_feature: MA Experiment 20001906 PARAMETER Experiment Name: At_Drought_Reproduction_P Parameter: Timepoint (day) Value: 5
  misc_feature: MA Experiment 20001906 PARAMETER Experiment Name: At_Drought_Reproduction_P Parameter: Tissue Value: Siliques
  misc_feature: MA Experiment 20001906 PARAMETER Experiment Name: At_Drought_Reproduction_P Parameter: Treatment Value: Drought vs. No Drought
  misc_feature: MA Experiment ID: 20001911 Result: Up-regulated in Transcription
  misc_feature: MA Experiment 20001911 PARAMETER Experiment Name: At_Drought_Reproduction_P Parameter: Age (day) Value: 40
  misc_feature: MA Experiment 20001911 PARAMETER Experiment Name: At_Drought_Reproduction_P Parameter: Organism Value: A. thaliana
  misc_feature: MA Experiment 20001911 PARAMETER Experiment Name: At_Drought_Reproduction_P Parameter: Plant Line Value: WS
  misc_feature: MA Experiment 20001911 PARAMETER Experiment Name: At_Drought_Reproduction_P Parameter: Timepoint (day) Value: 10
  misc_feature: MA Experiment 20001911 PARAMETER Experiment Name: At_Drought_Reproduction_P Parameter: Tissue Value: Flowers
  misc_feature: MA Experiment 20001911 PARAMETER Experiment Name: At_Drought_Reproduction_P Parameter: Treatment Value: Drought vs. No Drought
ggcgctgtgtcgtcttcgtcttcttcttccttcttcttcttcatctctctctttcgttttctcagtaagtgaaggatttgcagaagtagatgattgaatatccatggagggtgattggtttcaggaggtatgggagatggagatgagcaaagtaaagagttaggaggagtttcgtcttcgagtcgtcgttgttcttccggtactgctggtgctgcaaatgcagaagcaagaatgaagtttgctgctgttgatgctataacagaattagtgtggtctcctagcaacggtctaagcttaagatgtgcagatatcagtttcacgggaaaggcaaaattactctctcctaacttctttgatataggactaactaacatggcgattcactcaaatagcacaagtattgaagaccaagaagatcacgtagatgtcgaattgagaaaccgagatcaagtgaaccaagcaatgattggtggttctgttgaggatatgaaacctgaaatggttgaggataaggttgaaaccaatgatgatataaagaatgaagaagcaggatgttccaaaagatcttcagatagtccgaaagctatggaaggagaaaccagagacttgttggttaatgaacagttgaggatggaaagtgctggatctcaagaagaaggggataaggcgcataatagagttgatcgtttagaatcaatggatgagaacaacctcgcaactcttgctgttgtagcatgtgaaggtaaaggggactatttgccggagggtgaggctggacctagtggttcctacaggcgtcgtgagaaagcaaaagggaaagagaaagctttatctgatgaaaactttggtggtgatggtgaagatgaggatgaggagagttttggtagtgtagaaagttgcaatagtgcgggtttgctctcaaggggaaagaaaagaccaggctttgaggagcagctgatttttggaagcaaacggctcaaaacgttaaatcaagaatgtttggggtcaacttcaaagctcaagcaagatagttccttcatgaattggatatcaaatatgactaaaggaatctggaaaggtaatgaagaagacaattctccttttgtagctcttaccaccacctcaaatgctaatggtcatggccaagtcaatgccatcgttgaccaacaacaattgagtccatgctgtgtgaaggaaaatagtggatgcagaaacaccggtttccagtcttttttccagtctatatattgtccgaagaaacaaagtcaagatgtcgtcgacatggatttcccgaatgatgttaatgctgctcctttgcaggaacttccctggattcctgaacattgcgacatttccaaaggggatgacttgtcttcatctggtaatgagattggtccagtggctgaacccaacatttcatcaggaaaagttgtatttaatcagacaagcaaaacacagtcttcagagaacaaacgtgaggacaaagagccaaacatctcgttgatgtctcttagtaagtctaagccaaatgaagagccaaaaacatgcggtgaagctgatggaaaggttagtccatgtttaaccaacagaaactctggtcttaaaagtttgtggattagtcggttttcttctaaaggttcgttccctcagaaaaaggcaagtgaaacggctaaagaggccaatgcttcagcctcagacgcagctaaaacccgtgattcacggaaaatgctggcagacaagaatgttataagacccagtatcagctcggtagatgggcccgataaaccggacactgtccttcctatagtttcgtcaatgagaatagagtcttcagaagcaatggcttctttgtttgctagaagattagaagcaatgaaaagcatcatgccctcaggttctttagctgagaatgcagaggaggaacagagggatctaatttgtttctactgcggtaaaaagggtcattgtttacgggattgtttggaagtaactgatactgagctcagagatctagtacagaacataagtgtgcggaatggaagagaagaagcgtcaagtctatgcattagatgttttcagcttagtcactgggctgcaacatgcccgaatgctcccctgtatggttcaggagctgaaggtagagctatgaagaacgctttagcttctacctctggcatgaagctgcccataagtggtttcacagacgtaccaagggcggtctttgatgctgttcaagtgcttcgcctgagccgcacagacgttctcaaatggataaacaccaagaagtctgtatcgggtctcgaagggttcttcttgcggttaaggctcgggaaatgggaagaagggcttggaggaacagggtattatgtagctcgcatagatggggacacagagggacaaagctcaaggagacattcagagaaaagcttaatttcagttaaggttaaaggtgtgacttgccttgttgagtctcagtttatctcaaaccaagactttcttgaggaggagttaaaggcctggtggcagagcgcggggaaaagtgccagaacaagcggctacgacggcatcccgtcggcggaggaacttagtcggaaaattcagcagagaaaaatgttaggcttttaggacatttgttcaagtagataaatgtttttaagttataggttttacgattacccgtgtattttttcggttgaaaaggagagtgtaaatttcttagttcagagggcatcgaatgtctcaaaccatacaacaatctaaaactggatgtccaatctatttagatttgcgagttttattcggatctttatgtctcgatgactatttattgtgattgttaagcttgtatagtctatgtgtgaaggatcaagtatcatggaagaacaaagtacattgatatcaagagagatattgtggtgtcttgctcatttttcg

SEQ ID NO: 100662 - protein, 831 aa, Arabidopsis thaliana
  peptide (1)..(831): Ceres Seq. ID no. 13605737
  misc_feature (699)..(804): Pfam Name: Plus-3 domain Pfam Description: Plus-3 domain
  misc_feature (692)..(831): Homolog of NCBI NO: 34909996 NR Description: P0490D09.22 [Oryza sativa (japonica
MGDGDEQSKELGGVSSSSRRCSSGTAGAANAEARMKFAAVDAITELVWSPSNGLSLRCADISFTGKAKLLSPNFFDIGLTNMAIHSNSTSIEDQEDHVDVELRNRDQVNQAMIGGSVEDMKPEMVEDKVETNDDIKNEEAGCSKRSSDSPKAMEGETRDLLVNEQLRMESAGSQEEGDKAHNRVDRLESMDENNLATLAVVACEGKGDYLPEGEAGPSGSYRRREKAKGKEKALSDENFGGDGEDEDEESFGSVESCNSAGLLSRGKKRPGFEEQLIFGSKRLKTLNQECLGSTSKLKQDSSFMNWISNMTKGIWKGNEEDNSPFVALTTTSNANGHGQVNAIVDQQQLSPCCVKENSGCRNTGFQSFFQSIYCPKKQSQDVVDMDFPNDVNAAPLQELPWIPEHCDISKGDDLSSSGNEIGPVAEPNISSGKVVFNQTSKTQSSENKREDKEPNISLMSLSKSKPNEEPKTCGEADGKVSPCLTNRNSGLKSLWISRFSSKGSFPQKKASETAKEANASASDAAKTRDSRKMLADKNVIRPSISSVDGPDKPDTVLPIVSSMRIESSEAMASLFARRLEAMKSIMPSGSLAENAEEEQRDLICFYCGKKGHCLRDCLEVTDTELRDLVQNISVRNGREEASSLCIRCFQLSHWAATCPNAPLYGSGAEGRAMKNALASTSGMKLPISGFTDVPRAVFDAVQVLRLSRTDVLKWINTKKSVSGLEGFFLRLRLGKWEEGLGGTGYYVARIDGDTEGQSSRRHSEKSLISVKVKGVTCLVESQFISNQDFLEEELKAWWQSAGKSARTSGYDGIPSAEELSRKIQQRKMLGF

SEQ ID NO: 100663 - protein, 797 aa, Arabidopsis thaliana
  peptide (1)..(797): Ceres Seq. ID no. 13605738
  misc_feature (665)..(770): Pfam Name: Plus-3 domain Pfam Description: Plus-3 domain
  misc_feature (658)..(797): Homolog of NCBI NO: 34909996 NR Description: P0490D09.22 [Oryza sativa (japonica
MKFAAVDAITELVWSPSNGLSLRCADISFTGKAKLLSPNFFDIGLTNMAIHSNSTSIEDQEDHVDVELRNRDQVNQAMIGGSVEDMKPEMVEDKVETNDDIKNEEAGCSKRSSDSPKAMEGETRDLLVNEQLRMESAGSQEEGDKAHNRVDRLESMDENNLATLAVVACEGKGDYLPEGEAGPSGSYRRREKAKGKEKALSDENFGGDGEDEDEESFGSVESCNSAGLLSRGKKRPGFEEQLIFGSKRLKTLNQECLGSTSKLKQDSSFMNWISNMTKGIWKGNEEDNSPFVALTTTSNANGHGQVNAIVDQQQLSPCCVKENSGCRNTGFQSFFQSIYCPKKQSQDVVDMDFPNDVNAAPLQELPWIPEHCDISKGDDLSSSGNEIGPVAEPNISSGKVVFNQTSKTQSSENKREDKEPNISLMSLSKSKPNEEPKTCGEADGKVSPCLTNRNSGLKSLWISRFSSKGSFPQKKASETAKEANASASDAAKTRDSRKMLADKNVIRPSISSVDGPDKPDTVLPIVSSMRIESSEAMASLFARRLEAMKSIMPSGSLAENAEEEQRDLICFYCGKKGHCLRDCLEVTDTELRDLVQNISVRNGREEASSLCIRCFQLSHWAATCPNAPLYGSGAEGRAMKNALASTSGMKLPISGFTDVPRAVFDAVQVLRLSRTDVLKWINTKKSVSGLEGFFLRLRLGKWEEGLGGTGYYVARIDGDTEGQSSRRHSEKSLISVKVKGVTCLVESQFISNQDFLEEELKAWWQSAGKSARTSGYDGIPSAEELSRKIQQRKMLGF

SEQ ID NO: 100664 - protein, 750 aa, Arabidopsis thaliana
  peptide (1)..(750): Ceres Seq. ID no. 13605739
  misc_feature (618)..(723): Pfam Name: Plus-3 domain Pfam Description: Plus-3 domain
  misc_feature (611)..(750): Homolog of NCBI NO: 34909996 NR Description: P0490D09.22 [Oryza sativa (japonica
MAIHSNSTSIEDQEDHVDVELRNRDQVNQAMIGGSVEDMKPEMVEDKVETNDDIKNEEAGCSKRSSDSPKAMEGETRDLLVNEQLRMESAGSQEEGDKAHNRVDRLESMDENNLATLAVVACEGKGDYLPEGEAGPSGSYRRREKAKGKEKALSDENFGGDGEDEDEESFGSVESCNSAGLLSRGKKRPGFEEQLIFGSKRLKTLNQECLGSTSKLKQDSSFMNWISNMTKGIWKGNEEDNSPFVALTTTSNANGHGQVNAIVDQQQLSPCCVKENSGCRNTGFQSFFQSIYCPKKQSQDVVDMDFPNDVNAAPLQELPWIPEHCDISKGDDLSSSGNEIGPVAEPNISSGKVVFNQTSKTQSSENKREDKEPNISLMSLSKSKPNEEPKTCGEADGKVSPCLTNRNSGLKSLWISRFSSKGSFPQKKASETAKEANASASDAAKTRDSRKMLADKNVIRPSISSVDGPDKPDTVLPIVSSMRIESSEAMASLFARRLEAMKSIMPSGSLAENAEEEQRDLICFYCGKKGHCLRDCLEVTDTELRDLVQNISVRNGREEASSLCIRCFQLSHWAATCPNAPLYGSGAEGRAMKNALASTSGMKLPISGFTDVPRAVFDAVQVLRLSRTDVLKWINTKKSVSGLEGFFLRLRLGKWEEGLGGTGYYVARIDGDTEGQSSRRHSEKSLISVKVKGVTCLVESQFISNQDFLEEELKAWWQSAGKSARTSGYDGIPSAEELSRKIQQRKMLGF

SEQ ID NO: 100665 - DNA, 1929 bp, Arabidopsis thaliana
  misc_feature (1)..(1929): Ceres Seq. ID no. 13605751
  misc_feature: MA Experiment ID: 20000437 Result: Up-regulated in Transcription
  misc_feature: MA Experiment 20000437 PARAMETER Experiment Name: At_Drought_P Parameter: Age (day) Value: 8
  misc_feature: MA Experiment 20000437 PARAMETER Experiment Name: At_Drought_P Parameter: Organism Value: A. thaliana
  misc_feature: MA Experiment 20000437 PARAMETER Experiment Name: At_Drought_P Parameter: Plant Line Value: WS
  misc_feature: MA Experiment 20000437 PARAMETER Experiment Name: At_Drought_P Parameter: Timepoint (hr) Value: 24
  misc_feature: MA Experiment 20000437 PARAMETER Experiment Name: At_Drought_P Parameter: Tissue Value: Whole Plant
  misc_feature: MA Experiment 20000437 PARAMETER Experiment Name: At_Drought_P Parameter: Treatment Value: Drought vs. No Drought
gtcactgtcgacgaccactgcgtttcacactactctctctctcgctctctccaccgttaaacttcaatacccatttgtcatttcccccaaatctctccgatttcttaaatctaatttggatttactttgcctgtaaaaccattcgcattgttacgcatccgattttgcagttcgaaactcgagttcaacttcaatttgaggtagatttcgagaaaaagctgaagaatttcggaacaactaagattttaacggtggaattggggagtcttgaagcttatttttcctcctggtctcttttttcttatgtggtggtgcttgagagggtttttgtatgatataaatgctctagatcagagaaaaggtctaacatgaagttatcaaatattccgcaacgctatgtaatagtcttcttaactttcctcagcacatgtgtgtgttacatagagcgtgttggcttctctattgcatataccgttgctgctgatgctgctgggatcaatcaatcgagtaaaggaaccatactttctacattctttgttggctatgcatgttctcaagtccctggaggttgggcagctcagaaaattgggggaaggaaagttcttcttctgtcgtttgttttatggtcatcgacgtgtttcttggttccacttgatccaaacagagtcgggcttttggttgttgcccgtttacttgttggtgttgctcaaggtttcatctttccctctatccacacagttttggctcagtgggttcctcctcatgaaaggtctagattggtttcgataacgacatcaggaatgtatttaggtgcagctttaggaatgtggcttctccctgctttagttgagcttagaggtccggaatcagttttcttagcagaggcattagcaggtgttatatggtcattgctttggattaggtacgctactgacccacctcgatctgagcatccaaaagctgctgctgctggattcggaggtgctctgttaccgactaatgtaaaccaccataaagttactcatatcccgtggaagaaaatcatgctcagtttacccgtttgggcgattgtggttaacaatttcacattccattacgctttatatgtgttgatgaactggcttccaacgtatttcgagcttggactccagatcagtcttcaggggatggattcatcaaagatggtgccatacctcaacatgtttgtattctccattgttggtgggttcatcgcagactatttgatcaccaagagaatactctcggtaaccagaacccgcaagttcttgaacacagttgggttcctaattgcttcagcggcattgatggtcttacccatgtttagaacagaaaatggtgtgatcttatgttcctcagtggctcttgggtttttggcattaggaagagccggttttgcggtgaaccatatggatattgctccaagatatgcaggaatagtgatgggagtttcaaatactgctgggacattagctggaatcattggtgttgatttgactggaaagcttcttgaagcttctaaattggtttactcagatttgtcacatccagagagctggagagttgtgttcttcatcccgggtttgctctgtatctttagctctgttgtgtttctgctgttttctactggagaaaggatctttgattgaggaaagaaaaaaagatcaaaacttttagagaaacccttatcaagattagttagtaaaagcctgaatcgaagatcgattgattcggtaattgcggaattttgtgggaaatgtcgtttttgtgtgtgtagtaaagatcttttgagtgatggttttgaaatattgtcttcaggctcattggtattctttttttggtgaataaacttgatcacaccaaagagtattattggttgatctttcaatatatactatgaataaagaatcg

SEQ ID NO: 100666 - protein, 432 aa, Arabidopsis thaliana
  peptide (1)..(432): Ceres Seq. ID no. 13605752
  misc_feature (22)..(431): Pfam Name: Sugar (and other) transporter Pfam Description: Sugar (and other) transporter
  misc_feature (1)..(432): Homolog of NCBI NO: 15241475 NR Description: transporter - related [Arabidopsis thaliana]
  misc_feature (7)..(432): Homolog of NCBI NO: 30678625 NR Description: expressed protein [Arabidopsis thaliana]
  misc_feature (7)..(432): Homolog of NCBI NO: 15227589 NR Description: inorganic phosphate transporter, putative
  misc_feature (7)..(432): Homolog of NCBI NO: 34903342 NR Description: unnamed protein product [Oryza sativa (japonica group)] >gi|6498428|dbj|BAA87831.1| unnamed protein product
  misc_feature (7)..(432): Homolog of NCBI NO: 17064976 NR Description: putative Na+-dependent inorganic phosphate
  misc_feature (49)..(429): Homolog of NCBI NO: 15811369 NR Description: vesicular glutamate transporter 2 [Mus musculus]
  misc_feature (49)..(429): Homolog of NCBI NO: 16758166 NR Description: differentation-associated Na-dependent inorganic
  misc_feature (49)..(429): Homolog of NCBI NO: 9966811 NR Description: differentiation-associated Na-dependent inorganic
  misc_feature (49)..(429): Homolog of NCBI NO: 31543717 NR Description: solute carrier family 17 (sodium-dependent phosphate cotransporter), member 6; solute carrier family 17 glutamate transporter), member 6 [Mus musculus]
  misc_feature (44)..(428): Homolog of NCBI NO: 31248034 NR Description: ENSANGP00000010934 [Anopheles gambiae]
MKLSNIPQRYVIVFLTFLSTCVCYIERVGFSIAYTVAADAAGINQSSKGTILSTFFVGYACSQVPGGWAAQKIGGRKVLLLSFVLWSSTCFLVPLDPNRVGLLVVARLLVGVAQGFIFPSIHTVLAQWVPPHERSRLVSITTSGMYLGAALGMWLLPALVELRGPESVFLAEALAGVIWSLLWIRYATDPPRSEHPKAAAAGFGGALLPTNVNHHKVTHIPWKKIMLSLPVWAIVVNNFTFHYALYVLMNWLPTYFELGLQISLQGMDSSKMVPYLNMFVFSIVGGFIADYLITKRILSVTRTRKFLNTVGFLIASAALMVLPMFRTENGVILCSSVALGFLALGRAGFAVNHMDIAPRYAGIVMGVSNTAGTLAGIIGVDLTGKLLEASKLVYSDLSHPESWRVVFFIPGLLCIFSSVVFLLFSTGERIFD

SEQ ID NO: 100667 - protein, 288 aa, Arabidopsis thaliana
  peptide (1)..(288): Ceres Seq. ID no. 13605753
  misc_feature (1)..(287): Pfam Name: Sugar (and other) transporter Pfam Description: Sugar (and other) transporter
  misc_feature (1)..(288): Homolog of NCBI NO: 15241475 NR Description: transporter - related [Arabidopsis thaliana]
  misc_feature (1)..(288): Homolog of NCBI NO: 30678625 NR Description: expressed protein [Arabidopsis thaliana]
  misc_feature (1)..(288): Homolog of NCBI NO: 15227589 NR Description: inorganic phosphate transporter, putative
  misc_feature (1)..(288): Homolog of NCBI NO: 34903342 NR Description: unnamed protein product [Oryza sativa (japonica group)] >gi|6498428|dbj|BAA87831.1| unnamed protein product
  misc_feature (1)..(288): Homolog of NCBI NO: 17064976 NR Description: putative Na+-dependent inorganic phosphate
  misc_feature (1)..(285): Homolog of NCBI NO: 15811369 NR Description: vesicular glutamate transporter 2 [Mus musculus]
  misc_feature (1)..(285): Homolog of NCBI NO: 16758166 NR Description: differentation-associated Na-dependent inorganic
  misc_feature (1)..(285): Homolog of NCBI NO: 9966811 NR Description: differentiation-associated Na-dependent inorganic
  misc_feature (1)..(285): Homolog of NCBI NO: 31543717 NR Description: solute carrier family 17 (sodium-dependent phosphate cotransporter), member 6; solute carrier family 17 glutamate transporter), member 6 [Mus musculus]
  misc_feature (1)..(284): Homolog of NCBI NO: 31248034 NR Description: ENSANGP00000010934 [Anopheles gambiae]
MYLGAALGMWLLPALVELRGPESVFLAEALAGVIWSLLWIRYATDPPRSEHPKAAAAGFGGALLPTNVNHHKVTHIPWKKIMLSLPVWAIVVNNFTFHYALYVLMNWLPTYFELGLQISLQGMDSSKMVPYLNMFVFSIVGGFIADYLITKRILSVTRTRKFLNTVGFLIASAALMVLPMFRTENGVILCSSVALGFLALGRAGFAVNHMDIAPRYAGIVMGVSNTAGTLAGIIGVDLTGKLLEASKLVYSDLSHPESWRVVFFIPGLLCIFSSVVFLLFSTGERIFD

SEQ ID NO: 100668 - protein, 280 aa, Arabidopsis thaliana
  peptide (1)..(280): Ceres Seq. ID no. 13605754
  misc_feature (1)..(279): Pfam Name: Sugar (and other) transporter Pfam Description: Sugar (and other) transporter
  misc_feature (1)..(280): Homolog of NCBI NO: 15241475 NR Description: transporter - related [Arabidopsis thaliana]
  misc_feature (1)..(280): Homolog of NCBI NO: 30678625 NR Description: expressed protein [Arabidopsis thaliana]
  misc_feature (1)..(280): Homolog of NCBI NO: 15227589 NR Description: inorganic phosphate transporter, putative
  misc_feature (1)..(280): Homolog of NCBI NO: 34903342 NR Description: unnamed protein product [Oryza sativa (japonica group)] >gi|6498428|dbj|BAA87831.1| unnamed protein product
  misc_feature (1)..(280): Homolog of NCBI NO: 17064976 NR Description: putative Na+-dependent inorganic phosphate
  misc_feature (1)..(277): Homolog of NCBI NO: 15811369 NR Description: vesicular glutamate transporter 2 [Mus musculus]
  misc_feature (1)..(277): Homolog of NCBI NO: 16758166 NR Description: differentation-associated Na-dependent inorganic
  misc_feature (1)..(277): Homolog of NCBI NO: 9966811 NR Description: differentiation-associated Na-dependent inorganic
  misc_feature (1)..(277): Homolog of NCBI NO: 31543717 NR Description: solute carrier family 17 (sodium-dependent phosphate cotransporter), member 6; solute carrier family 17 glutamate transporter), member 6 [Mus musculus]
  misc_feature (1)..(276): Homolog of NCBI NO: 31248034 NR Description: ENSANGP00000010934 [Anopheles gambiae]
MWLLPALVELRGPESVFLAEALAGVIWSLLWIRYATDPPRSEHPKAAAAGFGGALLPTNVNHHKVTHIPWKKIMLSLPVWAIVVNNFTFHYALYVLMNWLPTYFELGLQISLQGMDSSKMVPYLNMFVFSIVGGFIADYLITKRILSVTRTRKFLNTVGFLIASAALMVLPMFRTENGVILCSSVALGFLALGRAGFAVNHMDIAPRYAGIVMGVSNTAGTLAGIIGVDLTGKLLEASKLVYSDLSHPESWRVVFFIPGLLCIFSSVVFLLFSTGERIFD

SEQ ID NO: 100669 - DNA, 1756 bp, Arabidopsis thaliana
  misc_feature (1)..(1756): Ceres Seq. ID no. 13605755
  misc_feature: MA Experiment ID: 20000171 Result: Down-regulated in Transcription
  misc_feature: MA Experiment 20000171 PARAMETER Experiment Name: At_42deg_Heat_P Parameter: Age (day) Value: 14
  misc_feature: MA Experiment 20000171 PARAMETER Experiment Name: At_42deg_Heat_P Parameter: Organism Value: A. thaliana
  misc_feature: MA Experiment 20000171 PARAMETER Experiment Name: At_42deg_Heat_P Parameter: Plant Line Value: WS
  misc_feature: MA Experiment 20000171 PARAMETER Experiment Name: At_42deg_Heat_P Parameter: Temperature (deg C) Value: 42 vs. 22
  misc_feature: MA Experiment 20000171 PARAMETER Experiment Name: At_42deg_Heat_P Parameter: Timepoint (hr) Value: 1
  misc_feature: MA Experiment 20000171 PARAMETER Experiment Name: At_42deg_Heat_P Parameter: Tissue Value: Aerial
  misc_feature: MA Experiment ID: 20000180 Result: Up-regulated in Transcription
  misc_feature: MA Experiment 20000180 PARAMETER Experiment Name: At_Germinating_Seeds_P Parameter: Age (hr) Value: 24 vs. 0
  misc_feature: MA Experiment 20000180 PARAMETER Experiment Name: At_Germinating_Seeds_P Parameter: Tissue Value: Germinating Seeds
  misc_feature: MA Experiment ID: 20000184 Result: Up-regulated in Transcription
  misc_feature: MA Experiment 20000184 PARAMETER Experiment Name: At_Shoots__P Parameter: Age (day) Value: 7
  misc_feature: MA Experiment 20000184 PARAMETER Experiment Name: At_Shoots__P Parameter: Tissue Value: Shoots vs. Whole Plant
  misc_feature: MA Experiment ID: 20000265 Result: Down-regulated in Transcription
  misc_feature: MA Experiment 20000265 PARAMETER Experiment Name: At_Open_Flower_P Parameter: Age (day) Value: 21
  misc_feature: MA Experiment 20000265 PARAMETER Experiment Name: At_Open_Flower_P Parameter: Plant Line Value: WS
  misc_feature: MA Experiment 20000265 PARAMETER Experiment Name: At_Open_Flower_P Parameter: Tissue Value: Closed Flower vs. Whole Plant
  misc_feature: MA Experiment ID: 20000439 Result: Up-regulated in Transcription
  misc_feature: MA Experiment 20000439 PARAMETER Experiment Name: At_Roots__P Parameter: Age (day) Value: 14 vs. 21
  misc_feature: MA Experiment 20000439 PARAMETER Experiment Name: At_Roots__P Parameter: Organism Value: A. thaliana
  misc_feature: MA Experiment 20000439 PARAMETER Experiment Name: At_Roots__P Parameter: Tissue Value: Roots vs. Whole Plant
  misc_feature: MA Experiment ID: 20000451 Result: Up-regulated in Transcription
  misc_feature: MA Experiment 20000451 PARAMETER Experiment Name: At_CS6879_Shoots-Roots_P Parameter: Age (day) Value: 14
  misc_feature: MA Experiment 20000451 PARAMETER Experiment Name: At_CS6879_Shoots-Roots_P Parameter: Organism Value: A. thaliana
  misc_feature: MA Experiment 20000451 PARAMETER Experiment Name: At_CS6879_Shoots-Roots_P Parameter: Plant Line Value: CS6879 vs. WS
  misc_feature: MA Experiment 20000451 PARAMETER Experiment Name: At_CS6879_Shoots-Roots_P Parameter: Tissue Value: Roots
  misc_feature: MA Experiment ID: 20000452 Result: Up-regulated in Transcription
  misc_feature: MA Experiment 20000452 PARAMETER Experiment Name: At_CS6879_Shoots-Roots_P Parameter: Age (day) Value: 14
  misc_feature: MA Experiment 20000452 PARAMETER Experiment Name: At_CS6879_Shoots-Roots_P Parameter: Organism Value: A. thaliana
  misc_feature: MA Experiment 20000452 PARAMETER Experiment Name: At_CS6879_Shoots-Roots_P Parameter: Plant Line Value: CS6879 vs. WS
  misc_feature: MA Experiment 20000452 PARAMETER Experiment Name: At_CS6879_Shoots-Roots_P Parameter: Tissue Value: Shoots
  misc_feature: MA Experiment ID: 20000794 Result: Down-regulated in Transcription
  misc_feature: MA Experiment 20000794 PARAMETER Experiment Name: At_Petals_P Parameter: Age (day) Value: 23-25 days
  misc_feature: MA Experiment 20000794 PARAMETER Experiment Name: At_Petals_P Parameter: Plant Line Value: WS
  misc_feature: MA Experiment 20000794 PARAMETER Experiment Name: At_Petals_P Parameter: Tissue Value: Petals vs. Whole plant
  misc_feature: MA Experiment ID: 20001248 Result: Up-regulated in Transcription
  misc_feature: MA Experiment 20001248 PARAMETER Experiment Name: At_Far-red-induction_P Parameter: Age (day) Value: 7
  misc_feature: MA Experiment 20001248 PARAMETER Experiment Name: At_Far-red-induction_P Parameter: Light Value: Far-red vs. White
  misc_feature: MA Experiment 20001248 PARAMETER Experiment Name: At_Far-red-induction_P Parameter: Organism Value: A. thaliana
  misc_feature: MA Experiment 20001248 PARAMETER Experiment Name: At_Far-red-induction_P Parameter: Plant Line Value: Columbia
  misc_feature: MA Experiment 20001248 PARAMETER Experiment Name: At_Far-red-induction_P Parameter: Timepoint (hr) Value: 4
  misc_feature: MA Experiment 20001248 PARAMETER Experiment Name: At_Far-red-induction_P Parameter: Tissue Value: Whole Plant
  misc_feature: MA Experiment ID: 20001450 Result: Up-regulated in Transcription
  misc_feature: MA Experiment 20001450 PARAMETER Experiment Name: At_Far-red-induction_P Parameter: Age (day) Value: 7
  misc_feature: MA Experiment 20001450 PARAMETER Experiment Name: At_Far-red-induction_P Parameter: Light Value: Far-red vs. White
  misc_feature: MA Experiment 20001450 PARAMETER Experiment Name: At_Far-red-induction_P Parameter: Organism Value: A. thaliana
  misc_feature: MA Experiment 20001450 PARAMETER Experiment Name: At_Far-red-induction_P Parameter: Plant Line Value: Columbia
  misc_feature: MA Experiment 20001450 PARAMETER Experiment Name: At_Far-red-induction_P Parameter: Timepoint (hr) Value: 8
  misc_feature: MA Experiment 20001450 PARAMETER Experiment Name: At_Far-red-induction_P Parameter: Tissue Value: Whole Plant
  misc_feature: MA Experiment ID: 20001451 Result: Up-regulated in Transcription
  misc_feature: MA Experiment 20001451 PARAMETER Experiment Name: At_Far-red-induction_P Parameter: Age (day) Value: 7
  misc_feature: MA Experiment 20001451 PARAMETER Experiment Name: At_Far-red-induction_P Parameter: Light Value: Far-red vs. White
  misc_feature: MA Experiment 20001451 PARAMETER Experiment Name: At_Far-red-induction_P Parameter: Organism Value: A. thaliana
  misc_feature: MA Experiment 20001451 PARAMETER Experiment Name: At_Far-red-induction_P Parameter: Plant Line Value: Columbia
  misc_feature: MA Experiment 20001451 PARAMETER Experiment Name: At_Far-red-induction_P Parameter: Timepoint (hr) Value: 24
  misc_feature: MA Experiment 20001451 PARAMETER Experiment Name: At_Far-red-induction_P Parameter: Tissue Value: Whole Plant
  misc_feature: MA Experiment ID: 20001554 Result: Up-regulated in Transcription
  misc_feature: MA Experiment 20001554 PARAMETER Experiment Name: At_Drought_Soil_Dry_P Parameter: Age (day) Value: 21
  misc_feature: MA Experiment 20001554 PARAMETER Experiment Name: At_Drought_Soil_Dry_P Parameter: Organism Value: A. thaliana
  misc_feature: MA Experiment 20001554 PARAMETER Experiment Name: At_Drought_Soil_Dry_P Parameter: Plant Line Value: WS
  misc_feature: MA Experiment 20001554 PARAMETER Experiment Name: At_Drought_Soil_Dry_P Parameter: Post Timepoint (hr) Value: None
  misc_feature: MA Experiment 20001554 PARAMETER Experiment Name: At_Drought_Soil_Dry_P Parameter: Post-Treatment Value: None
  misc_feature: MA Experiment 20001554 PARAMETER Experiment Name: At_Drought_Soil_Dry_P Parameter: Timepoint (day) Value: 7
  misc_feature: MA Experiment 20001554 PARAMETER Experiment Name: At_Drought_Soil_Dry_P Parameter: Treatment Value: Drought vs. No Drought
  misc_feature: MA Experiment ID: 20001558 Result: Down-regulated in Transcription
  misc_feature: MA Experiment 20001558 PARAMETER Experiment Name: At_Drought_Soil_Dry_P Parameter: Age (day) Value: 27
  misc_feature: MA Experiment 20001558 PARAMETER Experiment Name: At_Drought_Soil_Dry_P Parameter: Organism Value: A. thaliana
  misc_feature: MA Experiment 20001558 PARAMETER Experiment Name: At_Drought_Soil_Dry_P Parameter: Plant Line Value: WS
  misc_feature: MA Experiment 20001558 PARAMETER Experiment Name: At_Drought_Soil_Dry_P Parameter: Post Timepoint (hr) Value: 6
  misc_feature: MA Experiment 20001558 PARAMETER Experiment Name: At_Drought_Soil_Dry_P Parameter: Post-Treatment Value: Re-Water vs. No Drought
  misc_feature: MA Experiment 20001558 PARAMETER Experiment Name: At_Drought_Soil_Dry_P Parameter: Timepoint (day) Value: 13
  misc_feature: MA Experiment 20001558 PARAMETER Experiment Name: At_Drought_Soil_Dry_P Parameter: Treatment Value: Drought vs. No Drought
  misc_feature: MA Experiment ID: 20001560 Result: Down-regulated in Transcription
  misc_feature: MA Experiment 20001560 PARAMETER Experiment Name: At_Drought_Soil_Dry_P Parameter: Age (day) Value: 28
  misc_feature: MA Experiment 20001560 PARAMETER Experiment Name: At_Drought_Soil_Dry_P Parameter: Organism Value: A. thaliana
  misc_feature: MA Experiment 20001560 PARAMETER Experiment Name: At_Drought_Soil_Dry_P Parameter: Plant Line Value: WS
  misc_feature: MA Experiment 20001560 PARAMETER Experiment Name: At_Drought_Soil_Dry_P Parameter: Post Timepoint (hr) Value: None
  misc_feature: MA Experiment 20001560 PARAMETER Experiment Name: At_Drought_Soil_Dry_P Parameter: Post-Treatment Value: None
  misc_feature: MA Experiment 20001560 PARAMETER Experiment Name: At_Drought_Soil_Dry_P Parameter: Timepoint (day) Value: 14
  misc_feature: MA Experiment 20001560 PARAMETER Experiment Name: At_Drought_Soil_Dry_P Parameter: Treatment Value: Drought vs. No Drought
  misc_feature: MA Experiment ID: 20001771 Result: Up-regulated in Transcription
  misc_feature: MA Experiment 20001771 PARAMETER Experiment Name: At_Far-red-enriched-adult_P Parameter: Age (day) Value: 28
  misc_feature: MA Experiment 20001771 PARAMETER Experiment Name: At_Far-red-enriched-adult_P Parameter: Light Value: Far-red enriched vs. White
  misc_feature: MA Experiment 20001771 PARAMETER Experiment Name: At_Far-red-enriched-adult_P Parameter: Organism Value: A. thaliana
  misc_feature: MA Experiment 20001771 PARAMETER Experiment Name: At_Far-red-enriched-adult_P Parameter: Plant Line Value: Columbia
  misc_feature: MA Experiment 20001771 PARAMETER Experiment Name: At_Far-red-enriched-adult_P Parameter: Timepoint (hr) Value: 16
  misc_feature: MA Experiment 20001771 PARAMETER Experiment Name: At_Far-red-enriched-adult_P Parameter: Tissue Value: Aerial
  misc_feature: MA Experiment ID: 20001907 Result: Down-regulated in Transcription
  misc_feature: MA Experiment 20001907 PARAMETER Experiment Name: At_Drought_Reproduction_P Parameter: Age (day) Value: 37
  misc_feature: MA Experiment 20001907 PARAMETER Experiment Name: At_Drought_Reproduction_P Parameter: Organism Value: A. thaliana
  misc_feature: MA Experiment 20001907 PARAMETER Experiment Name: At_Drought_Reproduction_P Parameter: Plant Line Value: WS
  misc_feature: MA Experiment 20001907 PARAMETER Experiment Name: At_Drought_Reproduction_P Parameter: Timepoint (day) Value: 7
  misc_feature: MA Experiment 20001907 PARAMETER Experiment Name: At_Drought_Reproduction_P Parameter: Tissue Value: Siliques
  misc_feature: MA Experiment 20001907 PARAMETER Experiment Name: At_Drought_Reproduction_P Parameter: Treatment Value: Drought vs. No Drought
taccacctatcttagaaatggagttctcaagctttttgtttactattttactcttttcactgaatatttctcctcttgtttcagctcatggctccaaccatgaagactttcttaagtgtctttcttaccgaatgaacgacaacaccgtcgaacccaaagtcatacacacttccaaagactcttcctttttttccatattggattcttcgatacaaaatccaagattctcggtttccgaaacacctaaaccggtctcaatcatcactcccgttaaagccagtgacgttcaaactgtgatcagatgcgcacagctgcatggaattcatgtaaggactcggagcgccggtcactgctacgaaggtctctcttacattgcgtacaacaaaccattcgctgtcatcgatttaaggaatcttcggtctatatcattagacgttgataaccggacaggttgggtccaaaccggagcaacggctggggaattgtattatgagattgggaaaaccaccaaatctcttgctttcccggccggtattcacccaaccgttggtgtaggcggacaatttagcggtggtggttatggcacattgctaaggaaatacggtttagctgcggataacataatcgatgcacttgtggttgacgcgagtgggaggattcttgaccgacaagcaatgggcgaggattacttttgggctattcgtggagggggcggatcaagcttcggtgttatactatcgtggaaggttaaattagtcgatgttccatccacaattaccgtgtttaaagtccagaaaacatcgaagaaagaggccgttaggatcatcaagaaatggcaatatgctgcagataaggttcctgatgatcttttcattaggacaacattggagagatcaaacaagaacgcagtacacgctttgttcactggactatatattggtccggtgaacaatctattggcgttgatggaagaaaagtttccggaactaggtcttgagaaagaaggttgtgaagagatgagttggattgagtctgtactctggtttgctgatttccctaaaggagaatctcttggtgttctcacgaatcgtgagcgtacatctctatctttcaaaggcaaagatgattttgtccaagaaccgatacccgaggctgcaattcaagagatatggaggcgattagaagcccccgaggctcggcttggaaagatcatattaactccatttggtgggaaaatgagtgaaatggcagagtacgaaacaccattcccacatcgaggagggaatctctatgagattcagtatgtggcttactggagagaagaggaagacaagaacaagacggagacagataaatatctgaaatgggtcgatagcgtttacgaatttatgactccatatgtttcgaaatctccaagaggagcttatgtcaatttcaaggatatggatttgggtatgtatcttggaaagaagaagacaaagtacgaggaaggaaagagttggggagtgaagtatttcaagaacaatttcgagagattggtgagagtgaagactagggttgatccaacagatttcttctgcgatgaacagagcattcctctggtgaacaaagttacctgaagatatcatttgaagttttttattagtcccttttctctgtgaaatcatctgtgcgtgttgaatattatgcgtcaagtgtgtaacttatgtgtgtgattgtgaattgtgatatgtgtgttgaataaacttttcatgtt

SEQ ID NO: 100670 - protein, 538 aa, Arabidopsis thaliana
  peptide (1)..(538): Ceres Seq. ID no. 13605756
  misc_feature (83)..(239): Pfam Name: FAD binding domain Pfam Description: FAD binding domain
  misc_feature (6)..(538): Homolog of NCBI NO: 15241498 NR Description: FAD-linked oxidoreductase family [Arabidopsis
  misc_feature (44)..(538): Homolog of NCBI NO: 28058799 NR Description: berberine bridge enzyme-like protein [Arabidopsis
  misc_feature (3)..(537): Homolog of NCBI NO: 15241495 NR Description: FAD-linked oxidoreductase family [Arabidopsis
  misc_feature (6)..(532): Homolog of NCBI NO: 15233411 NR Description: FAD-linked oxidoreductase family [Arabidopsis
  misc_feature (16)..(536): Homolog of NCBI NO: 13161397 NR Description: CPRD2 [Vigna unguiculata]
  misc_feature (11)..(532): Homolog of NCBI NO: 26005814 NR Description: tetrahydrocannabinolic acid synthase precursor
  misc_feature (12)..(534): Homolog of NCBI NO: 15221473 NR Description: FAD-linked oxidoreductase family [Arabidopsis
  misc_feature (118)..(532): Homolog of NCBI NO: 30315245 NR Description: nectarin 5 [Nicotiana langsdorffii x Nicotiana
  misc_feature (8)..(535): Homolog of NCBI NO: 18652398 NR Description: carbohydrate oxidase [Lactuca sativa]
  misc_feature (11)..(532): Homolog of NCBI NO: 15233424 NR Description: FAD-linked oxidoreductase family [Arabidopsis
PPILEMEFSSFLFTILLFSLNISPLVSAHGSNHEDFLKCLSYRMNDNTVEPKVIHTSKDSSFFSILDSSIQNPRFSVSETPKPVSIITPVKASDVQTVIRCAQLHGIHVRTRSAGHCYEGLSYIAYNKPFAVIDLRNLRSISLDVDNRTGWVQTGATAGELYYEIGKTTKSLAFPAGIHPTVGVGGQFSGGGYGTLLRKYGLAADNIIDALVVDASGRILDRQAMGEDYFWAIRGGGGSSFGVILSWKVKLVDVPSTITVFKVQKTSKKEAVRIIKKWQYAADKVPDDLFIRTTLERSNKNAVHALFTGLYIGPVNNLLALMEEKFPELGLEKEGCEEMSWIESVLWFADFPKGESLGVLTNRERTSLSFKGKDDFVQEPIPEAAIQEIWRRLEAPEARLGKIILTPFGGKMSEMAEYETPFPHRGGNLYEIQYVAYWREEEDKNKTETDKYLKWVDSVYEFMTPYVSKSPRGAYVNFKDMDLGMYLGKKKTKYEEGKSWGVKYFKNNFERLVRVKTRVDPTDFFCDEQSIPLVNKVT

SEQ ID NO: 100671 - protein, 533 aa, Arabidopsis thaliana
  peptide (1)..(533): Ceres Seq. ID no. 13605757
  misc_feature (78)..(234): Pfam Name: FAD binding domain Pfam Description: FAD binding domain
  misc_feature (1)..(533): Homolog of NCBI NO: 15241498 NR Description: FAD-linked oxidoreductase family [Arabidopsis
  misc_feature (39)..(533): Homolog of NCBI NO: 28058799 NR Description: berberine bridge enzyme-like protein [Arabidopsis
  misc_feature (1)..(532): Homolog of NCBI NO: 15241495 NR Description: FAD-linked oxidoreductase family [Arabidopsis
  misc_feature (1)..(527): Homolog of NCBI NO: 15233411 NR Description: FAD-linked oxidoreductase family [Arabidopsis
  misc_feature (11)..(531): Homolog of NCBI NO: 13161397 NR Description: CPRD2 [Vigna unguiculata]
  misc_feature (6)..(527): Homolog of NCBI NO: 26005814 NR Description: tetrahydrocannabinolic acid synthase precursor
  misc_feature (7)..(529): Homolog of NCBI NO: 15221473 NR Description: FAD-linked oxidoreductase family [Arabidopsis
  misc_feature (113)..(527): Homolog of NCBI NO: 30315245 NR Description: nectarin 5 [Nicotiana langsdorffii x Nicotiana
  misc_feature (3)..(530): Homolog of NCBI NO: 18652398 NR Description: carbohydrate oxidase [Lactuca sativa]
  misc_feature (6)..(527): Homolog of NCBI NO: 15233424 NR Description: FAD-linked oxidoreductase family [Arabidopsis
MEFSSFLFTILLFSLNISPLVSAHGSNHEDFLKCLSYRMNDNTVEPKVIHTSKDSSFFSILDSSIQNPRFSVSETPKPVSIITPVKASDVQTVIRCAQLHGIHVRTRSAGHCYEGLSYIAYNKPFAVIDLRNLRSISLDVDNRTGWVQTGATAGELYYEIGKTTKSLAFPAGIHPTVGVGGQFSGGGYGTLLRKYGLAADNIIDALVVDASGRILDRQAMGEDYFWAIRGGGGSSFGVILSWKVKLVDVPSTITVFKVQKTSKKEAVRIIKKWQYAADKVPDDLFIRTTLERSNKNAVHALFTGLYIGPVNNLLALMEEKFPELGLEKEGCEEMSWIESVLWFADFPKGESLGVLTNRERTSLSFKGKDDFVQEPIPEAAIQEIWRRLEAPEARLGKIILTPFGGKMSEMAEYETPFPHRGGNLYEIQYVAYWREEEDKNKTETDKYLKWVDSVYEFMTPYVSKSPRGAYVNFKDMDLGMYLGKKKTKYEEGKSWGVKYFKNNFERLVRVKTRVDPTDFFCDEQSIPLVNKVT

SEQ ID NO: 100672 - protein, 495 aa, Arabidopsis thaliana
  peptide (1)..(495): Ceres Seq. ID no. 13605758
  misc_feature (40)..(196): Pfam Name: FAD binding domain Pfam Description: FAD binding domain
  misc_feature (1)..(495): Homolog of NCBI NO: 15241498 NR Description: FAD-linked oxidoreductase family [Arabidopsis
  misc_feature (1)..(495): Homolog of NCBI NO: 28058799 NR Description: berberine bridge enzyme-like protein [Arabidopsis
  misc_feature (1)..(494): Homolog of NCBI NO: 15241495 NR Description: FAD-linked oxidoreductase family [Arabidopsis
  misc_feature (1)..(489): Homolog of NCBI NO: 15233411 NR Description: FAD-linked oxidoreductase family [Arabidopsis
  misc_feature (1)..(493): Homolog of NCBI NO: 13161397 NR Description: CPRD2 [Vigna unguiculata]
  misc_feature (1)..(489): Homolog of NCBI NO: 26005814 NR Description: tetrahydrocannabinolic acid synthase precursor
  misc_feature (1)..(491): Homolog of NCBI NO: 15221473 NR Description: FAD-linked oxidoreductase family [Arabidopsis
  misc_feature (75)..(489): Homolog of NCBI NO: 30315245 NR Description: nectarin 5 [Nicotiana langsdorffii x Nicotiana
  misc_feature (1)..(492): Homolog of NCBI NO: 18652398 NR Description: carbohydrate oxidase [Lactuca sativa]
  misc_feature (1)..(489): Homolog of NCBI NO: 15233424 NR Description: FAD-linked oxidoreductase family [Arabidopsis
MNDNTVEPKVIHTSKDSSFFSILDSSIQNPRFSVSETPKPVSIITPVKASDVQTVIRCAQLHGIHVRTRSAGHCYEGLSYIAYNKPFAVIDLRNLRSISLDVDNRTGWVQTGATAGELYYEIGKTTKSLAFPAGIHPTVGVGGQFSGGGYGTLLRKYGLAADNIIDALVVDASGRILDRQAMGEDYFWAIRGGGGSSFGVILSWKVKLVDVPSTITVFKVQKTSKKEAVRIIKKWQYAADKVPDDLFIRTTLERSNKNAVHALFTGLYIGPVNNLLALMEEKFPELGLEKEGCEEMSWIESVLWFADFPKGESLGVLTNRERTSLSFKGKDDFVQEPIPEAAIQEIWRRLEAPEARLGKIILTPFGGKMSEMAEYETPFPHRGGNLYEIQYVAYWREEEDKNKTETDKYLKWVDSVYEFMTPYVSKSPRGAYVNFKDMDLGMYLGKKKTKYEEGKSWGVKYFKNNFERLVRVKTRVDPTDFFCDEQSIPLVNKVT

SEQ ID NO: 100673 - DNA, 4585 bp, Arabidopsis thaliana
  misc_feature (1)..(4585): Ceres Seq. ID no. 13605763
  misc_feature: MA Experiment ID: 20000173 Result: Down-regulated in Transcription
  misc_feature: MA Experiment 20000173 PARAMETER Experiment Name: At_42deg_Heat_P Parameter: Age (day) Value: 14
  misc_feature: MA Experiment 20000173 PARAMETER Experiment Name: At_42deg_Heat_P Parameter: Organism Value: A. thaliana
  misc_feature: MA Experiment 20000173 PARAMETER Experiment Name: At_42deg_Heat_P Parameter: Plant Line Value: WS
  misc_feature: MA Experiment 20000173 PARAMETER Experiment Name: At_42deg_Heat_P Parameter: Temperature (deg C) Value: 42 vs. 22
  misc_feature: MA Experiment 20000173 PARAMETER Experiment Name: At_42deg_Heat_P Parameter: Timepoint (hr) Value: 6
  misc_feature: MA Experiment 20000173 PARAMETER Experiment Name: At_42deg_Heat_P Parameter: Tissue Value: Aerial
  misc_feature: MA Experiment ID: 20000180 Result: Up-regulated in Transcription
  misc_feature: MA Experiment 20000180 PARAMETER Experiment Name: At_Germinating_Seeds_P Parameter: Age (hr) Value: 24 vs. 0
  misc_feature: MA Experiment 20000180 PARAMETER Experiment Name: At_Germinating_Seeds_P Parameter: Tissue Value: Germinating Seeds
  misc_feature: MA Experiment ID: 20000182 Result: Down-regulated in Transcription
  misc_feature: MA Experiment 20000182 PARAMETER Experiment Name: At_2mM_SA_P Parameter: Age (day) Value: 14
  misc_feature: MA Experiment 20000182 PARAMETER Experiment Name: At_2mM_SA_P Parameter: Organism Value: A. thaliana
  misc_feature: MA Experiment 20000182 PARAMETER Experiment Name: At_2mM_SA_P Parameter: Plant Line Value: WS
  misc_feature: MA Experiment 20000182 PARAMETER Experiment Name: At_2mM_SA_P Parameter: Timepoint (hr) Value: 6
  misc_feature: MA Experiment 20000182 PARAMETER Experiment Name: At_2mM_SA_P Parameter: Tissue Value: Aerial
  misc_feature: MA Experiment 20000182 PARAMETER Experiment Name: At_2mM_SA_P Parameter: Treatment Value: 2mM SA vs. No Treatment
  misc_feature: MA Experiment ID: 20000185 Result: Down-regulated in Transcription
  misc_feature: MA Experiment 20000185 PARAMETER Experiment Name: At_Roots__P Parameter: Age (day) Value: 7 vs. 21
  misc_feature: MA Experiment 20000185 PARAMETER Experiment Name: At_Roots__P Parameter: Organism Value: A. thaliana
  misc_feature: MA Experiment 20000185 PARAMETER Experiment Name: At_Roots__P Parameter: Tissue Value: Roots vs. Whole Plant
  misc_feature: MA Experiment ID: 20000227 Result: Down-regulated in Transcription
  misc_feature: MA Experiment 20000227 PARAMETER Experiment Name: At_Root-Tips-vs-Tops_P Parameter: Tissue Value: Root Tips vs. Root Tops
  misc_feature: MA Experiment ID: 20000234 Result: Up-regulated in Transcription
  misc_feature: MA Experiment 20000234 PARAMETER Experiment Name: At_Siliques_P Parameter: Age (day) Value: 21
  misc_feature: MA Experiment 20000234 PARAMETER Experiment Name: At_Siliques_P Parameter: Organism Value: A. thaliana
  misc_feature: MA Experiment 20000234 PARAMETER Experiment Name: At_Siliques_P Parameter: Plant Line Value: WS
  misc_feature: MA Experiment 20000234 PARAMETER Experiment Name: At_Siliques_P Parameter: Tissue Value: Less Than 5mm Siliques vs. Whole Plant
  misc_feature: MA Experiment ID: 20000235 Result: Up-regulated in Transcription
  misc_feature: MA Experiment 20000235 PARAMETER Experiment Name: At_Siliques_P Parameter: Age (day) Value: 21
  misc_feature: MA Experiment 20000235 PARAMETER Experiment Name: At_Siliques_P Parameter: Organism Value: A. thaliana
  misc_feature: MA Experiment 20000235 PARAMETER Experiment Name: At_Siliques_P Parameter: Plant Line Value: WS
  misc_feature: MA Experiment 20000235 PARAMETER Experiment Name: At_Siliques_P Parameter: Tissue Value: 5-10mm Siliques vs. Whole Plant
  misc_feature: MA Experiment ID: 20000265 Result: Up-regulated in Transcription
  misc_feature: MA Experiment 20000265 PARAMETER Experiment Name: At_Open_Flower_P Parameter: Age (day) Value: 21
  misc_feature: MA Experiment 20000265 PARAMETER Experiment Name: At_Open_Flower_P Parameter: Plant Line Value: WS
  misc_feature: MA Experiment 20000265 PARAMETER Experiment Name: At_Open_Flower_P Parameter: Tissue Value: Closed Flower vs. Whole Plant
  misc_feature: MA Experiment ID: 20000436 Result: Down-regulated in Transcription
  misc_feature: MA Experiment 20000436 PARAMETER Experiment Name: At_Drought_P Parameter: Age (day) Value: 7
  misc_feature: MA Experiment 20000436 PARAMETER Experiment Name: At_Drought_P Parameter: Organism Value: A. thaliana
  misc_feature: MA Experiment 20000436 PARAMETER Experiment Name: At_Drought_P Parameter: Plant Line Value: WS
  misc_feature: MA Experiment 20000436 PARAMETER Experiment Name: At_Drought_P Parameter: Timepoint (hr) Value: 12
  misc_feature: MA Experiment 20000436 PARAMETER Experiment Name: At_Drought_P Parameter: Tissue Value: Whole Plant
  misc_feature: MA Experiment 20000436 PARAMETER Experiment Name: At_Drought_P Parameter: Treatment Value: Drought vs. No Drought
  misc_feature: MA Experiment ID: 20000439 Result: Down-regulated in Transcription
  misc_feature: MA Experiment 20000439 PARAMETER Experiment Name: At_Roots__P Parameter: Age (day) Value: 14 vs. 21
  misc_feature: MA Experiment 20000439 PARAMETER Experiment Name: At_Roots__P Parameter: Organism Value: A. thaliana
  misc_feature: MA Experiment 20000439 PARAMETER Experiment Name: At_Roots__P Parameter: Tissue Value: Roots vs. Whole Plant
  misc_feature: MA Experiment ID: 20000451 Result: Down-regulated in Transcription
  misc_feature: MA Experiment 20000451 PARAMETER Experiment Name: At_CS6879_Shoots-Roots_P Parameter: Age (day) Value: 14
  misc_feature: MA Experiment 20000451 PARAMETER Experiment Name: At_CS6879_Shoots-Roots_P Parameter: Organism Value: A. thaliana
  misc_feature: MA Experiment 20000451 PARAMETER Experiment Name: At_CS6879_Shoots-Roots_P Parameter: Plant Line Value: CS6879 vs. WS
  misc_feature: MA Experiment 20000451 PARAMETER Experiment Name: At_CS6879_Shoots-Roots_P Parameter: Tissue Value: Roots
  misc_feature: MA Experiment ID: 20000573 Result: Up-regulated in Transcription
  misc_feature: MA Experiment 20000573 PARAMETER Experiment Name: At_100uM_ABA_Mutants__P Parameter: Organism Value: A. thaliana
  misc_feature: MA Experiment 20000573 PARAMETER Experiment Name: At_100uM_ABA_Mutants__P Parameter: Plant Line Value: CS22 vs. Ler wt
  misc_feature: MA Experiment 20000573 PARAMETER Experiment Name: At_100uM_ABA_Mutants__P Parameter: Timepoint (hr) Value: N/A
  misc_feature: MA Experiment 20000573 PARAMETER Experiment Name: At_100uM_ABA_Mutants__P Parameter: Tissue Value: Whole Plant
  misc_feature: MA Experiment 20000573 PARAMETER Experiment Name: At_100uM_ABA_Mutants__P Parameter: Treatment Value: None
  misc_feature: MA Experiment ID: 20000574 Result: Up-regulated in Transcription
  misc_feature: MA Experiment 20000574 PARAMETER Experiment Name: At_100uM_ABA_Mutants__P Parameter: Organism Value: A. thaliana
  misc_feature: MA Experiment 20000574 PARAMETER Experiment Name: At_100uM_ABA_Mutants__P Parameter: Plant Line Value: CS23 vs. Ler wt
  misc_feature: MA Experiment 20000574 PARAMETER Experiment Name: At_100uM_ABA_Mutants__P Parameter: Timepoint (hr) Value: N/A
  misc_feature: MA Experiment 20000574 PARAMETER Experiment Name: At_100uM_ABA_Mutants__P Parameter: Tissue Value: Whole Plant
  misc_feature: MA Experiment 20000574 PARAMETER Experiment Name: At_100uM_ABA_Mutants__P Parameter: Treatment Value: None
  misc_feature: MA Experiment ID: 20001451 Result: Up-regulated in Transcription
  misc_feature: MA Experiment 20001451 PARAMETER Experiment Name: At_Far-red-induction_P Parameter: Age (day) Value: 7
  misc_feature: MA Experiment 20001451 PARAMETER Experiment Name: At_Far-red-induction_P Parameter: Light Value: Far-red vs. White
  misc_feature: MA Experiment 20001451 PARAMETER Experiment Name: At_Far-red-induction_P Parameter: Organism Value: A. thaliana
  misc_feature: MA Experiment 20001451 PARAMETER Experiment Name: At_Far-red-induction_P Parameter: Plant Line Value: Columbia
  misc_feature: MA Experiment 20001451 PARAMETER Experiment Name: At_Far-red-induction_P Parameter: Timepoint (hr) Value: 24
  misc_feature: MA Experiment 20001451 PARAMETER Experiment Name: At_Far-red-induction_P Parameter: Tissue Value: Whole Plant
  misc_feature: MA Experiment ID: 20001757 Result: Up-regulated in Transcription
  misc_feature: MA Experiment 20001757 PARAMETER Experiment Name: At_50mM_NH4NO3_L-to-H_P Parameter: Timepoint (hr) Value: 6
  misc_feature: MA Experiment 20001757 PARAMETER Experiment Name: At_50mM_NH4NO3_L-to-H_P Parameter: Tissue Value: Leaf
  misc_feature: MA Experiment 20001757 PARAMETER Experiment Name: At_50mM_NH4NO3_L-to-H_P Parameter: Treatment Value: 50mM NH4NO3 vs 100mM Mannitol
  misc_feature: MA Experiment ID: 20001906 Result: Down-regulated in Transcription
  misc_feature: MA Experiment 20001906 PARAMETER Experiment Name: At_Drought_Reproduction_P Parameter: Age (day) Value: 35
  misc_feature: MA Experiment 20001906 PARAMETER Experiment Name: At_Drought_Reproduction_P Parameter: Organism Value: A. thaliana
  misc_feature: MA Experiment 20001906 PARAMETER Experiment Name: At_Drought_Reproduction_P Parameter: Plant Line Value: WS
  misc_feature: MA Experiment 20001906 PARAMETER Experiment Name: At_Drought_Reproduction_P Parameter: Timepoint (day) Value: 5
  misc_feature: MA Experiment 20001906 PARAMETER Experiment Name: At_Drought_Reproduction_P Parameter: Tissue Value: Siliques
  misc_feature: MA Experiment 20001906 PARAMETER Experiment Name: At_Drought_Reproduction_P Parameter: Treatment Value: Drought vs. No Drought
atagaggaggtacgatactccttcgtcagccacctctccaaagctctccagcgaaaaggtgtaaacgatgtcttcatcgatagcgatgattcgctttccaacgagtctcaatcaatggtcgagagagctagggtttctgttatgattttaccaggaaaccgtacggtatctcttgacaagctcgtgaaggttctcgattgccagaagaacaaagatcaagtggtggttccggtgttgtacggtgtcagatcatcagagaccgaatggcttagcgcgctggattcgaaaggattctcatcagtacaccattccaggaaagaatgtagtgactcccagcttgtaaaagagactgttagagatgtgtatgagaagctcttttatatggaacgaattggaatatattcgaagctgctggagattgagaaaatgattaacaagcaaccgttggacatccgttgtgttggaatttggggtatgcctggcataggcaagactacacttgctaaagcagtctttgaccaaatgtctggtgagtttgatgctcattgctttattgaagactacaccaaagctattcaagagaagggtgtttattgtttgctggaggaacagtttttgaaagaaaatgctggtgctagtggtaccgttacgaaattgagcttgcttagggatagattaaacaataagagggttcttgttgttcttgatgatgtccgcagtcctctggttgtggagtcttttcttggagggtttgactggtttggtcccaaaagtctaatcatcataacctccaaagataaatcggtgtttcgcctttgtcgagtcaatcaaatatacgaggttcagggtttaaatgagaaagaggctcttcaactcttctctttgtgtgcgtctatagacgatatggcagagcagaatctccacgaggtgtcaatgaaagttattaaatatgctaatggccatccattagctctcaatctctatggcagagaactgatggggaagaaaagaccaccagaaatggagatagcattcctcaaactcaaggaatgtcctccagctatttttgttgatgcaatcaagagctcgtatgacacactcaatgacagggaaaaaaacatttttttggacatagcttgtttcttccagggagaaaatgttgactacgtgatgcaactgcttgagggttgtggtttctttccacatgttggaattgatgttcttgtggagaagagtctggtgactatttcagaaaaccgagtgcggatgcataacttgatccaagatgttggccgacaaataataaatagagaaacaagacagactaagaggcgcagcagactgtgggaaccttgcagcatcaaatatttattagaagataaggaacaaaacgaaaatgaagaacaaaaaacaacttttgaacgtgctcaggtccctgaagagatcgaaggcatgtttctggacacatcaaacttaagttttgatattaagcatgttgcctttgataatatgttgaaccttagattgttcaagatttacagttccaatcctgaagtccatcatgtaaacaatttcctcaaaggctctctcagttctcttcctaatgtgctaagactcctgcattgggagaactatcctctgcagtttctgcctcaaaattttgatcctatacaccttgttgaaatcaacatgccgtacagccaacttaagaaactttggggtggaaccaaggacctggagatgttgaagacaatcaggctttgtcattcccaacaactagttgatattgacgatcttttaaaagctcaaaatcttgaggtagttgatctccaaggctgtacaagactgcagagtttcccagccaccggtcaattgctacatttacgagttgtaaatctctcaggttgcacagagatcaaaagtttcccagaaattcccccaaatattgagacactgaatctacaggggactggtataatagaattaccactttccattgttaattgcttggagctgaatgattgttctcgtttgcgaagtctgccaaacatggttaatttagaacttctcaaagcccttgatctttctggttgctcagagctcgagactatccagggtttcccacggaacctgaaagagttatatcttgttggcactgcagtaagacaagtgccacaacttcctcaaagtctagaattctttaatgcccatggttgtgtctctctcaaatcaattcgtttggacttcaagaagcttcctgtgcattacacatttagtaattgtttcgatctatctccacaagtggtcaacgattttttagtgcaggcgatggctaatgtgattgcaaaacacataccaagagagcgtcatgtcacaggcttttctcaaaagactgtgcagcgttcgagtcgtgacagtcagcaggaactcaacaaaactttggctttcagcttctgtgcgccctcacatgcgaatcaaaattccaaacttgatctgcaaccaggatcttcttcaatgacacgactagatccttcttggaggaacacacttgtgggctttgctatgctggtgcaagtcgcattttccgagggttactgtgatgatactgattttggcattagttgtgtttgcaaatggaaaaacaaggaaggccactctcataggagagaaataaatttgcattgttgggctttagggaaagctgttgaaagggatcatacgtttgtcttctttgatgtcaacatgcgtccagataccgatgaaggaaatgaccccgatatctgggctgatttagttgtttttgagttctttcctgtcaataaacagagaaagcctctaaatgatagttgcacagtgacaagatgtggagtccgtttaataactgctgtaaactgcaatacaagtatcgagaatatatcaccagttttgtccttggatccgatggaggtttctggtaatgaagatgaagaagtattgagagtcagatatgctggtttacaggagatatataaagctttgtttctttacatagcgggtttgttcaatgacgaggatgttggtttggtagcaccacttattgctaacattattgacatggacgttagttatgggctcaaggtcttagcctataggtctctcatacgtgtatcttccaatggggaaatagtgatgcactatttgctacgacaaatgggtaaagaaatcctccatacagaatcaaagaagactgacaaattagtcgacaatattcagagttccatgatcgcaacaaaggaaatcgagatcactcgttcaaagagtcgccgaaagaacaacaaggaaaagagagtggtttgcgtagtggatcgaggcagccggtccagtgacctatgggtttggcgaaagtatggtcaaaaacccatcaaaagttctccttatccaaggagttactatagatgtgccagctcgaaaggttgttttgctaggaaacaagtcgaacgtagccgcactgatccaaatgtttcagtaattacttacatctctgagcataaccatccattccccactctacgcaatactcttgccggctccactcgttcctcttcctccaaatgctcagatgtaactacttctgcctcatcgacagtctcccaagacaaagaaggaccggataaatcccatttgccttcctcccctgcttctcctccttatgcggccatggtggttaaggaggaggacatggagcaatgggacaatatggagttcgatgttgacgttgaagaagatactttcatacccgaattatttccagaggataccttcgctgatatggacaagcttgaggaaaattctcagactatgtttctctctcgcagaagcagcggaggcaacatggaagcccaagggaagaactctagtgatgatagggagttaaaaggaaaaaaaaaaaaattctttgagatgagacttgttctctctggtgcctcttctttcacctccaaccttttttgttcctcccaacaggtcaatggaagaggaaaagaactgaaaaacccaatttctctaaaccacaacaaagatttggactttctgttaaagaagttagctccgccactcacggcggttttacttgctgtttcacccatctgtttccctccagaatctcttgggcagactttggatatacagagaggagctacattgtttaatagagcttgtatcgggtgtcatgatacaggtggaaacattattcaacctggtgcaacgcttttcacaaaagacctcgaaagaaatggagttgatactgaggaagaaatatatcgtgttacctactttggaaagggaagaatgccgggatttggtgagaaatgcacaccgagaggacaatgtacctttggaccgcggttgcaggacgaagaaatcaagcttctcgctgaatttgtaaagtttcaagctgaccaaggctggccaactgtatctacggactagcgactaggcattcttcgtcttgtgagcgtttttgtaatccaattaatccatagggctgtatctacttacacttataacaattccttctgggaggtttcattgcaattgcttatgctcc

SEQ ID NO: 100674 - protein, 1488 aa, Arabidopsis thaliana
  peptide (1)..(1488): Ceres Seq. ID no. 13605764
  misc_feature (154)..(405): Pfam Name: NB-ARC domain Pfam Description: NB-ARC domain
  misc_feature (1)..(746): Homolog of NCBI NO: 29839621 NR Description: Probable WRKY transcription factor 52 (WRKY protein 52) (Disease resistance protein RRS1) (Resistance to
  misc_feature (1)..(746): Homolog of NCBI NO: 15242355 NR Description: disease resistance protein (TIR-NBS-LRR class),
  misc_feature (1)..(746): Homolog of NCBI NO: 26449414 NR Description: putative disease resistance protein [Arabidopsis
  misc_feature (2)..(768): Homolog of NCBI NO: 15234300 NR Description: disease resistance protein (TIR-NBS-LRR class), [Arabidopsis thaliana] >gi|7488375|pir||T04583 TMV resistance
  misc_feature (2)..(773): Homolog of NCBI NO: 22326876 NR Description: disease resistance protein (TIR-NBS-LRR class),
  misc_feature (112)..(764): Homolog of NCBI NO: 15227360 NR Description: disease resistance protein (TIR-NBS-LRR class), [Arabidopsis thaliana] >gi|25411777|pir||E84547 probable disease
  misc_feature (79)..(773): Homolog of NCBI NO: 10177890 NR Description: disease resistance protein-like [Arabidopsis
  misc_feature (28)..(764): Homolog of NCBI NO: 15230522 NR Description: disease resistance protein (TIR-NBS-LRR class),
  misc_feature (720)..(978): Homolog of NCBI NO: 15230522 NR Description: disease resistance protein (TIR-NBS-LRR class),
  misc_feature (17)..(732): Homolog of NCBI NO: 7484913 NR Description: disease resistance protein homolog F24J7.80 -
IEEVRYSFVSHLSKALQRKGVNDVFIDSDDSLSNESQSMVERARVSVMILPGNRTVSLDKLVKVLDCQKNKDQVVVPVLYGVRSSETEWLSALDSKGFSSVHHSRKECSDSQLVKETVRDVYEKLFYMERIGIYSKLLEIEKMINKQPLDIRCVGIWGMPGIGKTTLAKAVFDQMSGEFDAHCFIEDYTKAIQEKGVYCLLEEQFLKENAGASGTVTKLSLLRDRLNNKRVLVVLDDVRSPLVVESFLGGFDWFGPKSLIIITSKDKSVFRLCRVNQIYEVQGLNEKEALQLFSLCASIDDMAEQNLHEVSMKVIKYANGHPLALNLYGRELMGKKRPPEMEIAFLKLKECPPAIFVDAIKSSYDTLNDREKNIFLDIACFFQGENVDYVMQLLEGCGFFPHVGIDVLVEKSLVTISENRVRMHNLIQDVGRQIINRETRQTKRRSRLWEPCSIKYLLEDKEQNENEEQKTTFERAQVPEEIEGMFLDTSNLSFDIKHVAFDNMLNLRLFKIYSSNPEVHHVNNFLKGSLSSLPNVLRLLHWENYPLQFLPQNFDPIHLVEINMPYSQLKKLWGGTKDLEMLKTIRLCHSQQLVDIDDLLKAQNLEVVDLQGCTRLQSFPATGQLLHLRVVNLSGCTEIKSFPEIPPNIETLNLQGTGIIELPLSIVNCLELNDCSRLRSLPNMVNLELLKALDLSGCSELETIQGFPRNLKELYLVGTAVRQVPQLPQSLEFFNAHGCVSLKSIRLDFKKLPVHYTFSNCFDLSPQVVNDFLVQAMANVIAKHIPRERHVTGFSQKTVQRSSRDSQQELNKTLAFSFCAPSHANQNSKLDLQPGSSSMTRLDPSWRNTLVGFAMLVQVAFSEGYCDDTDFGISCVCKWKNKEGHSHRREINLHCWALGKAVERDHTFVFFDVNMRPDTDEGNDPDIWADLVVFEFFPVNKQRKPLNDSCTVTRCGVRLITAVNCNTSIENISPVLSLDPMEVSGNEDEEVLRVRYAGLQEIYKALFLYIAGLFNDEDVGLVAPLIANIIDMDVSYGLKVLAYRSLIRVSSNGEIVMHYLLRQMGKEILHTESKKTDKLVDNIQSSMIATKEIEITRSKSRRKNNKEKRVVCVVDRGSRSSDLWVWRKYGQKPIKSSPYPRSYYRCASSKGCFARKQVERSRTDPNVSVITYISEHNHPFPTLRNTLAGSTRSSSSKCSDVTTSASSTVSQDKEGPDKSHLPSSPASPPYAAMVVKEEDMEQWDNMEFDVDVEEDTFIPELFPEDTFADMDKLEENSQTMFLSRRSSGGNMEAQGKNSSDDRELKGKKKKFFEMRLVLSGASSFTSNLFCSSQQVNGRGKELKNPISLNHNKDLDFLLKKLAPPLTAVLLAVSPICFPPESLGQTLDIQRGATLFNRACIGCHDTGGNIIQPGATLFTKDLERNGVDTEEEIYRVTYFGKGRMPGFGEKCTPRGQCTFGPRLQDEEIKLLAEFVKFQADQGWPTVSTD

SEQ ID NO: 100675 - protein, 1450 aa, Arabidopsis thaliana
  peptide (1)..(1450): Ceres Seq. ID no. 13605765
  misc_feature (116)..(367): Pfam Name: NB-ARC domain Pfam Description: NB-ARC domain
  misc_feature (1)..(708): Homolog of NCBI NO: 29839621 NR Description: Probable WRKY transcription factor 52 (WRKY protein 52) (Disease resistance protein RRS1) (Resistance to
  misc_feature (1)..(708): Homolog of NCBI NO: 15242355 NR Description: disease resistance protein (TIR-NBS-LRR class),
  misc_feature (1)..(708): Homolog of NCBI NO: 26449414 NR Description: putative disease resistance protein [Arabidopsis
  misc_feature (1)..(730): Homolog of NCBI NO: 15234300 NR Description: disease resistance protein (TIR-NBS-LRR class), [Arabidopsis thaliana] >gi|7488375|pir||T04583 TMV resistance
  misc_feature (1)..(735): Homolog of NCBI NO: 22326876 NR Description: disease resistance protein (TIR-NBS-LRR class),
  misc_feature (74)..(726): Homolog of NCBI NO: 15227360 NR Description: disease resistance protein (TIR-NBS-LRR class), [Arabidopsis thaliana] >gi|25411777|pir||E84547 probable disease
  misc_feature (41)..(735): Homolog of NCBI NO: 10177890 NR Description: disease resistance protein-like [Arabidopsis
  misc_feature (1)..(726): Homolog of NCBI NO: 15230522 NR Description: disease resistance protein (TIR-NBS-LRR class),
  misc_feature (682)..(940): Homolog of NCBI NO: 15230522 NR Description: disease resistance protein (TIR-NBS-LRR class),
  misc_feature (1)..(694): Homolog of NCBI NO: 7484913 NR Description: disease resistance protein homolog F24J7.80 -
MVERARVSVMILPGNRTVSLDKLVKVLDCQKNKDQVVVPVLYGVRSSETEWLSALDSKGFSSVHHSRKECSDSQLVKETVRDVYEKLFYMERIGIYSKLLEIEKMINKQPLDIRCVGIWGMPGIGKTTLAKAVFDQMSGEFDAHCFIEDYTKAIQEKGVYCLLEEQFLKENAGASGTVTKLSLLRDRLNNKRVLVVLDDVRSPLVVESFLGGFDWFGPKSLIIITSKDKSVFRLCRVNQIYEVQGLNEKEALQLFSLCASIDDMAEQNLHEVSMKVIKYANGHPLALNLYGRELMGKKRPPEMEIAFLKLKECPPAIFVDAIKSSYDTLNDREKNIFLDIACFFQGENVDYVMQLLEGCGFFPHVGIDVLVEKSLVTISENRVRMHNLIQDVGRQIINRETRQTKRRSRLWEPCSIKYLLEDKEQNENEEQKTTFERAQVPEEIEGMFLDTSNLSFDIKHVAFDNMLNLRLFKIYSSNPEVHHVNNFLKGSLSSLPNVLRLLHWENYPLQFLPQNFDPIHLVEINMPYSQLKKLWGGTKDLEMLKTIRLCHSQQLVDIDDLLKAQNLEVVDLQGCTRLQSFPATGQLLHLRVVNLSGCTEIKSFPEIPPNIETLNLQGTGIIELPLSIVNCLELNDCSRLRSLPNMVNLELLKALDLSGCSELETIQGFPRNLKELYLVGTAVRQVPQLPQSLEFFNAHGCVSLKSIRLDFKKLPVHYTFSNCFDLSPQVVNDFLVQAMANVIAKHIPRERHVTGFSQKTVQRSSRDSQQELNKTLAFSFCAPSHANQNSKLDLQPGSSSMTRLDPSWRNTLVGFAMLVQVAFSEGYCDDTDFGISCVCKWKNKEGHSHRREINLHCWALGKAVERDHTFVFFDVNMRPDTDEGNDPDIWADLVVFEFFPVNKQRKPLNDSCTVTRCGVRLITAVNCNTSIENISPVLSLDPMEVSGNEDEEVLRVRYAGLQEIYKALFLYIAGLFNDEDVGLVAPLIANIIDMDVSYGLKVLAYRSLIRVSSNGEIVMHYLLRQMGKEILHTESKKTDKLVDNIQSSMIATKEIEITRSKSRRKNNKEKRVVCVVDRGSRSSDLWVWRKYGQKPIKSSPYPRSYYRCASSKGCFARKQVERSRTDPNVSVITYISEHNHPFPTLRNTLAGSTRSSSSKCSDVTTSASSTVSQDKEGPDKSHLPSSPASPPYAAMVVKEEDMEQWDNMEFDVDVEEDTFIPELFPEDTFADMDKLEENSQTMFLSRRSSGGNMEAQGKNSSDDRELKGKKKKFFEMRLVLSGASSFTSNLFCSSQQVNGRGKELKNPISLNHNKDLDFLLKKLAPPLTAVLLAVSPICFPPESLGQTLDIQRGATLFNRACIGCHDTGGNIIQPGATLFTKDLERNGVDTEEEIYRVTYFGKGRMPGFGEKCTPRGQCTFGPRLQDEEIKLLAEFVKFQADQGWPTVSTD

SEQ ID NO: 100676 - protein, 1441 aa, Arabidopsis thaliana
  peptide (1)..(1441): Ceres Seq. ID no. 13605766
  misc_feature (107)..(358): Pfam Name: NB-ARC domain Pfam Description: NB-ARC domain
  misc_feature (1)..(699): Homolog of NCBI NO: 29839621 NR Description: Probable WRKY transcription factor 52 (WRKY protein 52) (Disease resistance protein RRS1) (Resistance to
  misc_feature (1)..(699): Homolog of NCBI NO: 15242355 NR Description: disease resistance protein (TIR-NBS-LRR class),
  misc_feature (1)..(699): Homolog of NCBI NO: 26449414 NR Description: putative disease resistance protein [Arabidopsis
  misc_feature (1)..(721): Homolog of NCBI NO: 15234300 NR Description: disease resistance protein (TIR-NBS-LRR class), [Arabidopsis thaliana] >gi|7488375|pir||T04583 TMV resistance
  misc_feature (1)..(726): Homolog of NCBI NO: 22326876 NR Description: disease resistance protein (TIR-NBS-LRR class),
  misc_feature (65)..(717): Homolog of NCBI NO: 15227360 NR Description: disease resistance protein (TIR-NBS-LRR class), [Arabidopsis thaliana] >gi|25411777|pir||E84547 probable disease
  misc_feature (32)..(726): Homolog of NCBI NO: 10177890 NR Description: disease resistance protein-like [Arabidopsis
  misc_feature (1)..(717): Homolog of NCBI NO: 15230522 NR Description: disease resistance protein (TIR-NBS-LRR class),
  misc_feature (673)..(931): Homolog of NCBI NO: 15230522 NR Description: disease resistance protein (TIR-NBS-LRR class),
  misc_feature (1)..(685): Homolog of NCBI NO: 7484913 NR Description: disease resistance protein homolog F24J7.80 -
MILPGNRTVSLDKLVKVLDCQKNKDQVVVPVLYGVRSSETEWLSALDSKGFSSVHHSRKECSDSQLVKETVRDVYEKLFYMERIGIYSKLLEIEKMINKQPLDIRCVGIWGMPGIGKTTLAKAVFDQMSGEFDAHCFIEDYTKAIQEKGVYCLLEEQFLKENAGASGTVTKLSLLRDRLNNKRVLVVLDDVRSPLVVESFLGGFDWFGPKSLIIITSKDKSVFRLCRVNQIYEVQGLNEKEALQLFSLCASIDDMAEQNLHEVSMKVIKYANGHPLALNLYGRELMGKKRPPEMEIAFLKLKECPPAIFVDAIKSSYDTLNDREKNIFLDIACFFQGENVDYVMQLLEGCGFFPHVGIDVLVEKSLVTISENRVRMHNLIQDVGRQIINRETRQTKRRSRLWEPCSIKYLLEDKEQNENEEQKTTFERAQVPEEIEGMFLDTSNLSFDIKHVAFDNMLNLRLFKIYSSNPEVHHVNNFLKGSLSSLPNVLRLLHWENYPLQFLPQNFDPIHLVEINMPYSQLKKLWGGTKDLEMLKTIRLCHSQQLVDIDDLLKAQNLEVVDLQGCTRLQSFPATGQLLHLRVVNLSGCTEIKSFPEIPPNIETLNLQGTGIIELPLSIVNCLELNDCSRLRSLPNMVNLELLKALDLSGCSELETIQGFPRNLKELYLVGTAVRQVPQLPQSLEFFNAHGCVSLKSIRLDFKKLPVHYTFSNCFDLSPQVVNDFLVQAMANVIAKHIPRERHVTGFSQKTVQRSSRDSQQELNKTLAFSFCAPSHANQNSKLDLQPGSSSMTRLDPSWRNTLVGFAMLVQVAFSEGYCDDTDFGISCVCKWKNKEGHSHRREINLHCWALGKAVERDHTFVFFDVNMRPDTDEGNDPDIWADLVVFEFFPVNKQRKPLNDSCTVTRCGVRLITAVNCNTSIENISPVLSLDPMEVSGNEDEEVLRVRYAGLQEIYKALFLYIAGLFNDEDVGLVAPLIANIIDMDVSYGLKVLAYRSLIRVSSNGEIVMHYLLRQMGKEILHTESKKTDKLVDNIQSSMIATKEIEITRSKSRRKNNKEKRVVCVVDRGSRSSDLWVWRKYGQKPIKSSPYPRSYYRCASSKGCFARKQVERSRTDPNVSVITYISEHNHPFPTLRNTLAGSTRSSSSKCSDVTTSASSTVSQDKEGPDKSHLPSSPASPPYAAMVVKEEDMEQWDNMEFDVDVEEDTFIPELFPEDTFADMDKLEENSQTMFLSRRSSGGNMEAQGKNSSDDRELKGKKKKFFEMRLVLSGASSFTSNLFCSSQQVNGRGKELKNPISLNHNKDLDFLLKKLAPPLTAVLLAVSPICFPPESLGQTLDIQRGATLFNRACIGCHDTGGNIIQPGATLFTKDLERNGVDTEEEIYRVTYFGKGRMPGFGEKCTPRGQCTFGPRLQDEEIKLLAEFVKFQADQGWPTVSTD

SEQ ID NO: 100677 - DNA, 1716 bp, Arabidopsis thaliana
  misc_feature (1)..(1716): Ceres Seq. ID no. 13605793
  misc_feature: MA Experiment ID: 20000179 Result: Up-regulated in Transcription
  misc_feature: MA Experiment 20000179 PARAMETER Experiment Name: At_Germinating_Seeds_P Parameter: Age (hr) Value: 6 vs. 0
  misc_feature: MA Experiment 20000179 PARAMETER Experiment Name: At_Germinating_Seeds_P Parameter: Tissue Value: Germinating Seeds
  misc_feature: MA Experiment ID: 20000264 Result: Up-regulated in Transcription
  misc_feature: MA Experiment 20000264 PARAMETER Experiment Name: At_Open_Flower_P Parameter: Age (day) Value: 21
  misc_feature: MA Experiment 20000264 PARAMETER Experiment Name: At_Open_Flower_P Parameter: Plant Line Value: WS
  misc_feature: MA Experiment 20000264 PARAMETER Experiment Name: At_Open_Flower_P Parameter: Tissue Value: Open Flower vs. Whole Plant
  misc_feature: MA Experiment ID: 20000265 Result: Up-regulated in Transcription
  misc_feature: MA Experiment 20000265 PARAMETER Experiment Name: At_Open_Flower_P Parameter: Age (day) Value: 21
  misc_feature: MA Experiment 20000265 PARAMETER Experiment Name: At_Open_Flower_P Parameter: Plant Line Value: WS
  misc_feature: MA Experiment 20000265 PARAMETER Experiment Name: At_Open_Flower_P Parameter: Tissue Value: Closed Flower vs. Whole Plant
  misc_feature: MA Experiment ID: 20000495 Result: Up-regulated in Transcription
  misc_feature: MA Experiment 20000495 PARAMETER Experiment Name: At_Guard_Cells_P Parameter: Harvest Date Value: 8/2/2002
  misc_feature: MA Experiment 20000495 PARAMETER Experiment Name: At_Guard_Cells_P Parameter: Organism Value: A. thaliana
  misc_feature: MA Experiment 20000495 PARAMETER Experiment Name: At_Guard_Cells_P Parameter: Tissue Value: Guard Cells vs. Leaves
  misc_feature: MA Experiment ID: 20001906 Result: Up-regulated in Transcription
  misc_feature: MA Experiment 20001906 PARAMETER Experiment Name: At_Drought_Reproduction_P Parameter: Age (day) Value: 35
  misc_feature: MA Experiment 20001906 PARAMETER Experiment Name: At_Drought_Reproduction_P Parameter: Organism Value: A. thaliana
  misc_feature: MA Experiment 20001906 PARAMETER Experiment Name: At_Drought_Reproduction_P Parameter: Plant Line Value: WS
  misc_feature: MA Experiment 20001906 PARAMETER Experiment Name: At_Drought_Reproduction_P Parameter: Timepoint (day) Value: 5
  misc_feature: MA Experiment 20001906 PARAMETER Experiment Name: At_Drought_Reproduction_P Parameter: Tissue Value: Siliques
  misc_feature: MA Experiment 20001906 PARAMETER Experiment Name: At_Drought_Reproduction_P Parameter: Treatment Value: Drought vs. No Drought
  misc_feature: MA Experiment ID: 20001911 Result: Down-regulated in Transcription
  misc_feature: MA Experiment 20001911 PARAMETER Experiment Name: At_Drought_Reproduction_P Parameter: Age (day) Value: 40
  misc_feature: MA Experiment 20001911 PARAMETER Experiment Name: At_Drought_Reproduction_P Parameter: Organism Value: A. thaliana
  misc_feature: MA Experiment 20001911 PARAMETER Experiment Name: At_Drought_Reproduction_P Parameter: Plant Line Value: WS
  misc_feature: MA Experiment 20001911 PARAMETER Experiment Name: At_Drought_Reproduction_P Parameter: Timepoint (day) Value: 10
  misc_feature: MA Experiment 20001911 PARAMETER Experiment Name: At_Drought_Reproduction_P Parameter: Tissue Value: Flowers
  misc_feature: MA Experiment 20001911 PARAMETER Experiment Name: At_Drought_Reproduction_P Parameter: Treatment Value: Drought vs. No Drought
acttacaattttttttgtcatctttatcaacaaacaaacaactatctctgcaaatttggctgaaacctcttaaaagttctttgctctgttccaaattatccatattttctactaacaataatgtcagaaacatcaaagtcagagtctttagatccagaagtctctgaagggctttgttcaaagaccttgatgcagagcattgttcatgagctgaagctgcagatgagaattggtttgccattggtggttatgaatttgttgtggttcggtaagatgaccaccacatctgtgtttcttggccgtcaaggtgagcttaacctagccggaggttcattagggttttcctttgcaaacgttactggcttttctgttttgtatggtatttctgctgcaatggagcctatttgtggccaagctttcggagccaagaactttaagcttcttcataaaaccctttttatggcagtgctcttgctactcttgatttcggtaccaatttctttcttgtggctcaatgttcacaagatccttactggttttggtcaaagagaagatatttccttcatagccaagaaatatcttctctaccttcttccagagttgccaatcctctcttttctttgtccacttaaggcttatttaagctcacaaggtgttactcttcccatcatgttcacaacagctgcagccacttctcttcatatccccatcaacatagtcctctctaaagcaagaggaattgaaggagttgcaatggcggtttggataactgattttattgttgtgattcttctaactggatatgtgatagtcgtagagcgaatgaaagagaacaaatggaaacaaggtggctggttaaaccaaagtgctcaagactggctcacactgatcaagcttagtggaccatgttgtctcaccgtgtgccttgaatggtggtgctacgagatcttggtccttttaaccgggaggttaccaaacccggtgcaagctgtatcaatcttgattatagttttcaacttcgactacttgctttacgcggtgatgctctctttaggcacgtgtgtggcaacaagagtgtccaatgagctcggcgcaaataatcctaagggagcttatagagcagcttacactacactcattgtgggtattatttcaggctgcattggagcattagtgatgatagcatttagaggtttttgggggtctttgtatactcaccatgaccaactcatcttaaacggtgtgaagaagatgatgctgataatggcggttatcgaagttgtaaacttcccattaatggtttgtggagagatagtccgcggaacagcgaaaccgtctcttggaatgtatgcaaatcttagtggattctatctattggctttgcctttaggggcaactttggcgttcaaggctaaacaagggcttcaagggttcttgatcgggttatttgttggtatatctctctgtctctcgatattgctcatctttattgcgaggatagattgggagaaagaagctgggaaagcacagattctgacatgtaacacagaggacgaacaaacttcacaaggttcaggacaagatagccactcatagaaagtactcactgaggtatcttctagctagagatgtagtcaaatttaccttgtgagagtatttatcttcttgatgtaactgtaactatgaattgaggatccaaactttgtattattgtgt

SEQ ID NO: 100678 - protein, 491 aa, Arabidopsis thaliana
  peptide (1)..(491): Ceres Seq. ID no. 13605794
  misc_feature (1)..(491): Homolog of NCBI NO: 15235794 NR Description: MATE efflux protein - related [Arabidopsis
  misc_feature (21)..(476): Homolog of NCBI NO: 30102975 NR Description: putative MatE efflux family protein [Oryza sativa
  misc_feature (22)..(485): Homolog of NCBI NO: 15235905 NR Description: MATE efflux protein - related [Arabidopsis
  misc_feature (28)..(476): Homolog of NCBI NO: 18406257 NR Description: MATE efflux protein - related [Arabidopsis
  misc_feature (23)..(474): Homolog of NCBI NO: 15233459 NR Description: MATE efflux protein - related [Arabidopsis
  misc_feature (22)..(473): Homolog of NCBI NO: 15217599 NR Description: MATE efflux protein - related [Arabidopsis
  misc_feature (1)..(473): Homolog of NCBI NO: 20532318 NR Description: Putative membrane protein [Oryza sativa (japonica group)] >gi|27356666|gb|AAO06955.1| Putative membrane protein
  misc_feature (35)..(489): Homolog of NCBI NO: 37536202 NR Description: putative membrane protein [Oryza sativa (japonica group)] >gi|27311284|gb|AAO00710.1| putative membrane protein
  misc_feature (26)..(473): Homolog of NCBI NO: 28376699 NR Description: putative MATE efflux membrane protein [Oryza
  misc_feature (1)..(477): Homolog of NCBI NO: 15241158 NR Description: MATE efflux protein - related [Arabidopsis
MSETSKSESLDPEVSEGLCSKTLMQSIVHELKLQMRIGLPLVVMNLLWFGKMTTTSVFLGRQGELNLAGGSLGFSFANVTGFSVLYGISAAMEPICGQAFGAKNFKLLHKTLFMAVLLLLLISVPISFLWLNVHKILTGFGQREDISFIAKKYLLYLLPELPILSFLCPLKAYLSSQGVTLPIMFTTAAATSLHIPINIVLSKARGIEGVAMAVWITDFIVVILLTGYVIVVERMKENKWKQGGWLNQSAQDWLTLIKLSGPCCLTVCLEWWCYEILVLLTGRLPNPVQAVSILIIVFNFDYLLYAVMLSLGTCVATRVSNELGANNPKGAYRAAYTTLIVGIISGCIGALVMIAFRGFWGSLYTHHDQLILNGVKKMMLIMAVIEVVNFPLMVCGEIVRGTAKPSLGMYANLSGFYLLALPLGATLAFKAKQGLQGFLIGLFVGISLCLSILLIFIARIDWEKEAGKAQILTCNTEDEQTSQGSGQDSHS

SEQ ID NO: 100679 - protein, 468 aa, Arabidopsis thaliana
  peptide (1)..(468): Ceres Seq. ID no. 13605795
  misc_feature (1)..(468): Homolog of NCBI NO: 15235794 NR Description: MATE efflux protein - related [Arabidopsis
  misc_feature (1)..(453): Homolog of NCBI NO: 30102975 NR Description: putative MatE efflux family protein [Oryza sativa
  misc_feature (1)..(462): Homolog of NCBI NO: 15235905 NR Description: MATE efflux protein - related [Arabidopsis
  misc_feature (5)..(453): Homolog of NCBI NO: 18406257 NR Description: MATE efflux protein - related [Arabidopsis
  misc_feature (1)..(451): Homolog of NCBI NO: 15233459 NR Description: MATE efflux protein - related [Arabidopsis
  misc_feature (1)..(450): Homolog of NCBI NO: 15217599 NR Description: MATE efflux protein - related [Arabidopsis
  misc_feature (1)..(450): Homolog of NCBI NO: 20532318 NR Description: Putative membrane protein [Oryza sativa (japonica group)] >gi|27356666|gb|AAO06955.1| Putative membrane protein
  misc_feature (12)..(466): Homolog of NCBI NO: 37536202 NR Description: putative membrane protein [Oryza sativa (japonica group)] >gi|27311284|gb|AAO00710.1| putative membrane protein
  misc_feature (3)..(450): Homolog of NCBI NO: 28376699 NR Description: putative MATE efflux membrane protein [Oryza
  misc_feature (1)..(454): Homolog of NCBI NO: 15241158 NR Description: MATE efflux protein - related [Arabidopsis
MQSIVHELKLQMRIGLPLVVMNLLWFGKMTTTSVFLGRQGELNLAGGSLGFSFANVTGFSVLYGISAAMEPICGQAFGAKNFKLLHKTLFMAVLLLLLISVPISFLWLNVHKILTGFGQREDISFIAKKYLLYLLPELPILSFLCPLKAYLSSQGVTLPIMFTTAAATSLHIPINIVLSKARGIEGVAMAVWITDFIVVILLTGYVIVVERMKENKWKQGGWLNQSAQDWLTLIKLSGPCCLTVCLEWWCYEILVLLTGRLPNPVQAVSILIIVFNFDYLLYAVMLSLGTCVATRVSNELGANNPKGAYRAAYTTLIVGIISGCIGALVMIAFRGFWGSLYTHHDQLILNGVKKMMLIMAVIEVVNFPLMVCGEIVRGTAKPSLGMYANLSGFYLLALPLGATLAFKAKQGLQGFLIGLFVGISLCLSILLIFIARIDWEKEAGKAQILTCNTEDEQTSQGSGQDSHS

SEQ ID NO: 100680 - protein, 457 aa, Arabidopsis thaliana
  peptide (1)..(457): Ceres Seq. ID no. 13605796
  misc_feature (1)..(457): Homolog of NCBI NO: 15235794 NR Description: MATE efflux protein - related [Arabidopsis
  misc_feature (1)..(442): Homolog of NCBI NO: 30102975 NR Description: putative MatE efflux family protein [Oryza sativa
  misc_feature (1)..(451): Homolog of NCBI NO: 15235905 NR Description: MATE efflux protein - related [Arabidopsis
  misc_feature (1)..(442): Homolog of NCBI NO: 18406257 NR Description: MATE efflux protein - related [Arabidopsis
  misc_feature (1)..(440): Homolog of NCBI NO: 15233459 NR Description: MATE efflux protein - related [Arabidopsis
  misc_feature (1)..(439): Homolog of NCBI NO: 15217599 NR Description: MATE efflux protein - related [Arabidopsis
  misc_feature (1)..(439): Homolog of NCBI NO: 20532318 NR Description: Putative membrane protein [Oryza sativa (japonica group)] >gi|27356666|gb|AAO06955.1| Putative membrane protein
  misc_feature (1)..(455): Homolog of NCBI NO: 37536202 NR Description: putative membrane protein [Oryza sativa (japonica group)] >gi|27311284|gb|AAO00710.1| putative membrane protein
  misc_feature (1)..(439): Homolog of NCBI NO: 28376699 NR Description: putative MATE efflux membrane protein [Oryza
  misc_feature (1)..(443): Homolog of NCBI NO: 15241158 NR Description: MATE efflux protein - related [Arabidopsis
MRIGLPLVVMNLLWFGKMTTTSVFLGRQGELNLAGGSLGFSFANVTGFSVLYGISAAMEPICGQAFGAKNFKLLHKTLFMAVLLLLLISVPISFLWLNVHKILTGFGQREDISFIAKKYLLYLLPELPILSFLCPLKAYLSSQGVTLPIMFTTAAATSLHIPINIVLSKARGIEGVAMAVWITDFIVVILLTGYVIVVERMKENKWKQGGWLNQSAQDWLTLIKLSGPCCLTVCLEWWCYEILVLLTGRLPNPVQAVSILIIVFNFDYLLYAVMLSLGTCVATRVSNELGANNPKGAYRAAYTTLIVGIISGCIGALVMIAFRGFWGSLYTHHDQLILNGVKKMMLIMAVIEVVNFPLMVCGEIVRGTAKPSLGMYANLSGFYLLALPLGATLAFKAKQGLQGFLIGLFVGISLCLSILLIFIARIDWEKEAGKAQILTCNTEDEQTSQGSGQDSHS

SEQ ID NO: 100681 - DNA, 2117 bp, Arabidopsis thaliana
  misc_feature (1)..(2117): Ceres Seq. ID no. 13605801
  misc_feature: MA Experiment ID: 20000171 Result: Down-regulated in Transcription
  misc_feature: MA Experiment 20000171 PARAMETER Experiment Name: At_42deg_Heat_P Parameter: Age (day) Value: 14
  misc_feature: MA Experiment 20000171 PARAMETER Experiment Name: At_42deg_Heat_P Parameter: Organism Value: A. thaliana
  misc_feature: MA Experiment 20000171 PARAMETER Experiment Name: At_42deg_Heat_P Parameter: Plant Line Value: WS
  misc_feature: MA Experiment 20000171 PARAMETER Experiment Name: At_42deg_Heat_P Parameter: Temperature (deg C) Value: 42 vs. 22
  misc_feature: MA Experiment 20000171 PARAMETER Experiment Name: At_42deg_Heat_P Parameter: Timepoint (hr) Value: 1
  misc_feature: MA Experiment 20000171 PARAMETER Experiment Name: At_42deg_Heat_P Parameter: Tissue Value: Aerial
  misc_feature: MA Experiment ID: 20000173 Result: Down-regulated in Transcription
  misc_feature: MA Experiment 20000173 PARAMETER Experiment Name: At_42deg_Heat_P Parameter: Age (day) Value: 14
  misc_feature: MA Experiment 20000173 PARAMETER Experiment Name: At_42deg_Heat_P Parameter: Organism Value: A. thaliana
  misc_feature: MA Experiment 20000173 PARAMETER Experiment Name: At_42deg_Heat_P Parameter: Plant Line Value: WS
  misc_feature: MA Experiment 20000173 PARAMETER Experiment Name: At_42deg_Heat_P Parameter: Temperature (deg C) Value: 42 vs. 22
  misc_feature: MA Experiment 20000173 PARAMETER Experiment Name: At_42deg_Heat_P Parameter: Timepoint (hr) Value: 6
  misc_feature: MA Experiment 20000173 PARAMETER Experiment Name: At_42deg_Heat_P Parameter: Tissue Value: Aerial
  misc_feature: MA Experiment ID: 20000184 Result: Down-regulated in Transcription
  misc_feature: MA Experiment 20000184 PARAMETER Experiment Name: At_Shoots__P Parameter: Age (day) Value: 7
  misc_feature: MA Experiment 20000184 PARAMETER Experiment Name: At_Shoots__P Parameter: Tissue Value: Shoots vs. Whole Plant
  misc_feature: MA Experiment ID: 20000185 Result: Down-regulated in Transcription
  misc_feature: MA Experiment 20000185 PARAMETER Experiment Name: At_Roots__P Parameter: Age (day) Value: 7 vs. 21
  misc_feature: MA Experiment 20000185 PARAMETER Experiment Name: At_Roots__P Parameter: Organism Value: A. thaliana
  misc_feature: MA Experiment 20000185 PARAMETER Experiment Name: At_Roots__P Parameter: Tissue Value: Roots vs. Whole Plant
  misc_feature: MA Experiment ID: 20000234 Result: Down-regulated in Transcription
  misc_feature: MA Experiment 20000234 PARAMETER Experiment Name: At_Siliques_P Parameter: Age (day) Value: 21
  misc_feature: MA Experiment 20000234 PARAMETER Experiment Name: At_Siliques_P Parameter: Organism Value: A. thaliana
  misc_feature: MA Experiment 20000234 PARAMETER Experiment Name: At_Siliques_P Parameter: Plant Line Value: WS
  misc_feature: MA Experiment 20000234 PARAMETER Experiment Name: At_Siliques_P Parameter: Tissue Value: Less Than 5mm Siliques vs. Whole Plant
  misc_feature: MA Experiment ID: 20000235 Result: Down-regulated in Transcription
  misc_feature: MA Experiment 20000235 PARAMETER Experiment Name: At_Siliques_P Parameter: Age (day) Value: 21
  misc_feature: MA Experiment 20000235 PARAMETER Experiment Name: At_Siliques_P Parameter: Organism Value: A. thaliana
  misc_feature: MA Experiment 20000235 PARAMETER Experiment Name: At_Siliques_P Parameter: Plant Line Value: WS
  misc_feature: MA Experiment 20000235 PARAMETER Experiment Name: At_Siliques_P Parameter: Tissue Value: 5-10mm Siliques vs. Whole Plant
  misc_feature: MA Experiment ID: 20000264 Result: Down-regulated in Transcription
  misc_feature: MA Experiment 20000264 PARAMETER Experiment Name: At_Open_Flower_P Parameter: Age (day) Value: 21
  misc_feature: MA Experiment 20000264 PARAMETER Experiment Name: At_Open_Flower_P Parameter: Plant Line Value: WS
  misc_feature: MA Experiment 20000264 PARAMETER Experiment Name: At_Open_Flower_P Parameter: Tissue Value: Open Flower vs. Whole Plant
  misc_feature: MA Experiment ID: 20000265 Result: Down-regulated in Transcription
  misc_feature: MA Experiment 20000265 PARAMETER Experiment Name: At_Open_Flower_P Parameter: Age (day) Value: 21
  misc_feature: MA Experiment 20000265 PARAMETER Experiment Name: At_Open_Flower_P Parameter: Plant Line Value: WS
  misc_feature: MA Experiment 20000265 PARAMETER Experiment Name: At_Open_Flower_P Parameter: Tissue Value: Closed Flower vs. Whole Plant
  misc_feature: MA Experiment ID: 20000286 Result: Down-regulated in Transcription
  misc_feature: MA Experiment 20000286 PARAMETER Experiment Name: At_Open_Flower_P Parameter: Age (day) Value: 21
  misc_feature: MA Experiment 20000286 PARAMETER Experiment Name: At_Open_Flower_P Parameter: Plant Line Value: WS
  misc_feature: MA Experiment 20000286 PARAMETER Experiment Name: At_Open_Flower_P Parameter: Tissue Value: Half Open vs. Whole Plant
  misc_feature: MA Experiment ID: 20000438 Result: Down-regulated in Transcription
  misc_feature: MA Experiment 20000438 PARAMETER Experiment Name: At_Shoots__P Parameter: Age (day) Value: 14
  misc_feature: MA Experiment 20000438 PARAMETER Experiment Name: At_Shoots__P Parameter: Tissue Value: Shoots vs. Whole Plant
  misc_feature: MA Experiment ID: 20000439 Result: Down-regulated in Transcription
  misc_feature: MA Experiment 20000439 PARAMETER Experiment Name: At_Roots__P Parameter: Age (day) Value: 14 vs. 21
  misc_feature: MA Experiment 20000439 PARAMETER Experiment Name: At_Roots__P Parameter: Organism Value: A. thaliana
  misc_feature: MA Experiment 20000439 PARAMETER Experiment Name: At_Roots__P Parameter: Tissue Value: Roots vs. Whole Plant
  misc_feature: MA Experiment ID: 20000573 Result: Down-regulated in Transcription
  misc_feature: MA Experiment 20000573 PARAMETER Experiment Name: At_100uM_ABA_Mutants__P Parameter: Organism Value: A. thaliana
  misc_feature: MA Experiment 20000573 PARAMETER Experiment Name: At_100uM_ABA_Mutants__P Parameter: Plant Line Value: CS22 vs. Ler wt
  misc_feature: MA Experiment 20000573 PARAMETER Experiment Name: At_100uM_ABA_Mutants__P Parameter: Timepoint (hr) Value: N/A
  misc_feature: MA Experiment 20000573 PARAMETER Experiment Name: At_100uM_ABA_Mutants__P Parameter: Tissue Value: Whole Plant
  misc_feature: MA Experiment 20000573 PARAMETER Experiment Name: At_100uM_ABA_Mutants__P Parameter: Treatment Value: None
  misc_feature: MA Experiment ID: 20000574 Result: Down-regulated in Transcription
  misc_feature: MA Experiment 20000574 PARAMETER Experiment Name: At_100uM_ABA_Mutants__P Parameter: Organism Value: A. thaliana
  misc_feature: MA Experiment 20000574 PARAMETER Experiment Name: At_100uM_ABA_Mutants__P Parameter: Plant Line Value: CS23 vs. Ler wt
  misc_feature: MA Experiment 20000574 PARAMETER Experiment Name: At_100uM_ABA_Mutants__P Parameter: Timepoint (hr) Value: N/A
  misc_feature: MA Experiment 20000574 PARAMETER Experiment Name: At_100uM_ABA_Mutants__P Parameter: Tissue Value: Whole Plant
  misc_feature: MA Experiment 20000574 PARAMETER Experiment Name: At_100uM_ABA_Mutants__P Parameter: Treatment Value: None
  misc_feature: MA Experiment ID: 20000794 Result: Down-regulated in Transcription
  misc_feature: MA Experiment 20000794 PARAMETER Experiment Name: At_Petals_P Parameter: Age (day) Value: 23-25 days
  misc_feature: MA Experiment 20000794 PARAMETER Experiment Name: At_Petals_P Parameter: Plant Line Value: WS
  misc_feature: MA Experiment 20000794 PARAMETER Experiment Name: At_Petals_P Parameter: Tissue Value: Petals vs. Whole plant
  misc_feature: MA Experiment ID: 20001247 Result: Up-regulated in Transcription
  misc_feature: MA Experiment 20001247 PARAMETER Experiment Name: At_Far-red-induction_P Parameter: Age (day) Value: 7
  misc_feature: MA Experiment 20001247 PARAMETER Experiment Name: At_Far-red-induction_P Parameter: Light Value: Far-red vs. White
  misc_feature: MA Experiment 20001247 PARAMETER Experiment Name: At_Far-red-induction_P Parameter: Organism Value: A. thaliana
  misc_feature: MA Experiment 20001247 PARAMETER Experiment Name: At_Far-red-induction_P Parameter: Plant Line Value: Columbia
  misc_feature: MA Experiment 20001247 PARAMETER Experiment Name: At_Far-red-induction_P Parameter: Timepoint (hr) Value: 1
  misc_feature: MA Experiment 20001247 PARAMETER Experiment Name: At_Far-red-induction_P Parameter: Tissue Value: Whole Plant
  misc_feature: MA Experiment ID: 20001451 Result: Down-regulated in Transcription
  misc_feature: MA Experiment 20001451 PARAMETER Experiment Name: At_Far-red-induction_P Parameter: Age (day) Value: 7
  misc_feature: MA Experiment 20001451 PARAMETER Experiment Name: At_Far-red-induction_P Parameter: Light Value: Far-red vs. White
  misc_feature: MA Experiment 20001451 PARAMETER Experiment Name: At_Far-red-induction_P Parameter: Organism Value: A. thaliana
  misc_feature: MA Experiment 20001451 PARAMETER Experiment Name: At_Far-red-induction_P Parameter: Plant Line Value: Columbia
  misc_feature: MA Experiment 20001451 PARAMETER Experiment Name: At_Far-red-induction_P Parameter: Timepoint (hr) Value: 24
  misc_feature: MA Experiment 20001451 PARAMETER Experiment Name: At_Far-red-induction_P Parameter: Tissue Value: Whole Plant
  misc_feature: MA Experiment ID: 20001904 Result: Down-regulated in Transcription
  misc_feature: MA Experiment 20001904 PARAMETER Experiment Name: At_Drought_Reproduction_P Parameter: Age (day) Value: 37
  misc_feature: MA Experiment 20001904 PARAMETER Experiment Name: At_Drought_Reproduction_P Parameter: Organism Value: A. thaliana
  misc_feature: MA Experiment 20001904 PARAMETER Experiment Name: At_Drought_Reproduction_P Parameter: Plant Line Value: WS
  misc_feature: MA Experiment 20001904 PARAMETER Experiment Name: At_Drought_Reproduction_P Parameter: Timepoint (day) Value: 7
  misc_feature: MA Experiment 20001904 PARAMETER Experiment Name: At_Drought_Reproduction_P Parameter: Tissue Value: Rosettes
  misc_feature: MA Experiment 20001904 PARAMETER Experiment Name: At_Drought_Reproduction_P Parameter: Treatment Value: Drought vs. No Drought
  misc_feature: MA Experiment ID: 20001905 Result: Down-regulated in Transcription
  misc_feature: MA Experiment 20001905 PARAMETER Experiment Name: At_Drought_Reproduction_P Parameter: Age (day) Value: 40
  misc_feature: MA Experiment 20001905 PARAMETER Experiment Name: At_Drought_Reproduction_P Parameter: Organism Value: A. thaliana
  misc_feature: MA Experiment 20001905 PARAMETER Experiment Name: At_Drought_Reproduction_P Parameter: Plant Line Value: WS
  misc_feature: MA Experiment 20001905 PARAMETER Experiment Name: At_Drought_Reproduction_P Parameter: Timepoint (day) Value: 10
  misc_feature: MA Experiment 20001905 PARAMETER Experiment Name: At_Drought_Reproduction_P Parameter: Tissue Value: Rosettes
  misc_feature: MA Experiment 20001905 PARAMETER Experiment Name: At_Drought_Reproduction_P Parameter: Treatment Value: Drought vs. No Drought
  misc_feature: MA Experiment ID: 20001906 Result: Down-regulated in Transcription
  misc_feature: MA Experiment 20001906 PARAMETER Experiment Name: At_Drought_Reproduction_P Parameter: Age (day) Value: 35
  misc_feature: MA Experiment 20001906 PARAMETER Experiment Name: At_Drought_Reproduction_P Parameter: Organism Value: A. thaliana
  misc_feature: MA Experiment 20001906 PARAMETER Experiment Name: At_Drought_Reproduction_P Parameter: Plant Line Value: WS
  misc_feature: MA Experiment 20001906 PARAMETER Experiment Name: At_Drought_Reproduction_P Parameter: Timepoint (day) Value: 5
  misc_feature: MA Experiment 20001906 PARAMETER Experiment Name: At_Drought_Reproduction_P Parameter: Tissue Value: Siliques
  misc_feature: MA Experiment 20001906 PARAMETER Experiment Name: At_Drought_Reproduction_P Parameter: Treatment Value: Drought vs. No Drought
  misc_feature: MA Experiment ID: 20001907 Result: Down-regulated in Transcription
  misc_feature: MA Experiment 20001907 PARAMETER Experiment Name: At_Drought_Reproduction_P Parameter: Age (day) Value: 37
  misc_feature: MA Experiment 20001907 PARAMETER Experiment Name: At_Drought_Reproduction_P Parameter: Organism Value: A. thaliana
  misc_feature: MA Experiment 20001907 PARAMETER Experiment Name: At_Drought_Reproduction_P Parameter: Plant Line Value: WS
  misc_feature: MA Experiment 20001907 PARAMETER Experiment Name: At_Drought_Reproduction_P Parameter: Timepoint (day) Value: 7
  misc_feature: MA Experiment 20001907 PARAMETER Experiment Name: At_Drought_Reproduction_P Parameter: Tissue Value: Siliques
  misc_feature: MA Experiment 20001907 PARAMETER Experiment Name: At_Drought_Reproduction_P Parameter: Treatment Value: Drought vs. No Drought
aatcaaatttgtttcatatatcactcaaagcttgatgagaagaaacacagatcaagaaagcccaattatgtcttattactcctctttcttcttccttttcctcttctcctttctcacgagtttcagagtttctgctcaagatcccacttacgtataccacacctgtcaaaatacggcaaattacacaagtaacagcacttacaacaacaatctcaagacccttttggcttctctttcttcccgcaacgcttcctactccaccggattccaaaacgccaccgtcggccaagctccagacagagtcaccggacttttcaactgccgtggagatgtctcaacggaagtttgccgtagatgcgtctcctttgccgtcaacgacaccttaactcggtgtcctaaccagaaagaagccacactttattacgatgagtgtgtacttagatactctaaccagaatattctctcgacactaataaccaccggtggagttatcttggttaacacccggaatgtgacatctaaccaactagacctgttaagtgatttggttttgcctactctgaaccaagccgccaccgtagccttgaacagttccaaaaaattcggtacgagaaaaaacaattttactgcgttgcagagtttctatggactggttcagtgcacacctgatctcacgagacaagactgttcgcgttgtctccaactggtcatcaatcaaatacctactgacagaattggtgcaagaattattaatccgagctgtacttcaagatacgagatctacgcgttttacaccgaatccgccgttccaccaccaccaccaccaccgtcaatttctactcctccagtttcagctcctccgcgatctggaaaagatgggaattcaaaggtgttagtgatagccattgttgtgcctattatagtggctgttctgctttttatagctggttattgtttccttacaagaagggcaaggaagagttattacacaccatctgcatttgctggagatgatatcacaacagcagactcactacagcttgattatagaacaattcaaactgcaacagatgattttgtagagagtaataagattggtcaaggtggatttggtgaggtttacaagggtactttatcggatgggactgaagttgcggtgaagcgactatcaaagtcatcaggacaaggtgaagtagagttcaagaacgaggttgttcttgttgcaaagctacaacatagaaatctggttagacttcttgggttttgtctagacggagaagaaagagtactggtctacgagtatgtgcccaacaaaagtcttgattacttcctctttgaccctgcaaagaaaggccagctggattggactcgacgatacaagattatcggtggagttgctcgagggattctgtatcttcatcaagactcacgactcacaatcatacaccgtgacctcaaagccagtaacattctcttggacgcggatatgaatcctaaaattgcagattttggaatggctaggatctttggattggaccaaaccgaagagaacacaagcagaatagttggtacctatggttacatgtctcccgagtatgcaatgcatggtcagtactcaatgaaatctgatgtctatagcttcggagtgttagttcttgagattataagtggcaagaagaatagcagcttctaccaaacagatggtgcacatgacttggtctcatatgcttgggggctttggagtaacgggcgaccattagaactcgtggatccagctattgtagaaaattgccaaaggaatgaagttgttcgatgtgtccatatcggtcttttatgtgttcaagaagatcctgctgagcgtccgacgttgtcaaccattgttctgatgctcactagtaacactgtgactttacccgtgccacggcaacccggtcttttctttcagagtagaattggaaaagacccgcttgatacagatacaacgagcaaatctcttctagggtctgttgacgatgcatccatcacagatatacatcctcgatgatgatgagtttttcccttcatacctgattcctgaatctattggtgttgaaaataagttaaaaacttcttttgtt

SEQ ID NO: 100682 - protein, 680 aa, Arabidopsis thaliana
  peptide (1)..(680): Ceres Seq. ID no. 13605802
  misc_feature (23)..(680): Homolog of NCBI NO: 18416076 NR Description: serine threonine kinase - like protein
  misc_feature (23)..(680): Homolog of NCBI NO: 30686066 NR Description: serine threonine kinase - like protein
  misc_feature (23)..(680): Homolog of NCBI NO: 30686073 NR Description: serine/threonine kinase - like protein thaliana] >gi|22136670|gb|AAM91654.1| putative serine/threonine
  misc_feature (23)..(680): Homolog of NCBI NO: 7488193 NR Description: probable serine/threonine-specific protein kinase
  misc_feature (314)..(680): Homolog of NCBI NO: 15236415 NR Description: hypothetical protein [Arabidopsis thaliana]
  misc_feature (29)..(286): Homolog of NCBI NO: 15236415 NR Description: hypothetical protein [Arabidopsis thaliana]
  misc_feature (319)..(680): Homolog of NCBI NO: 15236447 NR Description: receptor-like protein kinase, putative
  misc_feature (23)..(266): Homolog of NCBI NO: 15236447 NR Description: receptor-like protein kinase, putative
  misc_feature (290)..(326): Homolog of NCBI NO: 15236447 NR Description: receptor-like protein kinase, putative
  misc_feature (217)..(680): Homolog of NCBI NO: 22655168 NR Description: protein kinase-like protein [Arabidopsis thaliana]
IKFVSYITQSLMRRNTDQESPIMSYYSSFFFLFLFSFLTSFRVSAQDPTYVYHTCQNTANYTSNSTYNNNLKTLLASLSSRNASYSTGFQNATVGQAPDRVTGLFNCRGDVSTEVCRRCVSFAVNDTLTRCPNQKEATLYYDECVLRYSNQNILSTLITTGGVILVNTRNVTSNQLDLLSDLVLPTLNQAATVALNSSKKFGTRKNNFTALQSFYGLVQCTPDLTRQDCSRCLQLVINQIPTDRIGARIINPSCTSRYEIYAFYTESAVPPPPPPPSISTPPVSAPPRSGKDGNSKVLVIAIVVPIIVAVLLFIAGYCFLTRRARKSYYTPSAFAGDDITTADSLQLDYRTIQTATDDFVESNKIGQGGFGEVYKGTLSDGTEVAVKRLSKSSGQGEVEFKNEVVLVAKLQHRNLVRLLGFCLDGEERVLVYEYVPNKSLDYFLFDPAKKGQLDWTRRYKIIGGVARGILYLHQDSRLTIIHRDLKASNILLDADMNPKIADFGMARIFGLDQTEENTSRIVGTYGYMSPEYAMHGQYSMKSDVYSFGVLVLEIISGKKNSSFYQTDGAHDLVSYAWGLWSNGRPLELVDPAIVENCQRNEVVRCVHIGLLCVQEDPAERPTLSTIVLMLTSNTVTLPVPRQPGLFFQSRIGKDPLDTDTTSKSLLGSVDDASITDIHPR

SEQ ID NO: 100683 - protein, 669 aa, Arabidopsis thaliana
  peptide (1)..(669): Ceres Seq. ID no. 13605803
  misc_feature (12)..(669): Homolog of NCBI NO: 18416076 NR Description: serine threonine kinase - like protein
  misc_feature (12)..(669): Homolog of NCBI NO: 30686066 NR Description: serine threonine kinase - like protein
  misc_feature (12)..(669): Homolog of NCBI NO: 30686073 NR Description: serine/threonine kinase - like protein thaliana] >gi|22136670|gb|AAM91654.1| putative serine/threonine
  misc_feature (12)..(669): Homolog of NCBI NO: 7488193 NR Description: probable serine/threonine-specific protein kinase
  misc_feature (303)..(669): Homolog of NCBI NO: 15236415 NR Description: hypothetical protein [Arabidopsis thaliana]
  misc_feature (18)..(275): Homolog of NCBI NO: 15236415 NR Description: hypothetical protein [Arabidopsis thaliana]
  misc_feature (308)..(669): Homolog of NCBI NO: 15236447 NR Description: receptor-like protein kinase, putative
  misc_feature (12)..(255): Homolog of NCBI NO: 15236447 NR Description: receptor-like protein kinase, putative
  misc_feature (279)..(315): Homolog of NCBI NO: 15236447 NR Description: receptor-like protein kinase, putative
  misc_feature (206)..(669): Homolog of NCBI NO: 22655168 NR Description: protein kinase-like protein [Arabidopsis thaliana]
MRRNTDQESPIMSYYSSFFFLFLFSFLTSFRVSAQDPTYVYHTCQNTANYTSNSTYNNNLKTLLASLSSRNASYSTGFQNATVGQAPDRVTGLFNCRGDVSTEVCRRCVSFAVNDTLTRCPNQKEATLYYDECVLRYSNQNILSTLITTGGVILVNTRNVTSNQLDLLSDLVLPTLNQAATVALNSSKKFGTRKNNFTALQSFYGLVQCTPDLTRQDCSRCLQLVINQIPTDRIGARIINPSCTSRYEIYAFYTESAVPPPPPPPSISTPPVSAPPRSGKDGNSKVLVIAIVVPIIVAVLLFIAGYCFLTRRARKSYYTPSAFAGDDITTADSLQLDYRTIQTATDDFVESNKIGQGGFGEVYKGTLSDGTEVAVKRLSKSSGQGEVEFKNEVVLVAKLQHRNLVRLLGFCLDGEERVLVYEYVPNKSLDYFLFDPAKKGQLDWTRRYKIIGGVARGILYLHQDSRLTIIHRDLKASNILLDADMNPKIADFGMARIFGLDQTEENTSRIVGTYGYMSPEYAMHGQYSMKSDVYSFGVLVLEIISGKKNSSFYQTDGAHDLVSYAWGLWSNGRPLELVDPAIVENCQRNEVVRCVHIGLLCVQEDPAERPTLSTIVLMLTSNTVTLPVPRQPGLFFQSRIGKDPLDTDTTSKSLLGSVDDASITDIHPR

SEQ ID NO: 100684 - protein, 658 aa, Arabidopsis thaliana
  peptide (1)..(658): Ceres Seq. ID no. 13605804
  misc_feature (1)..(658): Homolog of NCBI NO: 18416076 NR Description: serine threonine kinase - like protein
  misc_feature (1)..(658): Homolog of NCBI NO: 30686066 NR Description: serine threonine kinase - like protein
  misc_feature (1)..(658): Homolog of NCBI NO: 30686073 NR Description: serine/threonine kinase - like protein thaliana] >gi|22136670|gb|AAM91654.1| putative serine/threonine
  misc_feature (1)..(658): Homolog of NCBI NO: 7488193 NR Description: probable serine/threonine-specific protein kinase
  misc_feature (292)..(658): Homolog of NCBI NO: 15236415 NR Description: hypothetical protein [Arabidopsis thaliana]
  misc_feature (7)..(264): Homolog of NCBI NO: 15236415 NR Description: hypothetical protein [Arabidopsis thaliana]
  misc_feature (297)..(658): Homolog of NCBI NO: 15236447 NR Description: receptor-like protein kinase, putative
  misc_feature (1)..(244): Homolog of NCBI NO: 15236447 NR Description: receptor-like protein kinase, putative
  misc_feature (268)..(304): Homolog of NCBI NO: 15236447 NR Description: receptor-like protein kinase, putative
  misc_feature (195)..(658): Homolog of NCBI NO: 22655168 NR Description: protein kinase-like protein [Arabidopsis thaliana]
MSYYSSFFFLFLFSFLTSFRVSAQDPTYVYHTCQNTANYTSNSTYNNNLKTLLASLSSRNASYSTGFQNATVGQAPDRVTGLFNCRGDVSTEVCRRCVSFAVNDTLTRCPNQKEATLYYDECVLRYSNQNILSTLITTGGVILVNTRNVTSNQLDLLSDLVLPTLNQAATVALNSSKKFGTRKNNFTALQSFYGLVQCTPDLTRQDCSRCLQLVINQIPTDRIGARIINPSCTSRYEIYAFYTESAVPPPPPPPSISTPPVSAPPRSGKDGNSKVLVIAIVVPIIVAVLLFIAGYCFLTRRARKSYYTPSAFAGDDITTADSLQLDYRTIQTATDDFVESNKIGQGGFGEVYKGTLSDGTEVAVKRLSKSSGQGEVEFKNEVVLVAKLQHRNLVRLLGFCLDGEERVLVYEYVPNKSLDYFLFDPAKKGQLDWTRRYKIIGGVARGILYLHQDSRLTIIHRDLKASNILLDADMNPKIADFGMARIFGLDQTEENTSRIVGTYGYMSPEYAMHGQYSMKSDVYSFGVLVLEIISGKKNSSFYQTDGAHDLVSYAWGLWSNGRPLELVDPAIVENCQRNEVVRCVHIGLLCVQEDPAERPTLSTIVLMLTSNTVTLPVPRQPGLFFQSRIGKDPLDTDTTSKSLLGSVDDASITDIHPR

SEQ ID NO: 100685 - DNA, 1440 bp, Arabidopsis thaliana
  misc_feature (1)..(1440): Ceres Seq. ID no. 13605824
  misc_feature: MA Experiment ID: 108434 Result: Down-regulated in Transcription
  misc_feature: MA Experiment 108434 PARAMETER Experiment Name: At_Root_Tips_cDNA_P Parameter: Tissue Value: Root Tips
  misc_feature: MA Experiment ID: 108461 Result: Up-regulated in Transcription
  misc_feature: MA Experiment 108461 PARAMETER Experiment Name: At_Germinating_Seeds_cDNA_P Parameter: Age (day) Value: 1 vs. 0
  misc_feature: MA Experiment 108461 PARAMETER Experiment Name: At_Germinating_Seeds_cDNA_P Parameter: Tissue Value: Germinating Seeds
  misc_feature: MA Experiment ID: 108462 Result: Up-regulated in Transcription
  misc_feature: MA Experiment 108462 PARAMETER Experiment Name: At_Germinating_Seeds_cDNA_P Parameter: Age (day) Value: 2 vs. 0
  misc_feature: MA Experiment 108462 PARAMETER Experiment Name: At_Germinating_Seeds_cDNA_P Parameter: Tissue Value: Germinating Seeds
  misc_feature: MA Experiment ID: 108463 Result: Up-regulated in Transcription
  misc_feature: MA Experiment 108463 PARAMETER Experiment Name: At_Germinating_Seeds_cDNA_P Parameter: Age (day) Value: 3 vs. 0
  misc_feature: MA Experiment 108463 PARAMETER Experiment Name: At_Germinating_Seeds_cDNA_P Parameter: Tissue Value: Germinating Seeds
  misc_feature: MA Experiment ID: 108464 Result: Up-regulated in Transcription
  misc_feature: MA Experiment 108464 PARAMETER Experiment Name: At_Germinating_Seeds_cDNA_P Parameter: Age (day) Value: 4 vs. 0
  misc_feature: MA Experiment 108464 PARAMETER Experiment Name: At_Germinating_Seeds_cDNA_P Parameter: Tissue Value: Germinating Seeds
  misc_feature: MA Experiment ID: 108488 Result: Down-regulated in Transcription
  misc_feature: MA Experiment ID: 108579 Result: Up-regulated in Transcription
  misc_feature: MA Experiment 108579 PARAMETER Experiment Name: At_4deg_Cold_cDNA_P Parameter: Temperature (deg C) Value: 4 vs. 22
  misc_feature: MA Experiment 108579 PARAMETER Experiment Name: At_4deg_Cold_cDNA_P Parameter: Timepoint (hr) Value: 6
  misc_feature: MA Experiment 108579 PARAMETER Experiment Name: At_4deg_Cold_cDNA_P Parameter: Tissue Value: Aerial
  misc_feature: MA Experiment ID: 20000069 Result: Down-regulated in Transcription
  misc_feature: MA Experiment 20000069 PARAMETER Experiment Name: At_100uM_ABA_Mutants_cDNA_P Parameter: Plant Line Value: CS23
  misc_feature: MA Experiment 20000069 PARAMETER Experiment Name: At_100uM_ABA_Mutants_cDNA_P Parameter: Timepoint (hr) Value: 6
  misc_feature: MA Experiment 20000069 PARAMETER Experiment Name: At_100uM_ABA_Mutants_cDNA_P Parameter: Tissue Value: Aerial
  misc_feature: MA Experiment 20000069 PARAMETER Experiment Name: At_100uM_ABA_Mutants_cDNA_P Parameter: Treatment Value: 100uM ABA vs. No Treatment
  misc_feature: MA Experiment ID: 20000071 Result: Down-regulated in Transcription
  misc_feature: MA Experiment 20000071 PARAMETER Experiment Name: At_100uM_ABA_Mutants_cDNA_P Parameter: Plant Line Value: CS8104
  misc_feature: MA Experiment 20000071 PARAMETER Experiment Name: At_100uM_ABA_Mutants_cDNA_P Parameter: Timepoint (hr) Value: 6
  misc_feature: MA Experiment 20000071 PARAMETER Experiment Name: At_100uM_ABA_Mutants_cDNA_P Parameter: Tissue Value: Aerial
  misc_feature: MA Experiment 20000071 PARAMETER Experiment Name: At_100uM_ABA_Mutants_cDNA_P Parameter: Treatment Value: 100uM ABA vs. No Treatment
  misc_feature: MA Experiment ID: 20000072 Result: Down-regulated in Transcription
  misc_feature: MA Experiment 20000072 PARAMETER Experiment Name: At_100uM_ABA_Mutants_cDNA_P Parameter: Plant Line Value: CS8105
  misc_feature: MA Experiment 20000072 PARAMETER Experiment Name: At_100uM_ABA_Mutants_cDNA_P Parameter: Timepoint (hr) Value: 6
  misc_feature: MA Experiment 20000072 PARAMETER Experiment Name: At_100uM_ABA_Mutants_cDNA_P Parameter: Tissue Value: Aerial
  misc_feature: MA Experiment 20000072 PARAMETER Experiment Name: At_100uM_ABA_Mutants_cDNA_P Parameter: Treatment Value: 100uM ABA vs. No Treatment
  misc_feature: MA Experiment ID: 20000086 Result: Down-regulated in Transcription
  misc_feature: MA Experiment 20000086 PARAMETER Experiment Name: At_100uM_ABA_Mutants_cDNA_P Parameter: Plant Line Value: CS22
  misc_feature: MA Experiment 20000086 PARAMETER Experiment Name: At_100uM_ABA_Mutants_cDNA_P Parameter: Timepoint (hr) Value: 6
  misc_feature: MA Experiment 20000086 PARAMETER Experiment Name: At_100uM_ABA_Mutants_cDNA_P Parameter: Tissue Value: Aerial
  misc_feature: MA Experiment 20000086 PARAMETER Experiment Name: At_100uM_ABA_Mutants_cDNA_P Parameter: Treatment Value: 100uM ABA vs. No Treatment
  misc_feature: MA Experiment ID: 20000087 Result: Down-regulated in Transcription
  misc_feature: MA Experiment 20000087 PARAMETER Experiment Name: At_100uM_ABA_Mutants_cDNA_P Parameter: Plant Line Value: WS
  misc_feature: MA Experiment 20000087 PARAMETER Experiment Name: At_100uM_ABA_Mutants_cDNA_P Parameter: Timepoint (hr) Value: 6
  misc_feature: MA Experiment 20000087 PARAMETER Experiment Name: At_100uM_ABA_Mutants_cDNA_P Parameter: Tissue Value: Aerial
  misc_feature: MA Experiment 20000087 PARAMETER Experiment Name: At_100uM_ABA_Mutants_cDNA_P Parameter: Treatment Value: 100uM ABA vs. No Treatment
  misc_feature: MA Experiment ID: 20000089 Result: Down-regulated in Transcription
  misc_feature: MA Experiment ID: 20000090 Result: Down-regulated in Transcription
  misc_feature: MA Experiment ID: 20000179 Result: Up-regulated in Transcription
  misc_feature: MA Experiment 20000179 PARAMETER Experiment Name: At_Germinating_Seeds_P Parameter: Age (hr) Value: 6 vs. 0
  misc_feature: MA Experiment 20000179 PARAMETER Experiment Name: At_Germinating_Seeds_P Parameter: Tissue Value: Germinating Seeds
  misc_feature: MA Experiment ID: 20000180 Result: Up-regulated in Transcription
  misc_feature: MA Experiment 20000180 PARAMETER Experiment Name: At_Germinating_Seeds_P Parameter: Age (hr) Value: 24 vs. 0
  misc_feature: MA Experiment 20000180 PARAMETER Experiment Name: At_Germinating_Seeds_P Parameter: Tissue Value: Germinating Seeds
  misc_feature: MA Experiment ID: 20000794 Result: Up-regulated in Transcription
  misc_feature: MA Experiment 20000794 PARAMETER Experiment Name: At_Petals_P Parameter: Age (day) Value: 23-25 days
  misc_feature: MA Experiment 20000794 PARAMETER Experiment Name: At_Petals_P Parameter: Plant Line Value: WS
  misc_feature: MA Experiment 20000794 PARAMETER Experiment Name: At_Petals_P Parameter: Tissue Value: Petals vs. Whole plant
  misc_feature: MA Experiment ID: 20001248 Result: Down-regulated in Transcription
  misc_feature: MA Experiment 20001248 PARAMETER Experiment Name: At_Far-red-induction_P Parameter: Age (day) Value: 7
  misc_feature: MA Experiment 20001248 PARAMETER Experiment Name: At_Far-red-induction_P Parameter: Light Value: Far-red vs. White
  misc_feature: MA Experiment 20001248 PARAMETER Experiment Name: At_Far-red-induction_P Parameter: Organism Value: A. thaliana
  misc_feature: MA Experiment 20001248 PARAMETER Experiment Name: At_Far-red-induction_P Parameter: Plant Line Value: Columbia
  misc_feature: MA Experiment 20001248 PARAMETER Experiment Name: At_Far-red-induction_P Parameter: Timepoint (hr) Value: 4
  misc_feature: MA Experiment 20001248 PARAMETER Experiment Name: At_Far-red-induction_P Parameter: Tissue Value: Whole Plant
  misc_feature: MA Experiment ID: 20001757 Result: Down-regulated in Transcription
  misc_feature: MA Experiment 20001757 PARAMETER Experiment Name: At_50mM_NH4NO3_L-to-H_P Parameter: Timepoint (hr) Value: 6
  misc_feature: MA Experiment 20001757 PARAMETER Experiment Name: At_50mM_NH4NO3_L-to-H_P Parameter: Tissue Value: Leaf
  misc_feature: MA Experiment 20001757 PARAMETER Experiment Name: At_50mM_NH4NO3_L-to-H_P Parameter: Treatment Value: 50mM NH4NO3 vs 100mM Mannitol
tttctttcttcttcttccgtttcttttgcctctttcttttgtcttcttccttctatttttttgtggctttaaatttattgggttttgttcttcttcttcttctatagccgtttcatcttcacaatagcatcttcttctttttttccctgtcaagatcctgaatcatcggatctagaaggaaactagagtttgtgaaatcagattaaatcttgtgagaaatctctgaaaaagctgcaggtttctatacttctgttagtactctaattcaaccgagaaagtcgaatacatacacacattcataacacttttgaggaagatgttaagtggaaacaatggaaacactgcaccaccggttttcatgaacgagaaccagttgcaataccagacaaacctacgatcgaatcagcttcacttgctcggaaacatgggaggtggatgcactgttgatccagtaaactactttgctaacgataacctcgttccaatgatccgccctaacaaaagaggaagggaagccgaaagcattagtaacaacatccaaagacaacagcagaagcttcaaatgtctttgaactataattataacaacactagtgttcgagaagaagtgcctaaagagaatctagtctcaactggtctgagactatcttatgacgacgatgaacacaattcttcagtgacttctgctagtggtagcattttagctgcttctccaatctttcagtcactcgatgatagtcttcggattgatctccatagacaaaaagatgagtttgaccagttcatcaagatccaggcagctcaaatggcgaaaggtgtgagggatatgaaacagagacacatcgcgtcttttctcacaacattagagaaaggagtgagcaagaagcttcaagagaaagatcacgagatcaatgatatgaacaagaagaataaagagcttgtggagcggataaagcaagtggcaatggaagctcagaattggcactacagagcaaagtacaatgagtctgtggttaatgtcttaaaggcaaatctccaacaagcaatgtcacacaacaacagtgtgatagctgctgcagatcaaggcaaagaaggttttggagacagcgaaatagatgatgcagcttcatcatacatcgatccaaacaacaataacaacaacaacatggggattcatcagaggatgagatgcaaaatgtgcaacgtcaaggaagtatcggtgttgatagtgccatgtcggcacttgagtttgtgtaaagaatgtgatgtattcactaagatttgtcctgtatgcaagtctttgaaaagttcttgcgtccaagtcttcttttcttgatttgtgaccaaatggaacagaaggaaaaagagaatccattatataagtctttcatactctttttaaaaaaatattttgttatataaatttatttgtatcggtgt

SEQ ID NO: 100686 - protein, 339 aa, Arabidopsis thaliana
  peptide (1)..(339): Ceres Seq. ID no. 13605825
  misc_feature (292)..(326): Pfam Name: Zinc finger, C3HC4 type (RING finger) Pfam Description: Zinc finger, C3HC4 type (RING finger)
  misc_feature (1)..(339): Homolog of NCBI NO: 15220181 NR Description: conserved hypothetical protein [Arabidopsis
  misc_feature (156)..(339): Homolog of NCBI NO: 6573749 NR Description: F20B24.9 [Arabidopsis thaliana]
  misc_feature (1)..(160): Homolog of NCBI NO: 6573749 NR Description: F20B24.9 [Arabidopsis thaliana]
  misc_feature (1)..(339): Homolog of NCBI NO: 21536706 NR Description: S-ribonuclease binding protein SBP1, putative
  misc_feature (1)..(338): Homolog of NCBI NO: 15219772 NR Description: conserved hypothetical protein [Arabidopsis
  misc_feature (13)..(338): Homolog of NCBI NO: 25404279 NR Description: hypothetical protein F8A5.13 [imported] - thaliana >gi|2462754|gb|AAB71973.1| Unknown protein [Arabidopsis
  misc_feature (75)..(337): Homolog of NCBI NO: 15220096 NR Description: conserved hypothetical protein [Arabidopsis
  misc_feature (75)..(337): Homolog of NCBI NO: 6760451 NR Description: S-ribonuclease binding protein SBP1 [Petunia x
  misc_feature (18)..(337): Homolog of NCBI NO: 40807658 NR Description: S-RNase-binding protein [Solanum chacoense]
  misc_feature (77)..(337): Homolog of NCBI NO: 34902144 NR Description: unknown protein [Oryza sativa (japonica
MLSGNNGNTAPPVFMNENQLQYQTNLRSNQLHLLGNMGGGCTVDPVNYFANDNLVPMIRPNKRGREAESISNNIQRQQQKLQMSLNYNYNNTSVREEVPKENLVSTGLRLSYDDDEHNSSVTSASGSILAASPIFQSLDDSLRIDLHRQKDEFDQFIKIQAAQMAKGVRDMKQRHIASFLTTLEKGVSKKLQEKDHEINDMNKKNKELVERIKQVAMEAQNWHYRAKYNESVVNVLKANLQQAMSHNNSVIAAADQGKEGFGDSEIDDAASSYIDPNNNNNNNMGIHQRMRCKMCNVKEVSVLIVPCRHLSLCKECDVFTKICPVCKSLKSSCVQVFFS

SEQ ID NO: 100687 - protein, 325 aa, Arabidopsis thaliana
  peptide (1)..(325): Ceres Seq. ID no. 13605826
  misc_feature (278)..(312): Pfam Name: Zinc finger, C3HC4 type (RING finger) Pfam Description: Zinc finger, C3HC4 type (RING finger)
  misc_feature (1)..(325): Homolog of NCBI NO: 15220181 NR Description: conserved hypothetical protein [Arabidopsis
  misc_feature (142)..(325): Homolog of NCBI NO: 6573749 NR Description: F20B24.9 [Arabidopsis thaliana]
  misc_feature (1)..(146): Homolog of NCBI NO: 6573749 NR Description: F20B24.9 [Arabidopsis thaliana]
  misc_feature (1)..(325): Homolog of NCBI NO: 21536706 NR Description: S-ribonuclease binding protein SBP1, putative
  misc_feature (1)..(324): Homolog of NCBI NO: 15219772 NR Description: conserved hypothetical protein [Arabidopsis
  misc_feature (1)..(324): Homolog of NCBI NO: 25404279 NR Description: hypothetical protein F8A5.13 [imported] - thaliana >gi|2462754|gb|AAB71973.1| Unknown protein [Arabidopsis
  misc_feature (61)..(323): Homolog of NCBI NO: 15220096 NR Description: conserved hypothetical protein [Arabidopsis
  misc_feature (61)..(323): Homolog of NCBI NO: 6760451 NR Description: S-ribonuclease binding protein SBP1 [Petunia x
  misc_feature (4)..(323): Homolog of NCBI NO: 40807658 NR Description: S-RNase-binding protein [Solanum chacoense]
  misc_feature (63)..(323): Homolog of NCBI NO: 34902144 NR Description: unknown protein [Oryza sativa (japonica
MNENQLQYQTNLRSNQLHLLGNMGGGCTVDPVNYFANDNLVPMIRPNKRGREAESISNNIQRQQQKLQMSLNYNYNNTSVREEVPKENLVSTGLRLSYDDDEHNSSVTSASGSILAASPIFQSLDDSLRIDLHRQKDEFDQFIKIQAAQMAKGVRDMKQRHIASFLTTLEKGVSKKLQEKDHEINDMNKKNKELVERIKQVAMEAQNWHYRAKYNESVVNVLKANLQQAMSHNNSVIAAADQGKEGFGDSEIDDAASSYIDPNNNNNNNMGIHQRMRCKMCNVKEVSVLIVPCRHLSLCKECDVFTKICPVCKSLKSSCVQVFFS

SEQ ID NO: 100688 - protein, 303 aa, Arabidopsis thaliana
  peptide (1)..(303): Ceres Seq. ID no. 13605827
  misc_feature (256)..(290): Pfam Name: Zinc finger, C3HC4 type (RING finger) Pfam Description: Zinc finger, C3HC4 type (RING finger)
  misc_feature (1)..(303): Homolog of NCBI NO: 15220181 NR Description: conserved hypothetical protein [Arabidopsis
  misc_feature (120)..(303): Homolog of NCBI NO: 6573749 NR Description: F20B24.9 [Arabidopsis thaliana]
  misc_feature (1)..(124): Homolog of NCBI NO: 6573749 NR Description: F20B24.9 [Arabidopsis thaliana]
  misc_feature (1)..(303): Homolog of NCBI NO: 21536706 NR Description: S-ribonuclease binding protein SBP1, putative
  misc_feature (1)..(302): Homolog of NCBI NO: 15219772 NR Description: conserved hypothetical protein [Arabidopsis
  misc_feature (1)..(302): Homolog of NCBI NO: 25404279 NR Description: hypothetical protein F8A5.13 [imported] - thaliana >gi|2462754|gb|AAB71973.1| Unknown protein [Arabidopsis
  misc_feature (39)..(301): Homolog of NCBI NO: 15220096 NR Description: conserved hypothetical protein [Arabidopsis
  misc_feature (39)..(301): Homolog of NCBI NO: 6760451 NR Description: S-ribonuclease binding protein SBP1 [Petunia x
  misc_feature (1)..(301): Homolog of NCBI NO: 40807658 NR Description: S-RNase-binding protein [Solanum chacoense]
  misc_feature (41)..(301): Homolog of NCBI NO: 34902144 NR Description: unknown protein [Oryza sativa (japonica
MGGGCTVDPVNYFANDNLVPMIRPNKRGREAESISNNIQRQQQKLQMSLNYNYNNTSVREEVPKENLVSTGLRLSYDDDEHNSSVTSASGSILAASPIFQSLDDSLRIDLHRQKDEFDQFIKIQAAQMAKGVRDMKQRHIASFLTTLEKGVSKKLQEKDHEINDMNKKNKELVERIKQVAMEAQNWHYRAKYNESVVNVLKANLQQAMSHNNSVIAAADQGKEGFGDSEIDDAASSYIDPNNNNNNNMGIHQRMRCKMCNVKEVSVLIVPCRHLSLCKECDVFTKICPVCKSLKSSCVQVFFS

SEQ ID NO: 100689 - DNA, 1792 bp, Arabidopsis thaliana
  misc_feature (1)..(1792): Ceres Seq. ID no. 13605828
  misc_feature: MA Experiment ID: 20000179 Result: Down-regulated in Transcription
  misc_feature: MA Experiment 20000179 PARAMETER Experiment Name: At_Germinating_Seeds_P Parameter: Age (hr) Value: 6 vs. 0
  misc_feature: MA Experiment 20000179 PARAMETER Experiment Name: At_Germinating_Seeds_P Parameter: Tissue Value: Germinating Seeds
  misc_feature: MA Experiment ID: 20000180 Result: Down-regulated in Transcription
  misc_feature: MA Experiment 20000180 PARAMETER Experiment Name: At_Germinating_Seeds_P Parameter: Age (hr) Value: 24 vs. 0
  misc_feature: MA Experiment 20000180 PARAMETER Experiment Name: At_Germinating_Seeds_P Parameter: Tissue Value: Germinating Seeds
  misc_feature: MA Experiment ID: 20001557 Result: Up-regulated in Transcription
  misc_feature: MA Experiment 20001557 PARAMETER Experiment Name: At_Drought_Soil_Dry_P Parameter: Age (day) Value: 27
  misc_feature: MA Experiment 20001557 PARAMETER Experiment Name: At_Drought_Soil_Dry_P Parameter: Organism Value: A. thaliana
  misc_feature: MA Experiment 20001557 PARAMETER Experiment Name: At_Drought_Soil_Dry_P Parameter: Plant Line Value: WS
  misc_feature: MA Experiment 20001557 PARAMETER Experiment Name: At_Drought_Soil_Dry_P Parameter: Post Timepoint (hr) Value: 3
  misc_feature: MA Experiment 20001557 PARAMETER Experiment Name: At_Drought_Soil_Dry_P Parameter: Post-Treatment Value: Re-Water vs. No Drought
  misc_feature: MA Experiment 20001557 PARAMETER Experiment Name: At_Drought_Soil_Dry_P Parameter: Timepoint (day) Value: 13
  misc_feature: MA Experiment 20001557 PARAMETER Experiment Name: At_Drought_Soil_Dry_P Parameter: Treatment Value: Drought vs. No Drought
  misc_feature: MA Experiment ID: 20001757 Result: Up-regulated in Transcription
  misc_feature: MA Experiment 20001757 PARAMETER Experiment Name: At_50mM_NH4NO3_L-to-H_P Parameter: Timepoint (hr) Value: 6
  misc_feature: MA Experiment 20001757 PARAMETER Experiment Name: At_50mM_NH4NO3_L-to-H_P Parameter: Tissue Value: Leaf
  misc_feature: MA Experiment 20001757 PARAMETER Experiment Name: At_50mM_NH4NO3_L-to-H_P Parameter: Treatment Value: 50mM NH4NO3 vs 100mM Mannitol
  misc_feature (1520)..(1520): n is a, c, t, g, unknown, or other
  misc_feature (1521)..(1521): n is a, c, t, g, unknown, or other
  misc_feature (1558)..(1558): n is a, c, t, g, unknown, or other
  misc_feature (1565)..(1565): n is a, c, t, g, unknown, or other
  misc_feature (1570)..(1570): n is a, c, t, g, unknown, or other
  misc_feature (1574)..(1574): n is a, c, t, g, unknown, or other
atgataactggatacagcacgccaagtgcacatgttctaatgagctctcgggcattcaagtcatcatcatatagagctgcagcaggacagactcaacattatcttgctcgaagttcattgcctgtcgtaaagaactcgtggggatcaccaccttcacctttcaatgagcttccgagagtgtcaagaggcatgtgtgcctctgtcatatctctcagcctcgtcttctctgcttctgaatggagaacaagaaaaactcttttgactccacgagcgtcaaaagatgtaccttctagcttccgatttcccccgatgaccaagaagccacaatggtggtggagaactttggcttgcctgccttacctaatgccactgcatgaaacttggatgtatgcagaaaccgcttaccatctccacccattcctagaagattttgaattcttaacctacccatttctaggcgccataggaagattaccaagctggttcctcatggcttacttttttgtagcttatctagggatagtgcgaagaaaagaatggcctcacttcttcaggttccatgtagtgatgggtatgctgcttgaaatcgcactccaggttatagggaccgttagcaagtggatgcctcttggagtctattggggtaagtttgggatgcatttctggactgctgttgcgtttgcttatctgtttaccgtccttgaaagcatacggtgtgcacttgcggcccacaagcagcgaacaggttgtaccggaaaaaggaagttcaccgacgtcgttcccctctccaagttcgacgacaatctcctcctctctgtgataaagaatcatctcaagcctggcccctggattcacaagctcaagcctttttgtgatgtggatcttgattctctcaaactttttatacgccaatacccaaagggtgcaaaggctcctttcaaggagctggacatcaaagctcctttgaggaaacagcttgccaaagttgttatattagagtacccggtgatccatgtatatctaccttcacagagctatgaatttaaagttatcaaagactttaacacgacacctaatcctaatgattcgttatacgatggtcatggatgcacaaatggtataaccttccgagaagaagaaatagaagaagacgacattgactcctttgagccagaggttcttggtcttatgaaacaaatgaactataacccgtgtctgcgagtctcagagaaaagcaaggcagagggcgttggtaccaacaactcaaatcctcaggttgataccacagaacaagaagatgccggtaacatggagcttgaatttgagcaagggttaatagacacatactcagatctttttgcggagatgaacccaggtgactatttcaactttgaatgtgaatttgcaaaggggttggattcggatgataattgcaatctccaaaatttagatactgatttcatcgctgatggactagatttagaagaaggggaaatcgtcgaatgatggtcatagtcttnntctggcaaaaaggaattactctctgtgaaacattttngaggatnatgtncatncctgaagctctcttgttcgagcacattagctatacttggtaatagccaaagcttttactggaatgcaataagccacagcactgatggtcataagttttcggtctgggctttgatcaacaggtatttcttttgtagtaaaccagattactaggctgttctgtggtttgtagcaaacttgattgtttacatacaagatagttaacttaagaatgtctccg

SEQ ID NO: 100690 - protein, 501 aa, Arabidopsis thaliana
  peptide (1)..(501): Ceres Seq. ID no. 13605829
  misc_feature (1)..(501): Homolog of NCBI NO: 15220356 NR Description: expressed protein [Arabidopsis thaliana]
  misc_feature (308)..(501): Homolog of NCBI NO: 25406822 NR Description: hypothetical protein [imported] - Arabidopsis >gi|7211996|gb|AAF40467.1|AC004809_25 #ESTs gb|N96604, gb|T75857 and gb|H77171 come from this gene. [Arabidopsis
  misc_feature (1)..(83): Homolog of NCBI NO: 25406822 NR Description: hypothetical protein [imported] - Arabidopsis >gi|7211996|gb|AAF40467.1|AC004809_25 #ESTs gb|N96604, gb|T75857 and gb|H77171 come from this gene. [Arabidopsis
  misc_feature (179)..(242): Homolog of NCBI NO: 25406822 NR Description: hypothetical protein [imported] - Arabidopsis >gi|7211996|gb|AAF40467.1|AC004809_25 #ESTs gb|N96604, gb|T75857 and gb|H77171 come from this gene. [Arabidopsis
  misc_feature (1)..(242): Homolog of NCBI NO: 26449432 NR Description: unknown protein [Arabidopsis thaliana]
  misc_feature (83)..(242): Homolog of NCBI NO: 6984128 NR Description: Tic20-like protein [Euphorbia esula]
  misc_feature (84)..(241): Homolog of NCBI NO: 3769673 NR Description: Tic20 [Pisum sativum]
  misc_feature (97)..(242): Homolog of NCBI NO: 34393290 NR Description: putative Tic20 protein [Oryza sativa (japonica
  misc_feature (97)..(242): Homolog of NCBI NO: 34899836 NR Description: putative Tic20 protein [Oryza sativa (japonica
  misc_feature (81)..(242): Homolog of NCBI NO: 15236283 NR Description: chloroplast protein import component -related thaliana] >gi|25407184|pir||B85042 probable chloroplast protein
MITGYSTPSAHVLMSSRAFKSSSYRAAAGQTQHYLARSSLPVVKNSWGSPPSPFNELPRVSRGMCASVISLSLVFSASEWRTRKTLLTPRASKDVPSSFRFPPMTKKPQWWWRTLACLPYLMPLHETWMYAETAYHLHPFLEDFEFLTYPFLGAIGRLPSWFLMAYFFVAYLGIVRRKEWPHFFRFHVVMGMLLEIALQVIGTVSKWMPLGVYWGKFGMHFWTAVAFAYLFTVLESIRCALAAHKQRTGCTGKRKFTDVVPLSKFDDNLLLSVIKNHLKPGPWIHKLKPFCDVDLDSLKLFIRQYPKGAKAPFKELDIKAPLRKQLAKVVILEYPVIHVYLPSQSYEFKVIKDFNTTPNPNDSLYDGHGCTNGITFREEEIEEDDIDSFEPEVLGLMKQMNYNPCLRVSEKSKAEGVGTNNSNPQVDTTEQEDAGNMELEFEQGLIDTYSDLFAEMNPGDYFNFECEFAKGLDSDDNCNLQNLDTDFIADGLDLEEGEIVE

SEQ ID NO: 100691 - protein, 488 aa, Arabidopsis thaliana
  peptide (1)..(488): Ceres Seq. ID no. 13605830
  misc_feature (1)..(488): Homolog of NCBI NO: 15220356 NR Description: expressed protein [Arabidopsis thaliana]
  misc_feature (295)..(488): Homolog of NCBI NO: 25406822 NR Description: hypothetical protein [imported] - Arabidopsis >gi|7211996|gb|AAF40467.1|AC004809_25 #ESTs gb|N96604, gb|T75857 and gb|H77171 come from this gene. [Arabidopsis
  misc_feature (1)..(70): Homolog of NCBI NO: 25406822 NR Description: hypothetical protein [imported] - Arabidopsis >gi|7211996|gb|AAF40467.1|AC004809_25 #ESTs gb|N96604, gb|T75857 and gb|H77171 come from this gene. [Arabidopsis
  misc_feature (166)..(229): Homolog of NCBI NO: 25406822 NR Description: hypothetical protein [imported] - Arabidopsis >gi|7211996|gb|AAF40467.1|AC004809_25 #ESTs gb|N96604, gb|T75857 and gb|H77171 come from this gene. [Arabidopsis
  misc_feature (1)..(229): Homolog of NCBI NO: 26449432 NR Description: unknown protein [Arabidopsis thaliana]
  misc_feature (70)..(229): Homolog of NCBI NO: 6984128 NR Description: Tic20-like protein [Euphorbia esula]
  misc_feature (71)..(228): Homolog of NCBI NO: 3769673 NR Description: Tic20 [Pisum sativum]
  misc_feature (84)..(229): Homolog of NCBI NO: 34393290 NR Description: putative Tic20 protein [Oryza sativa (japonica
  misc_feature (84)..(229): Homolog of NCBI NO: 34899836 NR Description: putative Tic20 protein [Oryza sativa (japonica
  misc_feature (68)..(229): Homolog of NCBI NO: 15236283 NR Description: chloroplast protein import component -related thaliana] >gi|25407184|pir||B85042 probable chloroplast protein
MSSRAFKSSSYRAAAGQTQHYLARSSLPVVKNSWGSPPSPFNELPRVSRGMCASVISLSLVFSASEWRTRKTLLTPRASKDVPSSFRFPPMTKKPQWWWRTLACLPYLMPLHETWMYAETAYHLHPFLEDFEFLTYPFLGAIGRLPSWFLMAYFFVAYLGIVRRKEWPHFFRFHVVMGMLLEIALQVIGTVSKWMPLGVYWGKFGMHFWTAVAFAYLFTVLESIRCALAAHKQRTGCTGKRKFTDVVPLSKFDDNLLLSVIKNHLKPGPWIHKLKPFCDVDLDSLKLFIRQYPKGAKAPFKELDIKAPLRKQLAKVVILEYPVIHVYLPSQSYEFKVIKDFNTTPNPNDSLYDGHGCTNGITFREEEIEEDDIDSFEPEVLGLMKQMNYNPCLRVSEKSKAEGVGTNNSNPQVDTTEQEDAGNMELEFEQGLIDTYSDLFAEMNPGDYFNFECEFAKGLDSDDNCNLQNLDTDFIADGLDLEEGEIVE

SEQ ID NO: 100692 - protein, 438 aa, Arabidopsis thaliana
  peptide (1)..(438): Ceres Seq. ID no. 13605831
  misc_feature (1)..(438): Homolog of NCBI NO: 15220356 NR Description: expressed protein [Arabidopsis thaliana]
  misc_feature (245)..(438): Homolog of NCBI NO: 25406822 NR Description: hypothetical protein [imported] - Arabidopsis >gi|7211996|gb|AAF40467.1|AC004809_25 #ESTs gb|N96604, gb|T75857 and gb|H77171 come from this gene. [Arabidopsis
  misc_feature (1)..(20): Homolog of NCBI NO: 25406822 NR Description: hypothetical protein [imported] - Arabidopsis >gi|7211996|gb|AAF40467.1|AC004809_25 #ESTs gb|N96604, gb|T75857 and gb|H77171 come from this gene. [Arabidopsis
  misc_feature (116)..(179): Homolog of NCBI NO: 25406822 NR Description: hypothetical protein [imported] - Arabidopsis >gi|7211996|gb|AAF40467.1|AC004809_25 #ESTs gb|N96604, gb|T75857 and gb|H77171 come from this gene. [Arabidopsis
  misc_feature (1)..(179): Homolog of NCBI NO: 26449432 NR Description: unknown protein [Arabidopsis thaliana]
  misc_feature (20)..(179): Homolog of NCBI NO: 6984128 NR Description: Tic20-like protein [Euphorbia esula]
  misc_feature (21)..(178): Homolog of NCBI NO: 3769673 NR Description: Tic20 [Pisum sativum]
  misc_feature (34)..(179): Homolog of NCBI NO: 34393290 NR Description: putative Tic20 protein [Oryza sativa (japonica
  misc_feature (34)..(179): Homolog of NCBI NO: 34899836 NR Description: putative Tic20 protein [Oryza sativa (japonica
  misc_feature (18)..(179): Homolog of NCBI NO: 15236283 NR Description: chloroplast protein import component -related thaliana] >gi|25407184|pir||B85042 probable chloroplast protein
MCASVISLSLVFSASEWRTRKTLLTPRASKDVPSSFRFPPMTKKPQWWWRTLACLPYLMPLHETWMYAETAYHLHPFLEDFEFLTYPFLGAIGRLPSWFLMAYFFVAYLGIVRRKEWPHFFRFHVVMGMLLEIALQVIGTVSKWMPLGVYWGKFGMHFWTAVAFAYLFTVLESIRCALAAHKQRTGCTGKRKFTDVVPLSKFDDNLLLSVIKNHLKPGPWIHKLKPFCDVDLDSLKLFIRQYPKGAKAPFKELDIKAPLRKQLAKVVILEYPVIHVYLPSQSYEFKVIKDFNTTPNPNDSLYDGHGCTNGITFREEEIEEDDIDSFEPEVLGLMKQMNYNPCLRVSEKSKAEGVGTNNSNPQVDTTEQEDAGNMELEFEQGLIDTYSDLFAEMNPGDYFNFECEFAKGLDSDDNCNLQNLDTDFIADGLDLEEGEIVE

SEQ ID NO: 100693 - DNA, 1595 bp, Arabidopsis thaliana
  misc_feature (1)..(1595): Ceres Seq. ID no. 13605840
  misc_feature: MA Experiment ID: 20000179 Result: Down-regulated in Transcription
  misc_feature: MA Experiment 20000179 PARAMETER Experiment Name: At_Germinating_Seeds_P Parameter: Age (hr) Value: 6 vs. 0
  misc_feature: MA Experiment 20000179 PARAMETER Experiment Name: At_Germinating_Seeds_P Parameter: Tissue Value: Germinating Seeds
  misc_feature: MA Experiment ID: 20000180 Result: Down-regulated in Transcription
  misc_feature: MA Experiment 20000180 PARAMETER Experiment Name: At_Germinating_Seeds_P Parameter: Age (hr) Value: 24 vs. 0
  misc_feature: MA Experiment 20000180 PARAMETER Experiment Name: At_Germinating_Seeds_P Parameter: Tissue Value: Germinating Seeds
  misc_feature: MA Experiment ID: 20000182 Result: Up-regulated in Transcription
  misc_feature: MA Experiment 20000182 PARAMETER Experiment Name: At_2mM_SA_P Parameter: Age (day) Value: 14
  misc_feature: MA Experiment 20000182 PARAMETER Experiment Name: At_2mM_SA_P Parameter: Organism Value: A. thaliana
  misc_feature: MA Experiment 20000182 PARAMETER Experiment Name: At_2mM_SA_P Parameter: Plant Line Value: WS
  misc_feature: MA Experiment 20000182 PARAMETER Experiment Name: At_2mM_SA_P Parameter: Timepoint (hr) Value: 6
  misc_feature: MA Experiment 20000182 PARAMETER Experiment Name: At_2mM_SA_P Parameter: Tissue Value: Aerial
  misc_feature: MA Experiment 20000182 PARAMETER Experiment Name: At_2mM_SA_P Parameter: Treatment Value: 2mM SA vs. No Treatment
  misc_feature: MA Experiment ID: 20000234 Result: Down-regulated in Transcription
  misc_feature: MA Experiment 20000234 PARAMETER Experiment Name: At_Siliques_P Parameter: Age (day) Value: 21
  misc_feature: MA Experiment 20000234 PARAMETER Experiment Name: At_Siliques_P Parameter: Organism Value: A. thaliana
  misc_feature: MA Experiment 20000234 PARAMETER Experiment Name: At_Siliques_P Parameter: Plant Line Value: WS
  misc_feature: MA Experiment 20000234 PARAMETER Experiment Name: At_Siliques_P Parameter: Tissue Value: Less Than 5mm Siliques vs. Whole Plant
  misc_feature: MA Experiment ID: 20000235 Result: Down-regulated in Transcription
  misc_feature: MA Experiment 20000235 PARAMETER Experiment Name: At_Siliques_P Parameter: Age (day) Value: 21
  misc_feature: MA Experiment 20000235 PARAMETER Experiment Name: At_Siliques_P Parameter: Organism Value: A. thaliana
  misc_feature: MA Experiment 20000235 PARAMETER Experiment Name: At_Siliques_P Parameter: Plant Line Value: WS
  misc_feature: MA Experiment 20000235 PARAMETER Experiment Name: At_Siliques_P Parameter: Tissue Value: 5-10mm Siliques vs. Whole Plant
  misc_feature: MA Experiment ID: 20000267 Result: Down-regulated in Transcription
  misc_feature: MA Experiment 20000267 PARAMETER Experiment Name: At_Drought_P Parameter: Age (day) Value: 7
  misc_feature: MA Experiment 20000267 PARAMETER Experiment Name: At_Drought_P Parameter: Organism Value: A. thaliana
  misc_feature: MA Experiment 20000267 PARAMETER Experiment Name: At_Drought_P Parameter: Plant Line Value: WS
  misc_feature: MA Experiment 20000267 PARAMETER Experiment Name: At_Drought_P Parameter: Timepoint (hr) Value: 6
  misc_feature: MA Experiment 20000267 PARAMETER Experiment Name: At_Drought_P Parameter: Tissue Value: Whole Plant
  misc_feature: MA Experiment 20000267 PARAMETER Experiment Name: At_Drought_P Parameter: Treatment Value: Drought vs. No Drought
  misc_feature: MA Experiment ID: 20000308 Result: Down-regulated in Transcription
  misc_feature: MA Experiment 20000308 PARAMETER Experiment Name: At_100mM_NaCl__P Parameter: Age (day) Value: 17
  misc_feature: MA Experiment 20000308 PARAMETER Experiment Name: At_100mM_NaCl__P Parameter: Organism Value: A. thaliana
  misc_feature: MA Experiment 20000308 PARAMETER Experiment Name: At_100mM_NaCl__P Parameter: Plant Line Value: WS
  misc_feature: MA Experiment 20000308 PARAMETER Experiment Name: At_100mM_NaCl__P Parameter: Timepoint (hr) Value: 72
  misc_feature: MA Experiment 20000308 PARAMETER Experiment Name: At_100mM_NaCl__P Parameter: Tissue Value: Whole Plant
  misc_feature: MA Experiment 20000308 PARAMETER Experiment Name: At_100mM_NaCl__P Parameter: Treatment Value: 100mM NaCl vs. No Treatment
  misc_feature: MA Experiment ID: 20000456 Result: Up-regulated in Transcription
  misc_feature: MA Experiment 20000456 PARAMETER Experiment Name: At_100uM_BA_P Parameter: Age (day) Value: 14
  misc_feature: MA Experiment 20000456 PARAMETER Experiment Name: At_100uM_BA_P Parameter: Organism Value: A. thaliana
  misc_feature: MA Experiment 20000456 PARAMETER Experiment Name: At_100uM_BA_P Parameter: Plant Line Value: WS
  misc_feature: MA Experiment 20000456 PARAMETER Experiment Name: At_100uM_BA_P Parameter: Timepoint (hr) Value: 6
  misc_feature: MA Experiment 20000456 PARAMETER Experiment Name: At_100uM_BA_P Parameter: Tissue Value: Aerial
  misc_feature: MA Experiment 20000456 PARAMETER Experiment Name: At_100uM_BA_P Parameter: Treatment Value: 100uM BA vs. No Treatment
  misc_feature: MA Experiment ID: 20000527 Result: Down-regulated in Transcription
  misc_feature: MA Experiment 20000527 PARAMETER Experiment Name: At_10percent_PEG_P Parameter: Age (day) Value: 20
  misc_feature: MA Experiment 20000527 PARAMETER Experiment Name: At_10percent_PEG_P Parameter: Organism Value: A. thaliana
  misc_feature: MA Experiment 20000527 PARAMETER Experiment Name: At_10percent_PEG_P Parameter: Plant Line Value: WS
  misc_feature: MA Experiment 20000527 PARAMETER Experiment Name: At_10percent_PEG_P Parameter: Timepoint (day) Value: 20
  misc_feature: MA Experiment 20000527 PARAMETER Experiment Name: At_10percent_PEG_P Parameter: Tissue Value: Whole Plant
  misc_feature: MA Experiment 20000527 PARAMETER Experiment Name: At_10percent_PEG_P Parameter: Treatment Value: 10percent PEG vs. No Treatment
  misc_feature: MA Experiment ID: 20000709 Result: Up-regulated in Transcription
  misc_feature: MA Experiment 20000709 PARAMETER Experiment Name: At_15mM_NH4NO3_L-to-H_P Parameter: Age (hr) Value: 14
  misc_feature: MA Experiment 20000709 PARAMETER Experiment Name: At_15mM_NH4NO3_L-to-H_P Parameter: Organism Value: A. thaliana
  misc_feature: MA Experiment 20000709 PARAMETER Experiment Name: At_15mM_NH4NO3_L-to-H_P Parameter: Plant Line Value: WS
  misc_feature: MA Experiment 20000709 PARAMETER Experiment Name: At_15mM_NH4NO3_L-to-H_P Parameter: Timepoint (hr) Value: 4
  misc_feature: MA Experiment 20000709 PARAMETER Experiment Name: At_15mM_NH4NO3_L-to-H_P Parameter: Tissue Value: Aerial
  misc_feature: MA Experiment 20000709 PARAMETER Experiment Name: At_15mM_NH4NO3_L-to-H_P Parameter: Treatment Value: 15mM NH4NO3 vs. 30mM Mannitol
  misc_feature: MA Experiment ID: 20000794 Result: Up-regulated in Transcription
  misc_feature: MA Experiment 20000794 PARAMETER Experiment Name: At_Petals_P Parameter: Age (day) Value: 23-25 days
  misc_feature: MA Experiment 20000794 PARAMETER Experiment Name: At_Petals_P Parameter: Plant Line Value: WS
  misc_feature: MA Experiment 20000794 PARAMETER Experiment Name: At_Petals_P Parameter: Tissue Value: Petals vs. Whole plant
  misc_feature: MA Experiment ID: 20001247 Result: Down-regulated in Transcription
  misc_feature: MA Experiment 20001247 PARAMETER Experiment Name: At_Far-red-induction_P Parameter: Age (day) Value: 7
  misc_feature: MA Experiment 20001247 PARAMETER Experiment Name: At_Far-red-induction_P Parameter: Light Value: Far-red vs. White
  misc_feature: MA Experiment 20001247 PARAMETER Experiment Name: At_Far-red-induction_P Parameter: Organism Value: A. thaliana
  misc_feature: MA Experiment 20001247 PARAMETER Experiment Name: At_Far-red-induction_P Parameter: Plant Line Value: Columbia
  misc_feature: MA Experiment 20001247 PARAMETER Experiment Name: At_Far-red-induction_P Parameter: Timepoint (hr) Value: 1
  misc_feature: MA Experiment 20001247 PARAMETER Experiment Name: At_Far-red-induction_P Parameter: Tissue Value: Whole Plant
  misc_feature: MA Experiment ID: 20001248 Result: Down-regulated in Transcription
  misc_feature: MA Experiment 20001248 PARAMETER Experiment Name: At_Far-red-induction_P Parameter: Age (day) Value: 7
  misc_feature: MA Experiment 20001248 PARAMETER Experiment Name: At_Far-red-induction_P Parameter: Light Value: Far-red vs. White
  misc_feature: MA Experiment 20001248 PARAMETER Experiment Name: At_Far-red-induction_P Parameter: Organism Value: A. thaliana
  misc_feature: MA Experiment 20001248 PARAMETER Experiment Name: At_Far-red-induction_P Parameter: Plant Line Value: Columbia
  misc_feature: MA Experiment 20001248 PARAMETER Experiment Name: At_Far-red-induction_P Parameter: Timepoint (hr) Value: 4
  misc_feature: MA Experiment 20001248 PARAMETER Experiment Name: At_Far-red-induction_P Parameter: Tissue Value: Whole Plant
  misc_feature: MA Experiment ID: 20001450 Result: Down-regulated in Transcription
  misc_feature: MA Experiment 20001450 PARAMETER Experiment Name: At_Far-red-induction_P Parameter: Age (day) Value: 7
  misc_feature: MA Experiment 20001450 PARAMETER Experiment Name: At_Far-red-induction_P Parameter: Light Value: Far-red vs. White
  misc_feature: MA Experiment 20001450 PARAMETER Experiment Name: At_Far-red-induction_P Parameter: Organism Value: A. thaliana
  misc_feature: MA Experiment 20001450 PARAMETER Experiment Name: At_Far-red-induction_P Parameter: Plant Line Value: Columbia
  misc_feature: MA Experiment 20001450 PARAMETER Experiment Name: At_Far-red-induction_P Parameter: Timepoint (hr) Value: 8
  misc_feature: MA Experiment 20001450 PARAMETER Experiment Name: At_Far-red-induction_P Parameter: Tissue Value: Whole Plant
  misc_feature: MA Experiment ID: 20001451 Result: Down-regulated in Transcription
  misc_feature: MA Experiment 20001451 PARAMETER Experiment Name: At_Far-red-induction_P Parameter: Age (day) Value: 7
  misc_feature: MA Experiment 20001451 PARAMETER Experiment Name: At_Far-red-induction_P Parameter: Light Value: Far-red vs. White
  misc_feature: MA Experiment 20001451 PARAMETER Experiment Name: At_Far-red-induction_P Parameter: Organism Value: A. thaliana
  misc_feature: MA Experiment 20001451 PARAMETER Experiment Name: At_Far-red-induction_P Parameter: Plant Line Value: Columbia
  misc_feature: MA Experiment 20001451 PARAMETER Experiment Name: At_Far-red-induction_P Parameter: Timepoint (hr) Value: 24
  misc_feature: MA Experiment 20001451 PARAMETER Experiment Name: At_Far-red-induction_P Parameter: Tissue Value: Whole Plant
  misc_feature: MA Experiment ID: 20001557 Result: Up-regulated in Transcription
  misc_feature: MA Experiment 20001557 PARAMETER Experiment Name: At_Drought_Soil_Dry_P Parameter: Age (day) Value: 27
  misc_feature: MA Experiment 20001557 PARAMETER Experiment Name: At_Drought_Soil_Dry_P Parameter: Organism Value: A. thaliana
  misc_feature: MA Experiment 20001557 PARAMETER Experiment Name: At_Drought_Soil_Dry_P Parameter: Plant Line Value: WS
  misc_feature: MA Experiment 20001557 PARAMETER Experiment Name: At_Drought_Soil_Dry_P Parameter: Post Timepoint (hr) Value: 3
  misc_feature: MA Experiment 20001557 PARAMETER Experiment Name: At_Drought_Soil_Dry_P Parameter: Post-Treatment Value: Re-Water vs. No Drought
  misc_feature: MA Experiment 20001557 PARAMETER Experiment Name: At_Drought_Soil_Dry_P Parameter: Timepoint (day) Value: 13
  misc_feature: MA Experiment 20001557 PARAMETER Experiment Name: At_Drought_Soil_Dry_P Parameter: Treatment Value: Drought vs. No Drought
  misc_feature: MA Experiment ID: 20001560 Result: Up-regulated in Transcription
  misc_feature: MA Experiment 20001560 PARAMETER Experiment Name: At_Drought_Soil_Dry_P Parameter: Age (day) Value: 28
  misc_feature: MA Experiment 20001560 PARAMETER Experiment Name: At_Drought_Soil_Dry_P Parameter: Organism Value: A. thaliana
  misc_feature: MA Experiment 20001560 PARAMETER Experiment Name: At_Drought_Soil_Dry_P Parameter: Plant Line Value: WS
  misc_feature: MA Experiment 20001560 PARAMETER Experiment Name: At_Drought_Soil_Dry_P Parameter: Post Timepoint (hr) Value: None
  misc_feature: MA Experiment 20001560 PARAMETER Experiment Name: At_Drought_Soil_Dry_P Parameter: Post-Treatment Value: None
  misc_feature: MA Experiment 20001560 PARAMETER Experiment Name: At_Drought_Soil_Dry_P Parameter: Timepoint (day) Value: 14
  misc_feature: MA Experiment 20001560 PARAMETER Experiment Name: At_Drought_Soil_Dry_P Parameter: Treatment Value: Drought vs. No Drought
  misc_feature: MA Experiment ID: 20001905 Result: Up-regulated in Transcription
  misc_feature: MA Experiment 20001905 PARAMETER Experiment Name: At_Drought_Reproduction_P Parameter: Age (day) Value: 40
  misc_feature: MA Experiment 20001905 PARAMETER Experiment Name: At_Drought_Reproduction_P Parameter: Organism Value: A. thaliana
  misc_feature: MA Experiment 20001905 PARAMETER Experiment Name: At_Drought_Reproduction_P Parameter: Plant Line Value: WS
  misc_feature: MA Experiment 20001905 PARAMETER Experiment Name: At_Drought_Reproduction_P Parameter: Timepoint (day) Value: 10
  misc_feature: MA Experiment 20001905 PARAMETER Experiment Name: At_Drought_Reproduction_P Parameter: Tissue Value: Rosettes
  misc_feature: MA Experiment 20001905 PARAMETER Experiment Name: At_Drought_Reproduction_P Parameter: Treatment Value: Drought vs. No Drought
  misc_feature: MA Experiment ID: 20001908 Result: Up-regulated in Transcription
  misc_feature: MA Experiment 20001908 PARAMETER Experiment Name: At_Drought_Reproduction_P Parameter: Age (day) Value: 40
  misc_feature: MA Experiment 20001908 PARAMETER Experiment Name: At_Drought_Reproduction_P Parameter: Organism Value: A. thaliana
  misc_feature: MA Experiment 20001908 PARAMETER Experiment Name: At_Drought_Reproduction_P Parameter: Plant Line Value: WS
  misc_feature: MA Experiment 20001908 PARAMETER Experiment Name: At_Drought_Reproduction_P Parameter: Timepoint (day) Value: 10
  misc_feature: MA Experiment 20001908 PARAMETER Experiment Name: At_Drought_Reproduction_P Parameter: Tissue Value: Siliques
  misc_feature: MA Experiment 20001908 PARAMETER Experiment Name: At_Drought_Reproduction_P Parameter: Treatment Value: Drought vs. No Drought
aaggagagacacagattcttgtattgatactcacttcagtggagctaagacaagtagaaaaaaaatggcgccaccgcattttctactggtaacgtttccggcgcaaggtcacgtgaacccatctctccgttttgctcgtcggctcatcaaaagaaccggcgcacgtgtcactttcgtcacttgtgtctccgtcttccacaactccatgatcgcaaaccacaacaaagtcgaaaatctctctttccttactttctccgacggtttcgacgatggaggcatttccacctacgaagaccgtcagaaaaggtcggtgaatctcaaggttaacggcgataaggcactatcggatttcatcgaagctactaagaatggtgactctcccgtgacttgcttgatctacacgattcttctcaattgggctccaaaagtagcacgtagatttcaacttccctccgctcttctctggatccaaccggctttggttttcaacatctattacactcatttcatgggaaacaagtccgttttcgagttacctaatctgtcttctctggaaatcagagatcttccatctttcctcacaccttccaacacaaacaaaggcgcatacgatgcgtttcaagaaatgatggagtttctcataaaagaaaccaaaccgaaaattctcatcaacactttcgattcgctggaaccagaggccttaacggctttcccgaatatcgatatggtggcggttggtcctttacttcccacggagattttctcaggaagcaccaacaaatcagttaaagatcaaagtagtagttatacactttggctagactcgaaaacagagtcctctgttatttacgtttcctttggaacaatggttgagttgtccaagaaacagatagaggaactagcgagagcactcatagaagggaaacgaccgtttttgtgggttataactgataaatccaacagagaaacgaaaacagaaggagaagaagagacagagattgagaagatagctggattcagacacgagcttgaagaggttgggatgattgtgtcgtggtgttcgcagatagaggttttaagtcaccgagccgtaggttgttttgtgactcattgtgggtggagctcgacgctggagagtttggttcttggcgttccggttgtggcgtttccgatgtggtcggatcaaccgacgaacgcgaagctactggaagaaagttggaagactggtgtgagggtaagagagaacaaggatggtttggtggagagaggagagatcaggaggtgtttggaagccgtgatggaggagaagtcggtggagttgagggaaaacgcaaagaaatggaagcgtttagcgatggaagcgggtagagaaggaggatcttcggataagaacatggaggcttttgtggaggatatttgtggagaatctcttattcaaaacttgtgtgaagcagaggaggtaaaagtaaagtaaataaaggacaaaagagttggtgtctagaagtggcggagtgttatttgctaatactgtcactttgtaatatcaaattcaattaaaacataaaatttactccatctagataaatatgtttttt

SEQ ID NO: 100694 - protein, 490 aa, Arabidopsis thaliana
  peptide (1)..(490): Ceres Seq. ID no. 13605841
  misc_feature (29)..(476): Pfam Name: UDP-glucoronosyl and UDP-glucosyl transferase Pfam Description: UDP-glucoronosyl and UDP-glucosyl transferase
  misc_feature (22)..(490): Homolog of NCBI NO: 18390540 NR Description: UDP-glucose transferase(UGT1) [Arabidopsis >gi|8778722|gb|AAF79730.1|AC005106_11 T25N20.21 [Arabidopsis >gi|13605918|gb|AAK32944.1|AF367358_1 At1g05560/T25N20_20
  misc_feature (22)..(472): Homolog of NCBI NO: 15220556 NR Description: glycosyltransferase family [Arabidopsis thaliana]
  misc_feature (25)..(471): Homolog of NCBI NO: 18414478 NR Description: UDP-glucose:indole-3-acetate
  misc_feature (25)..(471): Homolog of NCBI NO: 2149127 NR Description: UDP-glucose:indole-3-acetate
  misc_feature (22)..(472): Homolog of NCBI NO: 20146093 NR Description: glucosyltransferase NTGT2 [Nicotiana tabacum]
  misc_feature (25)..(471): Homolog of NCBI NO: 7433892 NR Description: hypothetical protein - Arabidopsis thaliana glucosyltransferase like protein [Arabidopsis thaliana]
  misc_feature (22)..(472): Homolog of NCBI NO: 6683052 NR Description: anthocyanin 5-O-glucosyltransferase [Petunia x
  misc_feature (22)..(476): Homolog of NCBI NO: 14192682 NR Description: cold-induced glucosyl transferase [Solanum
  misc_feature (69)..(471): Homolog of NCBI NO: 16604440 NR Description: AT4g15550/dl3815c [Arabidopsis thaliana]
  misc_feature (25)..(471): Homolog of NCBI NO: 15236407 NR Description: UDP-glycosyltransferase family [Arabidopsis
RRDTDSCIDTHFSGAKTSRKKMAPPHFLLVTFPAQGHVNPSLRFARRLIKRTGARVTFVTCVSVFHNSMIANHNKVENLSFLTFSDGFDDGGISTYEDRQKRSVNLKVNGDKALSDFIEATKNGDSPVTCLIYTILLNWAPKVARRFQLPSALLWIQPALVFNIYYTHFMGNKSVFELPNLSSLEIRDLPSFLTPSNTNKGAYDAFQEMMEFLIKETKPKILINTFDSLEPEALTAFPNIDMVAVGPLLPTEIFSGSTNKSVKDQSSSYTLWLDSKTESSVIYVSFGTMVELSKKQIEELARALIEGKRPFLWVITDKSNRETKTEGEEETEIEKIAGFRHELEEVGMIVSWCSQIEVLSHRAVGCFVTHCGWSSTLESLVLGVPVVAFPMWSDQPTNAKLLEESWKTGVRVRENKDGLVERGEIRRCLEAVMEEKSVELRENAKKWKRLAMEAGREGGSSDKNMEAFVEDICGESLIQNLCEAEEVKVK

SEQ ID NO: 100695 - protein, 469 aa, Arabidopsis thaliana
  peptide (1)..(469): Ceres Seq. ID no. 13605842
  misc_feature (8)..(455): Pfam Name: UDP-glucoronosyl and UDP-glucosyl transferase Pfam Description: UDP-glucoronosyl and UDP-glucosyl transferase
  misc_feature (1)..(469): Homolog of NCBI NO: 18390540 NR Description: UDP-glucose transferase(UGT1) [Arabidopsis >gi|8778722|gb|AAF79730.1|AC005106_11 T25N20.21 [Arabidopsis >gi|13605918|gb|AAK32944.1|AF367358_1 At1g05560/T25N20_20
  misc_feature (1)..(451): Homolog of NCBI NO: 15220556 NR Description: glycosyltransferase family [Arabidopsis thaliana]
  misc_feature (4)..(450): Homolog of NCBI NO: 18414478 NR Description: UDP-glucose:indole-3-acetate
  misc_feature (4)..(450): Homolog of NCBI NO: 2149127 NR Description: UDP-glucose:indole-3-acetate
  misc_feature (1)..(451): Homolog of NCBI NO: 20146093 NR Description: glucosyltransferase NTGT2 [Nicotiana tabacum]
  misc_feature (4)..(450): Homolog of NCBI NO: 7433892 NR Description: hypothetical protein - Arabidopsis thaliana glucosyltransferase like protein [Arabidopsis thaliana]
  misc_feature (1)..(451): Homolog of NCBI NO: 6683052 NR Description: anthocyanin 5-O-glucosyltransferase [Petunia x
  misc_feature (1)..(455): Homolog of NCBI NO: 14192682 NR Description: cold-induced glucosyl transferase [Solanum
  misc_feature (48)..(450): Homolog of NCBI NO: 16604440 NR Description: AT4g15550/dl3815c [Arabidopsis thaliana]
  misc_feature (4)..(450): Homolog of NCBI NO: 15236407 NR Description: UDP-glycosyltransferase family [Arabidopsis
MAPPHFLLVTFPAQGHVNPSLRFARRLIKRTGARVTFVTCVSVFHNSMIANHNKVENLSFLTFSDGFDDGGISTYEDRQKRSVNLKVNGDKALSDFIEATKNGDSPVTCLIYTILLNWAPKVARRFQLPSALLWIQPALVFNIYYTHFMGNKSVFELPNLSSLEIRDLPSFLTPSNTNKGAYDAFQEMMEFLIKETKPKILINTFDSLEPEALTAFPNIDMVAVGPLLPTEIFSGSTNKSVKDQSSSYTLWLDSKTESSVIYVSFGTMVELSKKQIEELARALIEGKRPFLWVITDKSNRETKTEGEEETEIEKIAGFRHELEEVGMIVSWCSQIEVLSHRAVGCFVTHCGWSSTLESLVLGVPVVAFPMWSDQPTNAKLLEESWKTGVRVRENKDGLVERGEIRRCLEAVMEEKSVELRENAKKWKRLAMEAGREGGSSDKNMEAFVEDICGESLIQNLCEAEEVKVK

SEQ ID NO: 100696 - protein, 422 aa, Arabidopsis thaliana
  peptide (1)..(422): Ceres Seq. ID no. 13605843
  misc_feature (1)..(408): Pfam Name: UDP-glucoronosyl and UDP-glucosyl transferase Pfam Description: UDP-glucoronosyl and UDP-glucosyl transferase
  misc_feature (1)..(422): Homolog of NCBI NO: 18390540 NR Description: UDP-glucose transferase(UGT1) [Arabidopsis >gi|8778722|gb|AAF79730.1|AC005106_11 T25N20.21 [Arabidopsis >gi|13605918|gb|AAK32944.1|AF367358_1 At1g05560/T25N20_20
  misc_feature (1)..(404): Homolog of NCBI NO: 15220556 NR Description: glycosyltransferase family [Arabidopsis thaliana]
  misc_feature (1)..(403): Homolog of NCBI NO: 18414478 NR Description: UDP-glucose:indole-3-acetate
  misc_feature (1)..(403): Homolog of NCBI NO: 2149127 NR Description: UDP-glucose:indole-3-acetate
  misc_feature (1)..(404): Homolog of NCBI NO: 20146093 NR Description: glucosyltransferase NTGT2 [Nicotiana tabacum]
  misc_feature (1)..(403): Homolog of NCBI NO: 7433892 NR Description: hypothetical protein - Arabidopsis thaliana glucosyltransferase like protein [Arabidopsis thaliana]
  misc_feature (1)..(404): Homolog of NCBI NO: 6683052 NR Description: anthocyanin 5-O-glucosyltransferase [Petunia x
  misc_feature (1)..(408): Homolog of NCBI NO: 14192682 NR Description: cold-induced glucosyl transferase [Solanum
  misc_feature (1)..(403): Homolog of NCBI NO: 16604440 NR Description: AT4g15550/dl3815c [Arabidopsis thaliana]
  misc_feature (1)..(403): Homolog of NCBI NO: 15236407 NR Description: UDP-glycosyltransferase family [Arabidopsis
MIANHNKVENLSFLTFSDGFDDGGISTYEDRQKRSVNLKVNGDKALSDFIEATKNGDSPVTCLIYTILLNWAPKVARRFQLPSALLWIQPALVFNIYYTHFMGNKSVFELPNLSSLEIRDLPSFLTPSNTNKGAYDAFQEMMEFLIKETKPKILINTFDSLEPEALTAFPNIDMVAVGPLLPTEIFSGSTNKSVKDQSSSYTLWLDSKTESSVIYVSFGTMVELSKKQIEELARALIEGKRPFLWVITDKSNRETKTEGEEETEIEKIAGFRHELEEVGMIVSWCSQIEVLSHRAVGCFVTHCGWSSTLESLVLGVPVVAFPMWSDQPTNAKLLEESWKTGVRVRENKDGLVERGEIRRCLEAVMEEKSVELRENAKKWKRLAMEAGREGGSSDKNMEAFVEDICGESLIQNLCEAEEVKVK

SEQ ID NO: 100697 - DNA, 1820 bp, Arabidopsis thaliana
  misc_feature (1)..(1820): Ceres Seq. ID no. 13605855
  misc_feature: MA Experiment ID: 108461 Result: Down-regulated in Transcription
  misc_feature: MA Experiment 108461 PARAMETER Experiment Name: At_Germinating_Seeds_cDNA_P Parameter: Age (day) Value: 1 vs. 0
  misc_feature: MA Experiment 108461 PARAMETER Experiment Name: At_Germinating_Seeds_cDNA_P Parameter: Tissue Value: Germinating Seeds
  misc_feature: MA Experiment ID: 108464 Result: Down-regulated in Transcription
  misc_feature: MA Experiment 108464 PARAMETER Experiment Name: At_Germinating_Seeds_cDNA_P Parameter: Age (day) Value: 4 vs. 0
  misc_feature: MA Experiment 108464 PARAMETER Experiment Name: At_Germinating_Seeds_cDNA_P Parameter: Tissue Value: Germinating Seeds
  misc_feature: MA Experiment ID: 20000180 Result: Down-regulated in Transcription
  misc_feature: MA Experiment 20000180 PARAMETER Experiment Name: At_Germinating_Seeds_P Parameter: Age (hr) Value: 24 vs. 0
  misc_feature: MA Experiment 20000180 PARAMETER Experiment Name: At_Germinating_Seeds_P Parameter: Tissue Value: Germinating Seeds
aaatcttctgatgcacactagttcgaaggatcctttaatgggagagagaatgttctacttcttcttcttcttcttcttcttcttcttcctcctctctcgtcggatctctctgatttagtgatttttcaaatttcaagttttcttcacctttaattttgtgtctcgttgatctctctttggacattctgctttggattctggaggcttctcattagatctctattagtgggtttaggtcaagttcttgaaatggataaggagaaatctcctgcaccaccacctagtggaggtcttcctccaccatcgggtcgttactctgcgttttcacctaatggaagtagctttgcaatgaaagctgaatcatcttttcctcctttgactccaagtggaagcaatagctcagatgctaaccgattcagccatgatattagccgaatgccggataatccacctaagaacctaggccatcgccgagctcattcagagattcttactcttcctgatgacttaagctttgatagtgatcttggtgtggttggtgctgctgatggaccttctttctctgatgatactgacgaggacttactctatatgtatcttgatatggaaaaattcaattcttctgctacatcgacttctcaaatgggtgagccatcagaaccgacttggaggaatgaattagcctcgacttctaaccttcagagtacacccggtagctctagtgaaagaccgagaattagacaccaacacagccaatcgatggatggttcaacaactatcaagcctgagatgcttatgtcagggaatgaagatgtgtctggagttgactctaagaaagccatctctgctgctaaactttctgagcttgctctcattgatccaaaacgcgccaagaggatatgggcaaacaggcagtctgctgcgaggtcaaaagaaaggaagatgagatacattgcagagctcgagagaaaagtacagactttacaaacagaggccacatctctctcagcccagttgactctcttacagagagatacaaatggcctgggtgttgaaaacaatgagcttaaactgcgagtacaaactatggagcaacaggtccacctacaggatgctttaaatgatgcactaaaggaggaagtccagcatcttaaggtattgacggggcaaggtccatcaaatggtacatcaatgaactacggttcttttggatcaaaccagcaattctatcccaataatcagtcgatgcacactatcttagccgcacaacagttacagcagctccagatccagtcacagaaacagcaacaacaacaacagcaacaccagcaacaacaacagcagcagcagcagcaatttcactttcaacagcagcaactgtaccagcttcagcagcagcaacggcttcaacaacaggaacaacaaagcggggcttcagagctaagaagacccatgccttctcctggtcagaaagagagtgtgacatcgcctgatcgtgaaactcccttgacaaaagactgagtctagactgtgctaatgtccaatttagtaagttactcttggaaaatcttctttttcatcgcaggctcatggatttgggatttactgcattatagagttaaaaacaagacagcttagaagttgcggatttagaagttgttagtgaagcttttgttctcgtctgttggtagtttacaatcttctctttgtatgatcctaagctcttaaaaagttcttggatttggtcatttggttagaaatgggtccttagtccaagtctgtagtcgtttaaccatattcatattctttgccttttgttc

SEQ ID NO: 100698 - protein, 423 aa, Arabidopsis thaliana; identical to SEQ ID NO: 41604
  peptide (1)..(423): Ceres Seq. ID no. 13605856
  misc_feature (210)..(272): Pfam Name: bZIP transcription factor Pfam Description: bZIP transcription factor
  misc_feature (1)..(423): Homolog of NCBI NO: 15221391 NR Description: bZIP protein [Arabidopsis thaliana]
  misc_feature (1)..(423): Homolog of NCBI NO: 21553831 NR Description: transcriptional activator RF2a, putative
  misc_feature (1)..(410): Homolog of NCBI NO: 15224665 NR Description: bZIP transcription factor (POSF21) [Arabidopsis >gi|30684932|ref|NP_850167.1| bZIP transcription factor (POSF21) thaliana] >gi|1172441|sp|Q04088|PF21_ARATH Possible transcription
  misc_feature (1)..(260): Homolog of NCBI NO: 30684938 NR Description: bZIP transcription factor (POSF21) [Arabidopsis
  misc_feature (90)..(397): Homolog of NCBI NO: 7489564 NR Description: probable transcription activator RF2a - rice
  misc_feature (5)..(368): Homolog of NCBI NO: 21740783 NR Description: OSJNBa0067K08.24 [Oryza sativa (japonica
  misc_feature (162)..(388): Homolog of NCBI NO: 21740783 NR Description: OSJNBa0067K08.24 [Oryza sativa (japonica
  misc_feature (155)..(379): Homolog of NCBI NO: 2921823 NR Description: shoot-forming PKSF1 [Paulownia kawakamii]
  misc_feature (157)..(381): Homolog of NCBI NO: 39579226 NR Description: bZIP transcription factor RF2b [Oryza sativa
  misc_feature (143)..(381): Homolog of NCBI NO: 34394739 NR Description: putative transcription activator RF2a [Oryza

SEQ ID NO: 100699 - protein, 390 aa, Arabidopsis thaliana; identical to SEQ ID NO: 41605
  peptide (1)..(390): Ceres Seq. ID no. 13605857
  misc_feature (177)..(239): Pfam Name: bZIP transcription factor Pfam Description: bZIP transcription factor
  misc_feature (1)..(390): Homolog of NCBI NO: 15221391 NR Description: bZIP protein [Arabidopsis thaliana]
  misc_feature (1)..(390): Homolog of NCBI NO: 21553831 NR Description: transcriptional activator RF2a, putative
  misc_feature (1)..(377): Homolog of NCBI NO: 15224665 NR Description: bZIP transcription factor (POSF21) [Arabidopsis >gi|30684932|ref|NP_850167.1| bZIP transcription factor (POSF21) thaliana] >gi|1172441|sp|Q04088|PF21_ARATH Possible transcription
  misc_feature (1)..(227): Homolog of NCBI NO: 30684938 NR Description: bZIP transcription factor (POSF21) [Arabidopsis
  misc_feature (57)..(364): Homolog of NCBI NO: 7489564 NR Description: probable transcription activator RF2a - rice
  misc_feature (1)..(335): Homolog of NCBI NO: 21740783 NR Description: OSJNBa0067K08.24 [Oryza sativa (japonica
  misc_feature (129)..(355): Homolog of NCBI NO: 21740783 NR Description: OSJNBa0067K08.24 [Oryza sativa (japonica
  misc_feature (122)..(346): Homolog of NCBI NO: 2921823 NR Description: shoot-forming PKSF1 [Paulownia kawakamii]
  misc_feature (124)..(348): Homolog of NCBI NO: 39579226 NR Description: bZIP transcription factor RF2b [Oryza sativa
  misc_feature (110)..(348): Homolog of NCBI NO: 34394739 NR Description: putative transcription activator RF2a [Oryza

SEQ ID NO: 100700 - protein, 361 aa, Arabidopsis thaliana; identical to SEQ ID NO: 41606
  peptide (1)..(361): Ceres Seq. ID no. 13605858
  misc_feature (148)..(210): Pfam Name: bZIP transcription factor Pfam Description: bZIP transcription factor
  misc_feature (1)..(361): Homolog of NCBI NO: 15221391 NR Description: bZIP protein [Arabidopsis thaliana]
  misc_feature (1)..(361): Homolog of NCBI NO: 21553831 NR Description: transcriptional activator RF2a, putative
  misc_feature (1)..(348): Homolog of NCBI NO: 15224665 NR Description: bZIP transcription factor (POSF21) [Arabidopsis >gi|30684932|ref|NP_850167.1| bZIP transcription factor (POSF21) thaliana] >gi|1172441|sp|Q04088|PF21_ARATH Possible transcription
  misc_feature (1)..(198): Homolog of NCBI NO: 30684938 NR Description: bZIP transcription factor (POSF21) [Arabidopsis
  misc_feature (28)..(335): Homolog of NCBI NO: 7489564 NR Description: probable transcription activator RF2a - rice
  misc_feature (1)..(306): Homolog of NCBI NO: 21740783 NR Description: OSJNBa0067K08.24 [Oryza sativa (japonica
  misc_feature (100)..(326): Homolog of NCBI NO: 21740783 NR Description: OSJNBa0067K08.24 [Oryza sativa (japonica
  misc_feature (93)..(317): Homolog of NCBI NO: 2921823 NR Description: shoot-forming PKSF1 [Paulownia kawakamii]
  misc_feature (95)..(319): Homolog of NCBI NO: 39579226 NR Description: bZIP transcription factor RF2b [Oryza sativa
  misc_feature (81)..(319): Homolog of NCBI NO: 34394739 NR Description: putative transcription activator RF2a [Oryza

SEQ ID NO: 100701 - DNA, 3615 bp, Arabidopsis thaliana
  misc_feature (1)..(3615): Ceres Seq. ID no. 13605875
  misc_feature: MA Experiment ID: 20000179 Result: Down-regulated in Transcription
  misc_feature: MA Experiment 20000179 PARAMETER Experiment Name: At_Germinating_Seeds_P Parameter: Age (hr) Value: 6 vs. 0
  misc_feature: MA Experiment 20000179 PARAMETER Experiment Name: At_Germinating_Seeds_P Parameter: Tissue Value: Germinating Seeds
  misc_feature: MA Experiment ID: 20000180 Result: Down-regulated in Transcription
  misc_feature: MA Experiment 20000180 PARAMETER Experiment Name: At_Germinating_Seeds_P Parameter: Age (hr) Value: 24 vs. 0
  misc_feature: MA Experiment 20000180 PARAMETER Experiment Name: At_Germinating_Seeds_P Parameter: Tissue Value: Germinating Seeds
  misc_feature: MA Experiment ID: 20000184 Result: Down-regulated in Transcription
  misc_feature: MA Experiment 20000184 PARAMETER Experiment Name: At_Shoots__P Parameter: Age (day) Value: 7
  misc_feature: MA Experiment 20000184 PARAMETER Experiment Name: At_Shoots__P Parameter: Tissue Value: Shoots vs. Whole Plant
  misc_feature: MA Experiment ID: 20000185 Result: Up-regulated in Transcription
  misc_feature: MA Experiment 20000185 PARAMETER Experiment Name: At_Roots__P Parameter: Age (day) Value: 7 vs. 21
  misc_feature: MA Experiment 20000185 PARAMETER Experiment Name: At_Roots__P Parameter: Organism Value: A. thaliana
  misc_feature: MA Experiment 20000185 PARAMETER Experiment Name: At_Roots__P Parameter: Tissue Value: Roots vs. Whole Plant
  misc_feature: MA Experiment ID: 20000264 Result: Up-regulated in Transcription
  misc_feature: MA Experiment 20000264 PARAMETER Experiment Name: At_Open_Flower_P Parameter: Age (day) Value: 21
  misc_feature: MA Experiment 20000264 PARAMETER Experiment Name: At_Open_Flower_P Parameter: Plant Line Value: WS
  misc_feature: MA Experiment 20000264 PARAMETER Experiment Name: At_Open_Flower_P Parameter: Tissue Value: Open Flower vs. Whole Plant
  misc_feature: MA Experiment ID: 20001458 Result: Up-regulated in Transcription
  misc_feature: MA Experiment 20001458 PARAMETER Experiment Name: At_50mM_NH4NO3_L-to-H_P Parameter: Age (day) Value: Undefined
  misc_feature: MA Experiment 20001458 PARAMETER Experiment Name: At_50mM_NH4NO3_L-to-H_P Parameter: Organism Value: Undefined
  misc_feature: MA Experiment 20001458 PARAMETER Experiment Name: At_50mM_NH4NO3_L-to-H_P Parameter: Plant Line Value: Undefined
  misc_feature: MA Experiment 20001458 PARAMETER Experiment Name: At_50mM_NH4NO3_L-to-H_P Parameter: Timepoint (hr) Value: 2
  misc_feature: MA Experiment 20001458 PARAMETER Experiment Name: At_50mM_NH4NO3_L-to-H_P Parameter: Tissue Value: Siliques
  misc_feature: MA Experiment 20001458 PARAMETER Experiment Name: At_50mM_NH4NO3_L-to-H_P Parameter: Treatment Value: 50mM NH4NO3 vs. 100mM Manitol
  misc_feature: MA Experiment ID: 20001557 Result: Up-regulated in Transcription
  misc_feature: MA Experiment 20001557 PARAMETER Experiment Name: At_Drought_Soil_Dry_P Parameter: Age (day) Value: 27
  misc_feature: MA Experiment 20001557 PARAMETER Experiment Name: At_Drought_Soil_Dry_P Parameter: Organism Value: A. thaliana
  misc_feature: MA Experiment 20001557 PARAMETER Experiment Name: At_Drought_Soil_Dry_P Parameter: Plant Line Value: WS
  misc_feature: MA Experiment 20001557 PARAMETER Experiment Name: At_Drought_Soil_Dry_P Parameter: Post Timepoint (hr) Value: 3
  misc_feature: MA Experiment 20001557 PARAMETER Experiment Name: At_Drought_Soil_Dry_P Parameter: Post-Treatment Value: Re-Water vs. No Drought
  misc_feature: MA Experiment 20001557 PARAMETER Experiment Name: At_Drought_Soil_Dry_P Parameter: Timepoint (day) Value: 13
  misc_feature: MA Experiment 20001557 PARAMETER Experiment Name: At_Drought_Soil_Dry_P Parameter: Treatment Value: Drought vs. No Drought
  misc_feature: MA Experiment ID: 20001558 Result: Up-regulated in Transcription
  misc_feature: MA Experiment 20001558 PARAMETER Experiment Name: At_Drought_Soil_Dry_P Parameter: Age (day) Value: 27
  misc_feature: MA Experiment 20001558 PARAMETER Experiment Name: At_Drought_Soil_Dry_P Parameter: Organism Value: A. thaliana
  misc_feature: MA Experiment 20001558 PARAMETER Experiment Name: At_Drought_Soil_Dry_P Parameter: Plant Line Value: WS
  misc_feature: MA Experiment 20001558 PARAMETER Experiment Name: At_Drought_Soil_Dry_P Parameter: Post Timepoint (hr) Value: 6
  misc_feature: MA Experiment 20001558 PARAMETER Experiment Name: At_Drought_Soil_Dry_P Parameter: Post-Treatment Value: Re-Water vs. No Drought
  misc_feature: MA Experiment 20001558 PARAMETER Experiment Name: At_Drought_Soil_Dry_P Parameter: Timepoint (day) Value: 13
  misc_feature: MA Experiment 20001558 PARAMETER Experiment Name: At_Drought_Soil_Dry_P Parameter: Treatment Value: Drought vs. No Drought
  misc_feature: MA Experiment ID: 20001757 Result: Up-regulated in Transcription
  misc_feature: MA Experiment 20001757 PARAMETER Experiment Name: At_50mM_NH4NO3_L-to-H_P Parameter: Timepoint (hr) Value: 6
  misc_feature: MA Experiment 20001757 PARAMETER Experiment Name: At_50mM_NH4NO3_L-to-H_P Parameter: Tissue Value: Leaf
  misc_feature: MA Experiment 20001757 PARAMETER Experiment Name: At_50mM_NH4NO3_L-to-H_P Parameter: Treatment Value: 50mM NH4NO3 vs 100mM Mannitol
  misc_feature: MA Experiment ID: 20001911 Result: Up-regulated in Transcription
  misc_feature: MA Experiment 20001911 PARAMETER Experiment Name: At_Drought_Reproduction_P Parameter: Age (day) Value: 40
  misc_feature: MA Experiment 20001911 PARAMETER Experiment Name: At_Drought_Reproduction_P Parameter: Organism Value: A. thaliana
  misc_feature: MA Experiment 20001911 PARAMETER Experiment Name: At_Drought_Reproduction_P Parameter: Plant Line Value: WS
  misc_feature: MA Experiment 20001911 PARAMETER Experiment Name: At_Drought_Reproduction_P Parameter: Timepoint (day) Value: 10
  misc_feature: MA Experiment 20001911 PARAMETER Experiment Name: At_Drought_Reproduction_P Parameter: Tissue Value: Flowers
  misc_feature: MA Experiment 20001911 PARAMETER Experiment Name: At_Drought_Reproduction_P Parameter: Treatment Value: Drought vs. No Drought
atggccgccgacgaactgatgccgtctcacaggtcacacaggactcccaaatcaggtcctaccgcgaggaagaaatctgaactagataagaagaagcgtggaatctccgttgacaagcagaaaaaccttaaggcgtttggtgttaaatcggttgttcatgcgaagaaagcaaaacatcacgctgcggagaaggagcaaaagcggcttcatcttccgaaaattgatcgtaattatggcgaagctcctcctttcgtcgtcgtggttcaaggccccccaggagttggaaagtctctcgtgattaaatctcttgtgaaggaatttacaaaacagaatgtacccgaggttcgaggacctattaccattgtacaaggtaaacagagaaggtttcaatttgtggagtgcccgaatgatatcaatgcgatggtggattgtgcaaaggttgctgatctagccctacttgttgtagacgggagttatggttttgagatggaaacctttgaattcctcaatattatgcaagtgcatggatttcctagagttatgggtgttctcactcaccttgataagttcaatgatgttaagaagctgagaaaaacaaaacatcatctcaagcatcggttttggactgaaatatatcatggagctaaattgttttatttatctggtctcattcatgggaagtatacgccgcgtgaagttcacaacctcgcccgctttgtaattgttatcaagcctcagccattgacatggcgaacagcacatccttatgtgttggttgatcgccttgaagatgttacccctccggagaaagttcagatggataagaaatgcgatagaaatatcactgtgtttggttacctacgtggttgtaacttcaaaaaaaggatgaaggttcatattgctggagttggtgacttcattgtagctggggtgactgctttaactgatccttgtcctttaccttcagctggcaagaaaaaagggctgagggacagggataagcttttctatgctcctatgtccgggattggagatcttgtgtatgacaaagatgctgtttacatcaacataaatagtcaccaagttcagtactctaaaactgacgatggaaagggagaacctactaataaaggaaagggcagagatgttggtgaagatttggtaaagtcgttgcagaacacaaagtattctgttgatgagaaactagataagacattcattaacttttttggcaaaaagactagtgccagttcagaaacaaaacttaaggctgaagatgcgtatcactctttgccggaaggttctgacagtgagtctcaatctggcgatgatgaggaggatatagtaggtaatgaaagtgaaatgaagcaggaaactgagattcatggtggaaggttgaggaggaaagctatcttcaagacggacttgaatgaagatgattttgaggaagcagacgatcttgaattggattcatatgacccagatacatatgattttgaggaagcagacgatgctgaatcagacgataatgaagttgaagatggtggagatgactctgcttccgattcagccgatggtgaaccaggggattatcagatagatgataaggactctggtaacatatcacaatggaaagcacccttgaaggagatagccagaaagaagaaccccaacttgatgcaaattgtgtatggagcatcatcattagctactcccttgataaatgagaaccatgacattagtgatgatgacgaaagtgatgatgaagacttctttaagccaaaaggagaacaacacaagaatttaggtggtggattggatgtgggatatgtcaactcagaggattgttctaaatttgtgaattatggatacctaaagaattggaaagagaaagaagtatgtgagagcattcgtgatcgatttaccactggtgattggtcaaaagctgctctgagagacaaaaatttaggtactggcggtgagggagaagatgatgaactttatggtgattttgaggatctagagacgggagagaagcacaaaagccatgagaacttggaatcgggtgcaaatgaaaatgaagatgaagatgcagaagtcgttgagcgtgatgggaacaatcctcgtagtcaagccgatgaaccaggatacgctgataaattgaaggaagcgcaggaaattacaaaacagaggaatgagttagaatacaatgatcttgacgaggaaactcgaattgagttagcaggattccggactggaacatacttgaggctggagattcacaatgttccttatgagatggttgaattctttgatccttgtcatccaattctagttggaggtattggtttcggcgaggacaatgttggatatatgcaggcccggttgaagaaacataggtggcataagaaagtactaaagacaagagatcctattattgtgtctattggatggagacgctatcagactattcctgtatttgccattgaagatcgcaatggcaggcatcgaatgctcaagtatactccagaacacatgcactgccttgcttcgttctggggtcctcttgtcccacccaacactggctttgtcgctttccagaacctgtcaaacaatcaggcaggatttaggataacagcgacttctgtagttctggagtttaatcaccaggcccgtattgtaaagaaaatcaagctggttgggactccgtgcaagatcaagaaaaagactgcatttatcaaagacatgttcacttctgaccttgaaatagctcgatttgaaggttcatctgttcggacagttagtggcattagaggacaagtaaaaaaggctggaaaaaacatgcttgataacaaggctgaagaagggattgcgaggtgtacctttgaagatcaaatccatatgagcgacatggtattcttaagggcttggactacagtggaagttccacaattttacaatcctctaacgacagccttgcaaccccgcgataagacctggaatgggatgaaaacttttggcgaactccgtagagagctgaatattcctattccagtgaataaggattcactctacaaggcaatcgaaagaaagcaaaagaagttcaatccactacagattccaaagcgtctagaaaaagatttaccgtttatgtcgaaacccaaaaatataccaaagcggaaaagaccatcactagaggataaaagagcagttataatggaaccgaaagaaagaaaagagcatactatcatccagcaattccagctgcttcaacatcacacgatgaagaagaaaaaggcaacggatcagaagaagaggaaagagtatgaagcagagaaagctaagaatgaggaaataaataagaaacgtaggagagaagagagacgggacagatatcgtgaggaagataaacagaaaaagaagacgagaagaagccttgattaatttattaataccttatttcaacttttgtgtaatactaaaagttttgttttcatctctattgttcttctgtgttgttttttactttaaaacttatgaatttatcaatcacatttctcgaatgatcactttctaccccaaatttttgaaatactgaaacttttcttggttact

SEQ ID NO: 100702 - protein, 1147 aa, Arabidopsis thaliana
  peptide (1)..(1147): Ceres Seq. ID no. 13605876
  misc_feature (672)..(980): Pfam Name: Protein of unknown function (DUF663) Pfam Description: Protein of unknown function (DUF663)
  misc_feature (518)..(1145): Homolog of NCBI NO: 27696627 NR Description: KIAA0187 gene product [Homo sapiens]
  misc_feature (11)..(601): Homolog of NCBI NO: 27696627 NR Description: KIAA0187 gene product [Homo sapiens]
  misc_feature (518)..(1145): Homolog of NCBI NO: 7661980 NR Description: ribosome biogenesis protein BMS1 homolog [Homo >gi|27151474|sp|Q14692|BMS1_HUMAN Ribosome biogenesis protein
  misc_feature (11)..(601): Homolog of NCBI NO: 7661980 NR Description: ribosome biogenesis protein BMS1 homolog [Homo >gi|27151474|sp|Q14692|BMS1_HUMAN Ribosome biogenesis protein
  misc_feature (518)..(1145): Homolog of NCBI NO: 40788900 NR Description: KIAA0187 [Homo sapiens]
  misc_feature (11)..(601): Homolog of NCBI NO: 40788900 NR Description: KIAA0187 [Homo sapiens]
  misc_feature (485)..(1141): Homolog of NCBI NO: 39582203 NR Description: Hypothetical protein CBG08772 [Caenorhabditis
  misc_feature (10)..(458): Homolog of NCBI NO: 39582203 NR Description: Hypothetical protein CBG08772 [Caenorhabditis
  misc_feature (767)..(1147): Homolog of NCBI NO: 14596139 NR Description: Unknown protein [Arabidopsis thaliana]
  misc_feature (445)..(1145): Homolog of NCBI NO: 27151472 NR Description: Ribosome biogenesis protein BMS1 homolog
MAADELMPSHRSHRTPKSGPTARKKSELDKKKRGISVDKQKNLKAFGVKSVVHAKKAKHHAAEKEQKRLHLPKIDRNYGEAPPFVVVVQGPPGVGKSLVIKSLVKEFTKQNVPEVRGPITIVQGKQRRFQFVECPNDINAMVDCAKVADLALLVVDGSYGFEMETFEFLNIMQVHGFPRVMGVLTHLDKFNDVKKLRKTKHHLKHRFWTEIYHGAKLFYLSGLIHGKYTPREVHNLARFVIVIKPQPLTWRTAHPYVLVDRLEDVTPPEKVQMDKKCDRNITVFGYLRGCNFKKRMKVHIAGVGDFIVAGVTALTDPCPLPSAGKKKGLRDRDKLFYAPMSGIGDLVYDKDAVYININSHQVQYSKTDDGKGEPTNKGKGRDVGEDLVKSLQNTKYSVDEKLDKTFINFFGKKTSASSETKLKAEDAYHSLPEGSDSESQSGDDEEDIVGNESEMKQETEIHGGRLRRKAIFKTDLNEDDFEEADDLELDSYDPDTYDFEEADDAESDDNEVEDGGDDSASDSADGEPGDYQIDDKDSGNISQWKAPLKEIARKKNPNLMQIVYGASSLATPLINENHDISDDDESDDEDFFKPKGEQHKNLGGGLDVGYVNSEDCSKFVNYGYLKNWKEKEVCESIRDRFTTGDWSKAALRDKNLGTGGEGEDDELYGDFEDLETGEKHKSHENLESGANENEDEDAEVVERDGNNPRSQADEPGYADKLKEAQEITKQRNELEYNDLDEETRIELAGFRTGTYLRLEIHNVPYEMVEFFDPCHPILVGGIGFGEDNVGYMQARLKKHRWHKKVLKTRDPIIVSIGWRRYQTIPVFAIEDRNGRHRMLKYTPEHMHCLASFWGPLVPPNTGFVAFQNLSNNQAGFRITATSVVLEFNHQARIVKKIKLVGTPCKIKKKTAFIKDMFTSDLEIARFEGSSVRTVSGIRGQVKKAGKNMLDNKAEEGIARCTFEDQIHMSDMVFLRAWTTVEVPQFYNPLTTALQPRDKTWNGMKTFGELRRELNIPIPVNKDSLYKAIERKQKKFNPLQIPKRLEKDLPFMSKPKNIPKRKRPSLEDKRAVIMEPKERKEHTIIQQFQLLQHHTMKKKKATDQKKRKEYEAEKAKNEEINKKRRREERRDRYREEDKQKKKTRRSLD

SEQ ID NO: 100703 - protein, 1141 aa, Arabidopsis thaliana
  peptide (1)..(1141): Ceres Seq. ID no. 13605877
  misc_feature (666)..(974): Pfam Name: Protein of unknown function (DUF663) Pfam Description: Protein of unknown function (DUF663)
  misc_feature (512)..(1139): Homolog of NCBI NO: 27696627 NR Description: KIAA0187 gene product [Homo sapiens]
  misc_feature (5)..(595): Homolog of NCBI NO: 27696627 NR Description: KIAA0187 gene product [Homo sapiens]
  misc_feature (512)..(1139): Homolog of NCBI NO: 7661980 NR Description: ribosome biogenesis protein BMS1 homolog [Homo >gi|27151474|sp|Q14692|BMS1_HUMAN Ribosome biogenesis protein
  misc_feature (5)..(595): Homolog of NCBI NO: 7661980 NR Description: ribosome biogenesis protein BMS1 homolog [Homo >gi|27151474|sp|Q14692|BMS1_HUMAN Ribosome biogenesis protein
  misc_feature (512)..(1139): Homolog of NCBI NO: 40788900 NR Description: KIAA0187 [Homo sapiens]
  misc_feature (5)..(595): Homolog of NCBI NO: 40788900 NR Description: KIAA0187 [Homo sapiens]
  misc_feature (479)..(1135): Homolog of NCBI NO: 39582203 NR Description: Hypothetical protein CBG08772 [Caenorhabditis
  misc_feature (4)..(452): Homolog of NCBI NO: 39582203 NR Description: Hypothetical protein CBG08772 [Caenorhabditis
  misc_feature (761)..(1141): Homolog of NCBI NO: 14596139 NR Description: Unknown protein [Arabidopsis thaliana]
  misc_feature (439)..(1139): Homolog of NCBI NO: 27151472 NR Description: Ribosome biogenesis protein BMS1 homolog
MPSHRSHRTPKSGPTARKKSELDKKKRGISVDKQKNLKAFGVKSVVHAKKAKHHAAEKEQKRLHLPKIDRNYGEAPPFVVVVQGPPGVGKSLVIKSLVKEFTKQNVPEVRGPITIVQGKQRRFQFVECPNDINAMVDCAKVADLALLVVDGSYGFEMETFEFLNIMQVHGFPRVMGVLTHLDKFNDVKKLRKTKHHLKHRFWTEIYHGAKLFYLSGLIHGKYTPREVHNLARFVIVIKPQPLTWRTAHPYVLVDRLEDVTPPEKVQMDKKCDRNITVFGYLRGCNFKKRMKVHIAGVGDFIVAGVTALTDPCPLPSAGKKKGLRDRDKLFYAPMSGIGDLVYDKDAVYININSHQVQYSKTDDGKGEPTNKGKGRDVGEDLVKSLQNTKYSVDEKLDKTFINFFGKKTSASSETKLKAEDAYHSLPEGSDSESQSGDDEEDIVGNESEMKQETEIHGGRLRRKAIFKTDLNEDDFEEADDLELDSYDPDTYDFEEADDAESDDNEVEDGGDDSASDSADGEPGDYQIDDKDSGNISQWKAPLKEIARKKNPNLMQIVYGASSLATPLINENHDISDDDESDDEDFFKPKGEQHKNLGGGLDVGYVNSEDCSKFVNYGYLKNWKEKEVCESIRDRFTTGDWSKAALRDKNLGTGGEGEDDELYGDFEDLETGEKHKSHENLESGANENEDEDAEVVERDGNNPRSQADEPGYADKLKEAQEITKQRNELEYNDLDEETRIELAGFRTGTYLRLEIHNVPYEMVEFFDPCHPILVGGIGFGEDNVGYMQARLKKHRWHKKVLKTRDPIIVSIGWRRYQTIPVFAIEDRNGRHRMLKYTPEHMHCLASFWGPLVPPNTGFVAFQNLSNNQAGFRITATSVVLEFNHQARIVKKIKLVGTPCKIKKKTAFIKDMFTSDLEIARFEGSSVRTVSGIRGQVKKAGKNMLDNKAEEGIARCTFEDQIHMSDMVFLRAWTTVEVPQFYNPLTTALQPRDKTWNGMKTFGELRRELNIPIPVNKDSLYKAIERKQKKFNPLQIPKRLEKDLPFMSKPKNIPKRKRPSLEDKRAVIMEPKERKEHTIIQQFQLLQHHTMKKKKATDQKKRKEYEAEKAKNEEINKKRRREERRDRYREEDKQKKKTRRSLD

SEQ ID NO: 100704 - protein, 1007 aa, Arabidopsis thaliana
  peptide (1)..(1007): Ceres Seq. ID no. 13605878
  misc_feature (532)..(840): Pfam Name: Protein of unknown function (DUF663) Pfam Description: Protein of unknown function (DUF663)
  misc_feature (378)..(1005): Homolog of NCBI NO: 27696627 NR Description: KIAA0187 gene product [Homo sapiens]
  misc_feature (1)..(461): Homolog of NCBI NO: 27696627 NR Description: KIAA0187 gene product [Homo sapiens]
  misc_feature (378)..(1005): Homolog of NCBI NO: 7661980 NR Description: ribosome biogenesis protein BMS1 homolog [Homo >gi|27151474|sp|Q14692|BMS1_HUMAN Ribosome biogenesis protein
  misc_feature (1)..(461): Homolog of NCBI NO: 7661980 NR Description: ribosome biogenesis protein BMS1 homolog [Homo >gi|27151474|sp|Q14692|BMS1_HUMAN Ribosome biogenesis protein
  misc_feature (378)..(1005): Homolog of NCBI NO: 40788900 NR Description: KIAA0187 [Homo sapiens]
  misc_feature (1)..(461): Homolog of NCBI NO: 40788900 NR Description: KIAA0187 [Homo sapiens]
  misc_feature (345)..(1001): Homolog of NCBI NO: 39582203 NR Description: Hypothetical protein CBG08772 [Caenorhabditis
  misc_feature (1)..(318): Homolog of NCBI NO: 39582203 NR Description: Hypothetical protein CBG08772 [Caenorhabditis
  misc_feature (627)..(1007): Homolog of NCBI NO: 14596139 NR Description: Unknown protein [Arabidopsis thaliana]
  misc_feature (305)..(1005): Homolog of NCBI NO: 27151472 NR Description: Ribosome biogenesis protein BMS1 homolog
MVDCAKVADLALLVVDGSYGFEMETFEFLNIMQVHGFPRVMGVLTHLDKFNDVKKLRKTKHHLKHRFWTEIYHGAKLFYLSGLIHGKYTPREVHNLARFVIVIKPQPLTWRTAHPYVLVDRLEDVTPPEKVQMDKKCDRNITVFGYLRGCNFKKRMKVHIAGVGDFIVAGVTALTDPCPLPSAGKKKGLRDRDKLFYAPMSGIGDLVYDKDAVYININSHQVQYSKTDDGKGEPTNKGKGRDVGEDLVKSLQNTKYSVDEKLDKTFINFFGKKTSASSETKLKAEDAYHSLPEGSDSESQSGDDEEDIVGNESEMKQETEIHGGRLRRKAIFKTDLNEDDFEEADDLELDSYDPDTYDFEEADDAESDDNEVEDGGDDSASDSADGEPGDYQIDDKDSGNISQWKAPLKEIARKKNPNLMQIVYGASSLATPLINENHDISDDDESDDEDFFKPKGEQHKNLGGGLDVGYVNSEDCSKFVNYGYLKNWKEKEVCESIRDRFTTGDWSKAALRDKNLGTGGEGEDDELYGDFEDLETGEKHKSHENLESGANENEDEDAEVVERDGNNPRSQADEPGYADKLKEAQEITKQRNELEYNDLDEETRIELAGFRTGTYLRLEIHNVPYEMVEFFDPCHPILVGGIGFGEDNVGYMQARLKKHRWHKKVLKTRDPIIVSIGWRRYQTIPVFAIEDRNGRHRMLKYTPEHMHCLASFWGPLVPPNTGFVAFQNLSNNQAGFRITATSVVLEFNHQARIVKKIKLVGTPCKIKKKTAFIKDMFTSDLEIARFEGSSVRTVSGIRGQVKKAGKNMLDNKAEEGIARCTFEDQIHMSDMVFLRAWTTVEVPQFYNPLTTALQPRDKTWNGMKTFGELRRELNIPIPVNKDSLYKAIERKQKKFNPLQIPKRLEKDLPFMSKPKNIPKRKRPSLEDKRAVIMEPKERKEHTIIQQFQLLQHHTMKKKKATDQKKRKEYEAEKAKNEEINKKRRREERRDRYREEDKQKKKTRRSLD

SEQ ID NO: 100705 - DNA, 965 bp, Arabidopsis thaliana
  misc_feature (1)..(965): Ceres Seq. ID no. 13605883
  misc_feature: MA Experiment ID: 20000180 Result: Down-regulated in Transcription
  misc_feature: MA Experiment 20000180 PARAMETER Experiment Name: At_Germinating_Seeds_P Parameter: Age (hr) Value: 24 vs. 0
  misc_feature: MA Experiment 20000180 PARAMETER Experiment Name: At_Germinating_Seeds_P Parameter: Tissue Value: Germinating Seeds
  misc_feature: MA Experiment ID: 20000265 Result: Up-regulated in Transcription
  misc_feature: MA Experiment 20000265 PARAMETER Experiment Name: At_Open_Flower_P Parameter: Age (day) Value: 21
  misc_feature: MA Experiment 20000265 PARAMETER Experiment Name: At_Open_Flower_P Parameter: Plant Line Value: WS
  misc_feature: MA Experiment 20000265 PARAMETER Experiment Name: At_Open_Flower_P Parameter: Tissue Value: Closed Flower vs. Whole Plant
  misc_feature: MA Experiment ID: 20000794 Result: Down-regulated in Transcription
  misc_feature: MA Experiment 20000794 PARAMETER Experiment Name: At_Petals_P Parameter: Age (day) Value: 23-25 days
  misc_feature: MA Experiment 20000794 PARAMETER Experiment Name: At_Petals_P Parameter: Plant Line Value: WS
  misc_feature: MA Experiment 20000794 PARAMETER Experiment Name: At_Petals_P Parameter: Tissue Value: Petals vs. Whole plant
  misc_feature: MA Experiment ID: 20001905 Result: Down-regulated in Transcription
  misc_feature: MA Experiment 20001905 PARAMETER Experiment Name: At_Drought_Reproduction_P Parameter: Age (day) Value: 40
  misc_feature: MA Experiment 20001905 PARAMETER Experiment Name: At_Drought_Reproduction_P Parameter: Organism Value: A. thaliana
  misc_feature: MA Experiment 20001905 PARAMETER Experiment Name: At_Drought_Reproduction_P Parameter: Plant Line Value: WS
  misc_feature: MA Experiment 20001905 PARAMETER Experiment Name: At_Drought_Reproduction_P Parameter: Timepoint (day) Value: 10
  misc_feature: MA Experiment 20001905 PARAMETER Experiment Name: At_Drought_Reproduction_P Parameter: Tissue Value: Rosettes
  misc_feature: MA Experiment 20001905 PARAMETER Experiment Name: At_Drought_Reproduction_P Parameter: Treatment Value: Drought vs. No Drought
cttggctcttagggctcgctaaattttctcagggctgtgaccatcgaccatcgtcgtcttcgcggagctcagttgaaagatgttaacggctgatataccaccaaatcagtcaatctacataaaacatatcaatgagaagatcaagaaagaagagctgaagaggtctctttactgtttgttctctcagtttggaagattacttgatgtggttgcgttaaagactcctaagctccggggacaagcatgggttgtttttactgaagtcaccgctgctagcaacgctgtccgtcagatgcagaactttcctttctatgataagcctatgcggatacaatatgcaaaatcaaagtcagattatgttactaaagccgaagggtcttttgttccaaaagaaaagaagatgaagcaagaagagaaagttgaaaggaagcgacatgctgaagaaactcaacaaccaagcatgcctaatggcgcaactactcagaacggaatgcctgtgcctcctttccagccgagtgggcaagacacgatgccaccaaacaacatactcttcattcataatcttcccattgagacgaatagtatgatgcttcagctgctctttgagcaatacccaggattcaaagagataagaatgatcgaagcaaaacccggaattgcgtttgtggagtatgaagacgatgttcagtcttccatggccatgcaggctcttcagggtttcaagatcactccgcagaatccaatggtcgtctcttttgccaagaagtgaaaaccagagttttgttatgcggatgaatggtaatgatatactaattagtagctgtttaaaagcaaactgtcttattttatttggttcgtttccgattagtggtgtgaatgaccccgaagctttagaccagaatgtaatgagatcgaagaattgagagtgatttggttggagaaaatctcattttaaatgccttatt

SEQ ID NO: 100706 - protein, 229 aa, Arabidopsis thaliana
  peptide (1)..(229): Ceres Seq. ID no. 13605884
  misc_feature (12)..(84): Pfam Name: RNA recognition motif. (a.k.a. RRM, RBD, or RNP domain) Pfam Description: RNA recognition motif. (a.k.a. RRM, RBD, or RNP
  misc_feature (1)..(229): Homolog of NCBI NO: 30679892 NR Description: small nuclear ribonucleoprotein U2B (spliceosomal putative [Arabidopsis thaliana] >gi|23296313|gb|AAN13038.1|
  misc_feature (1)..(229): Homolog of NCBI NO: 30679897 NR Description: small nuclear ribonucleoprotein U2B (spliceosomal
  misc_feature (1)..(229): Homolog of NCBI NO: 19347861 NR Description: putative spliceosomal protein (U2B) [Arabidopsis
  misc_feature (1)..(229): Homolog of NCBI NO: 15227729 NR Description: small nuclear ribonucleoprotein U2B (spliceosomal putative [Arabidopsis thaliana] >gi|25294326|pir||C84706 probable
  misc_feature (1)..(229): Homolog of NCBI NO: 21593001 NR Description: putative small nuclear ribonucleoprotein U2B
  misc_feature (1)..(229): Homolog of NCBI NO: 421960 NR Description: small nuclear ribonucleoprotein U2B'' - potato
  misc_feature (1)..(140): Homolog of NCBI NO: 25294325 NR Description: hypothetical protein [imported] - Arabidopsis >gi|8954049|gb|AAF82223.1|AC067971_31 Strong similarity to a
  misc_feature (5)..(229): Homolog of NCBI NO: 2119045 NR Description: small nuclear ribonucleoprotein U1A - potato
  misc_feature (7)..(229): Homolog of NCBI NO: 34897622 NR Description: putative small nuclear ribonucleoprotein U1A sativa] >gi|14595706|gb|AAK70905.1| putative small nuclear
  misc_feature (4)..(229): Homolog of NCBI NO: 15226631 NR Description: small nuclear ribonucleoprotein (spliceosomal U1A [Arabidopsis thaliana] >gi|2119046|pir||S59118 small nuclear
MLTADIPPNQSIYIKHINEKIKKEELKRSLYCLFSQFGRLLDVVALKTPKLRGQAWVVFTEVTAASNAVRQMQNFPFYDKPMRIQYAKSKSDYVTKAEGSFVPKEKKMKQEEKVERKRHAEETQQPSMPNGATTQNGMPVPPFQPSGQDTMPPNNILFIHNLPIETNSMMLQLLFEQYPGFKEIRMIEAKPGIAFVEYEDDVQSSMAMQALQGFKITPQNPMVVSFAKK

SEQ ID NO: 100707 - protein, 158 aa, Arabidopsis thaliana
  peptide (1)..(158): Ceres Seq. ID no. 13605885
  misc_feature (1)..(158): Homolog of NCBI NO: 30679892 NR Description: small nuclear ribonucleoprotein U2B (spliceosomal putative [Arabidopsis thaliana] >gi|23296313|gb|AAN13038.1|
  misc_feature (1)..(158): Homolog of NCBI NO: 30679897 NR Description: small nuclear ribonucleoprotein U2B (spliceosomal
  misc_feature (1)..(158): Homolog of NCBI NO: 19347861 NR Description: putative spliceosomal protein (U2B) [Arabidopsis
  misc_feature (1)..(158): Homolog of NCBI NO: 15227729 NR Description: small nuclear ribonucleoprotein U2B (spliceosomal putative [Arabidopsis thaliana] >gi|25294326|pir||C84706 probable
  misc_feature (1)..(158): Homolog of NCBI NO: 21593001 NR Description: putative small nuclear ribonucleoprotein U2B
  misc_feature (1)..(158): Homolog of NCBI NO: 421960 NR Description: small nuclear ribonucleoprotein U2B'' - potato
  misc_feature (1)..(69): Homolog of NCBI NO: 25294325 NR Description: hypothetical protein [imported] - Arabidopsis >gi|8954049|gb|AAF82223.1|AC067971_31 Strong similarity to a
  misc_feature (1)..(158): Homolog of NCBI NO: 2119045 NR Description: small nuclear ribonucleoprotein U1A - potato
  misc_feature (1)..(158): Homolog of NCBI NO: 34897622 NR Description: putative small nuclear ribonucleoprotein U1A sativa] >gi|14595706|gb|AAK70905.1| putative small nuclear
  misc_feature (1)..(158): Homolog of NCBI NO: 15226631 NR Description: small nuclear ribonucleoprotein (spliceosomal U1A [Arabidopsis thaliana] >gi|2119046|pir||S59118 small nuclear
MQNFPFYDKPMRIQYAKSKSDYVTKAEGSFVPKEKKMKQEEKVERKRHAEETQQPSMPNGATTQNGMPVPPFQPSGQDTMPPNNILFIHNLPIETNSMMLQLLFEQYPGFKEIRMIEAKPGIAFVEYEDDVQSSMAMQALQGFKITPQNPMVVSFAKK

SEQ ID NO: 100708 - protein, 148 aa, Arabidopsis thaliana
  peptide (1)..(148): Ceres Seq. ID no. 13605886
  misc_feature (1)..(148): Homolog of NCBI NO: 30679892 NR Description: small nuclear ribonucleoprotein U2B (spliceosomal putative [Arabidopsis thaliana] >gi|23296313|gb|AAN13038.1|
  misc_feature (1)..(148): Homolog of NCBI NO: 30679897 NR Description: small nuclear ribonucleoprotein U2B (spliceosomal
  misc_feature (1)..(148): Homolog of NCBI NO: 19347861 NR Description: putative spliceosomal protein (U2B) [Arabidopsis
  misc_feature (1)..(148): Homolog of NCBI NO: 15227729 NR Description: small nuclear ribonucleoprotein U2B (spliceosomal putative [Arabidopsis thaliana] >gi|25294326|pir||C84706 probable
  misc_feature (1)..(148): Homolog of NCBI NO: 21593001 NR Description: putative small nuclear ribonucleoprotein U2B
  misc_feature (1)..(148): Homolog of NCBI NO: 421960 NR Description: small nuclear ribonucleoprotein U2B'' - potato
  misc_feature (1)..(59): Homolog of NCBI NO: 25294325 NR Description: hypothetical protein [imported] - Arabidopsis >gi|8954049|gb|AAF82223.1|AC067971_31 Strong similarity to a
  misc_feature (1)..(148): Homolog of NCBI NO: 2119045 NR Description: small nuclear ribonucleoprotein U1A - potato
  misc_feature (1)..(148): Homolog of NCBI NO: 34897622 NR Description: putative small nuclear ribonucleoprotein U1A sativa] >gi|14595706|gb|AAK70905.1| putative small nuclear
  misc_feature (1)..(148): Homolog of NCBI NO: 15226631 NR Description: small nuclear ribonucleoprotein (spliceosomal U1A [Arabidopsis thaliana] >gi|2119046|pir||S59118 small nuclear
MRIQYAKSKSDYVTKAEGSFVPKEKKMKQEEKVERKRHAEETQQPSMPNGATTQNGMPVPPFQPSGQDTMPPNNILFIHNLPIETNSMMLQLLFEQYPGFKEIRMIEAKPGIAFVEYEDDVQSSMAMQALQGFKITPQNPMVVSFAKK

SEQ ID NO: 100709 - DNA, 1165 bp, Arabidopsis thaliana
  misc_feature (1)..(1165): Ceres Seq. ID no. 13605901
  misc_feature: MA Experiment ID: 108461 Result: Up-regulated in Transcription
  misc_feature: MA Experiment 108461 PARAMETER Experiment Name: At_Germinating_Seeds_cDNA_P Parameter: Age (day) Value: 1 vs. 0
  misc_feature: MA Experiment 108461 PARAMETER Experiment Name: At_Germinating_Seeds_cDNA_P Parameter: Tissue Value: Germinating Seeds
  misc_feature: MA Experiment ID: 108462 Result: Up-regulated in Transcription
  misc_feature: MA Experiment 108462 PARAMETER Experiment Name: At_Germinating_Seeds_cDNA_P Parameter: Age (day) Value: 2 vs. 0
  misc_feature: MA Experiment 108462 PARAMETER Experiment Name: At_Germinating_Seeds_cDNA_P Parameter: Tissue Value: Germinating Seeds
  misc_feature: MA Experiment ID: 20000111 Result: Down-regulated in Transcription
  misc_feature: MA Experiment 20000111 PARAMETER Experiment Name: At_42deg_Heat_cDNA_P Parameter: Temperature (deg C) Value: 42 vs. 22
  misc_feature: MA Experiment 20000111 PARAMETER Experiment Name: At_42deg_Heat_cDNA_P Parameter: Timepoint (hr) Value: 6
  misc_feature: MA Experiment 20000111 PARAMETER Experiment Name: At_42deg_Heat_cDNA_P Parameter: Tissue Value: Aerial
  misc_feature: MA Experiment ID: 20000113 Result: Down-regulated in Transcription
  misc_feature: MA Experiment 20000113 PARAMETER Experiment Name: At_42deg_Heat_cDNA_P Parameter: Temperature (deg C) Value: 42 vs. 22
  misc_feature: MA Experiment 20000113 PARAMETER Experiment Name: At_42deg_Heat_cDNA_P Parameter: Timepoint (hr) Value: 8
  misc_feature: MA Experiment 20000113 PARAMETER Experiment Name: At_42deg_Heat_cDNA_P Parameter: Tissue Value: Aerial
  misc_feature: MA Experiment ID: 20000179 Result: Up-regulated in Transcription
  misc_feature: MA Experiment 20000179 PARAMETER Experiment Name: At_Germinating_Seeds_P Parameter: Age (hr) Value: 6 vs. 0
  misc_feature: MA Experiment 20000179 PARAMETER Experiment Name: At_Germinating_Seeds_P Parameter: Tissue Value: Germinating Seeds
  misc_feature: MA Experiment ID: 20000180 Result: Up-regulated in Transcription
  misc_feature: MA Experiment 20000180 PARAMETER Experiment Name: At_Germinating_Seeds_P Parameter: Age (hr) Value: 24 vs. 0
  misc_feature: MA Experiment 20000180 PARAMETER Experiment Name: At_Germinating_Seeds_P Parameter: Tissue Value: Germinating Seeds
  misc_feature: MA Experiment ID: 20000227 Result: Up-regulated in Transcription
  misc_feature: MA Experiment 20000227 PARAMETER Experiment Name: At_Root-Tips-vs-Tops_P Parameter: Tissue Value: Root Tips vs. Root Tops
  misc_feature: MA Experiment ID: 20000235 Result: Up-regulated in Transcription
  misc_feature: MA Experiment 20000235 PARAMETER Experiment Name: At_Siliques_P Parameter: Age (day) Value: 21
  misc_feature: MA Experiment 20000235 PARAMETER Experiment Name: At_Siliques_P Parameter: Organism Value: A. thaliana
  misc_feature: MA Experiment 20000235 PARAMETER Experiment Name: At_Siliques_P Parameter: Plant Line Value: WS
  misc_feature: MA Experiment 20000235 PARAMETER Experiment Name: At_Siliques_P Parameter: Tissue Value: 5-10mm Siliques vs. Whole Plant
  misc_feature: MA Experiment ID: 20001560 Result: Up-regulated in Transcription
  misc_feature: MA Experiment 20001560 PARAMETER Experiment Name: At_Drought_Soil_Dry_P Parameter: Age (day) Value: 28
  misc_feature: MA Experiment 20001560 PARAMETER Experiment Name: At_Drought_Soil_Dry_P Parameter: Organism Value: A. thaliana
  misc_feature: MA Experiment 20001560 PARAMETER Experiment Name: At_Drought_Soil_Dry_P Parameter: Plant Line Value: WS
  misc_feature: MA Experiment 20001560 PARAMETER Experiment Name: At_Drought_Soil_Dry_P Parameter: Post Timepoint (hr) Value: None
  misc_feature: MA Experiment 20001560 PARAMETER Experiment Name: At_Drought_Soil_Dry_P Parameter: Post-Treatment Value: None
  misc_feature: MA Experiment 20001560 PARAMETER Experiment Name: At_Drought_Soil_Dry_P Parameter: Timepoint (day) Value: 14
  misc_feature: MA Experiment 20001560 PARAMETER Experiment Name: At_Drought_Soil_Dry_P Parameter: Treatment Value: Drought vs. No Drought
  misc_feature: MA Experiment ID: 20001911 Result: Down-regulated in Transcription
  misc_feature: MA Experiment 20001911 PARAMETER Experiment Name: At_Drought_Reproduction_P Parameter: Age (day) Value: 40
  misc_feature: MA Experiment 20001911 PARAMETER Experiment Name: At_Drought_Reproduction_P Parameter: Organism Value: A. thaliana
  misc_feature: MA Experiment 20001911 PARAMETER Experiment Name: At_Drought_Reproduction_P Parameter: Plant Line Value: WS
  misc_feature: MA Experiment 20001911 PARAMETER Experiment Name: At_Drought_Reproduction_P Parameter: Timepoint (day) Value: 10
  misc_feature: MA Experiment 20001911 PARAMETER Experiment Name: At_Drought_Reproduction_P Parameter: Tissue Value: Flowers
  misc_feature: MA Experiment 20001911 PARAMETER Experiment Name: At_Drought_Reproduction_P Parameter: Treatment Value: Drought vs. No Drought
atgacccatattctcttgactcgtgaggttgaaatgtaaatcactttaaaattaaaaacgtaccttgtcagttttgagactcaaaaggacttgaaatattgaaatccctattctttacgcgtactcgagatttttcgctcttgagagaatcacttcgacaatgtcggtaacggctgctttcattgattcggatcaaactcagcacaacattcttatggattcccaatcaactgtctccggtgtgaaaactgtcaagattagcaatgtttcactaattgtttctaagaaagatgtcaaagagttcttttctttctctggtgacattcaatacgtcgagatgcgaagtgagacacaagagagtcaggtcgcatatgttacttttaaggattcacaaggagctgaaactgcaatgctcttaacgggagctgtcattgcagatcttcgtgttagtataactcctgctgttaactatcagctaccaccagaagcccttgcacttgactcggaacattcgtttaatggtttttctgtcaagaaagctgaagatgtggtgaacatcatggtgggaagaggttatgctcttggaaaagacgccatggagaaagccaaagcatttgatgacagacacaacttgatctcaaacgcttctgcaaccattgcatcgcttgacgataagatgggtctgagcgaaaagctaagcataggaacaactgtggttaatgagaagttgagagatatcgatgagcgatatcaggtgagggagataacgaaatctgctttagcagctgctgaagagacagcaatcagtgcaagaacggctttaatggcaaacccttatgtatcaagtggagcttcgtggttttcaaacgcgtttggcgcagtgacaaaggcggttaaagagaaagttgagaatggaggagaaggaagaaaggagatcatcacacttgatccctcttcacccaaagttcctgctgtagttcctgttaagctcggttgatgcagatctcatcaaaccaatcggatctcgactaaattctttgataggtttgttgttcatatatatgctttcgtatgctaaagagaagataaaaagacataaaccatgaaaggtgttgttacattcaaccagcatttgttcctctcttgaaagagattattaagattc

SEQ ID NO: 100710 - protein, 278 aa, Arabidopsis thaliana; identical to SEQ ID NO: 23413
  peptide (1)..(278): Ceres Seq. ID no. 13605902
  misc_feature (31)..(98): Pfam Name: RNA recognition motif. (a.k.a. RRM, RBD, or RNP domain) Pfam Description: RNA recognition motif. (a.k.a. RRM, RBD, or RNP
  misc_feature (1)..(278): Homolog of NCBI NO: 18408904 NR Description: RNA recognition motif (RRM)-containing protein thaliana] >gi|21593120|gb|AAM65069.1| putative splicing
  misc_feature (1)..(278): Homolog of NCBI NO: 30697598 NR Description: RNA recognition motif (RRM)-containing protein
  misc_feature (1)..(278): Homolog of NCBI NO: 30697595 NR Description: RNA recognition motif (RRM)-containing protein
  misc_feature (1)..(248): Homolog of NCBI NO: 26450623 NR Description: unknown protein [Arabidopsis thaliana]
  misc_feature (60)..(278): Homolog of NCBI NO: 30697600 NR Description: RNA recognition motif (RRM)-containing protein
  misc_feature (60)..(278): Homolog of NCBI NO: 25404689 NR Description: unknown protein, 64612-65506 [imported] -
  misc_feature (28)..(260): Homolog of NCBI NO: 18071362 NR Description: putative splicing regulatory protein [Oryza
  misc_feature (26)..(266): Homolog of NCBI NO: 38347069 NR Description: OSJNBa0006A01.10 [Oryza sativa (japonica
  misc_feature (28)..(263): Homolog of NCBI NO: 38344181 NR Description: OSJNBa0053K19.20 [Oryza sativa (japonica
  misc_feature (30)..(247): Homolog of NCBI NO: 18414951 NR Description: RNA recognition motif (RRM)-containing protein thaliana] >gi|21593540|gb|AAM65507.1| putative splicing

SEQ ID NO: 100711 - protein, 260 aa, Arabidopsis thaliana; identical to SEQ ID NO: 23414
  peptide (1)..(260): Ceres Seq. ID no. 13605903
  misc_feature (13)..(80): Pfam Name: RNA recognition motif. (a.k.a. RRM, RBD, or RNP domain) Pfam Description: RNA recognition motif. (a.k.a. RRM, RBD, or RNP
  misc_feature (1)..(260): Homolog of NCBI NO: 18408904 NR Description: RNA recognition motif (RRM)-containing protein thaliana] >gi|21593120|gb|AAM65069.1| putative splicing
  misc_feature (1)..(260): Homolog of NCBI NO: 30697598 NR Description: RNA recognition motif (RRM)-containing protein
  misc_feature (1)..(260): Homolog of NCBI NO: 30697595 NR Description: RNA recognition motif (RRM)-containing protein
  misc_feature (1)..(230): Homolog of NCBI NO: 26450623 NR Description: unknown protein [Arabidopsis thaliana]
  misc_feature (42)..(260): Homolog of NCBI NO: 30697600 NR Description: RNA recognition motif (RRM)-containing protein
  misc_feature (42)..(260): Homolog of NCBI NO: 25404689 NR Description: unknown protein, 64612-65506 [imported] -
  misc_feature (10)..(242): Homolog of NCBI NO: 18071362 NR Description: putative splicing regulatory protein [Oryza
  misc_feature (8)..(248): Homolog of NCBI NO: 38347069 NR Description: OSJNBa0006A01.10 [Oryza sativa (japonica
  misc_feature (10)..(245): Homolog of NCBI NO: 38344181 NR Description: OSJNBa0053K19.20 [Oryza sativa (japonica
  misc_feature (12)..(229): Homolog of NCBI NO: 18414951 NR Description: RNA recognition motif (RRM)-containing protein thaliana] >gi|21593540|gb|AAM65507.1| putative splicing

SEQ ID NO: 100712 - protein, 219 aa, Arabidopsis thaliana; identical to SEQ ID NO: 23415
  peptide (1)..(219): Ceres Seq. ID no. 13605904
  misc_feature (1)..(219): Homolog of NCBI NO: 18408904 NR Description: RNA recognition motif (RRM)-containing protein thaliana] >gi|21593120|gb|AAM65069.1| putative splicing
  misc_feature (1)..(219): Homolog of NCBI NO: 30697598 NR Description: RNA recognition motif (RRM)-containing protein
  misc_feature (1)..(219): Homolog of NCBI NO: 30697595 NR Description: RNA recognition motif (RRM)-containing protein
  misc_feature (1)..(189): Homolog of NCBI NO: 26450623 NR Description: unknown protein [Arabidopsis thaliana]
  misc_feature (1)..(219): Homolog of NCBI NO: 30697600 NR Description: RNA recognition motif (RRM)-containing protein
  misc_feature (1)..(219): Homolog of NCBI NO: 25404689 NR Description: unknown protein, 64612-65506 [imported] -
  misc_feature (1)..(201): Homolog of NCBI NO: 18071362 NR Description: putative splicing regulatory protein [Oryza
  misc_feature (1)..(207): Homolog of NCBI NO: 38347069 NR Description: OSJNBa0006A01.10 [Oryza sativa (japonica
  misc_feature (1)..(204): Homolog of NCBI NO: 38344181 NR Description: OSJNBa0053K19.20 [Oryza sativa (japonica
  misc_feature (1)..(188): Homolog of NCBI NO: 18414951 NR Description: RNA recognition motif (RRM)-containing protein thaliana] >gi|21593540|gb|AAM65507.1| putative splicing

SEQ ID NO: 100713 - DNA, 764 bp, Arabidopsis thaliana
  misc_feature (1)..(764): Ceres Seq. ID no. 13605917
  misc_feature: MA Experiment ID: 108461 Result: Up-regulated in Transcription
  misc_feature: MA Experiment 108461 PARAMETER Experiment Name: At_Germinating_Seeds_cDNA_P Parameter: Age (day) Value: 1 vs. 0
  misc_feature: MA Experiment 108461 PARAMETER Experiment Name: At_Germinating_Seeds_cDNA_P Parameter: Tissue Value: Germinating Seeds
  misc_feature: MA Experiment ID: 108462 Result: Up-regulated in Transcription
  misc_feature: MA Experiment 108462 PARAMETER Experiment Name: At_Germinating_Seeds_cDNA_P Parameter: Age (day) Value: 2 vs. 0
  misc_feature: MA Experiment 108462 PARAMETER Experiment Name: At_Germinating_Seeds_cDNA_P Parameter: Tissue Value: Germinating Seeds
  misc_feature: MA Experiment ID: 108463 Result: Up-regulated in Transcription
  misc_feature: MA Experiment 108463 PARAMETER Experiment Name: At_Germinating_Seeds_cDNA_P Parameter: Age (day) Value: 3 vs. 0
  misc_feature: MA Experiment 108463 PARAMETER Experiment Name: At_Germinating_Seeds_cDNA_P Parameter: Tissue Value: Germinating Seeds
  misc_feature: MA Experiment ID: 108464 Result: Up-regulated in Transcription
  misc_feature: MA Experiment 108464 PARAMETER Experiment Name: At_Germinating_Seeds_cDNA_P Parameter: Age (day) Value: 4 vs. 0
  misc_feature: MA Experiment 108464 PARAMETER Experiment Name: At_Germinating_Seeds_cDNA_P Parameter: Tissue Value: Germinating Seeds
  misc_feature: MA Experiment ID: 108488 Result: Up-regulated in Transcription
  misc_feature: MA Experiment ID: 20000180 Result: Up-regulated in Transcription
  misc_feature: MA Experiment 20000180 PARAMETER Experiment Name: At_Germinating_Seeds_P Parameter: Age (hr) Value: 24 vs. 0
  misc_feature: MA Experiment 20000180 PARAMETER Experiment Name: At_Germinating_Seeds_P Parameter: Tissue Value: Germinating Seeds
  misc_feature: MA Experiment ID: 20000185 Result: Down-regulated in Transcription
  misc_feature: MA Experiment 20000185 PARAMETER Experiment Name: At_Roots__P Parameter: Age (day) Value: 7 vs. 21
  misc_feature: MA Experiment 20000185 PARAMETER Experiment Name: At_Roots__P Parameter: Organism Value: A. thaliana
  misc_feature: MA Experiment 20000185 PARAMETER Experiment Name: At_Roots__P Parameter: Tissue Value: Roots vs. Whole Plant
  misc_feature: MA Experiment ID: 20000439 Result: Down-regulated in Transcription
  misc_feature: MA Experiment 20000439 PARAMETER Experiment Name: At_Roots__P Parameter: Age (day) Value: 14 vs. 21
  misc_feature: MA Experiment 20000439 PARAMETER Experiment Name: At_Roots__P Parameter: Organism Value: A. thaliana
  misc_feature: MA Experiment 20000439 PARAMETER Experiment Name: At_Roots__P Parameter: Tissue Value: Roots vs. Whole Plant
  misc_feature: MA Experiment ID: 20000451 Result: Down-regulated in Transcription
  misc_feature: MA Experiment 20000451 PARAMETER Experiment Name: At_CS6879_Shoots-Roots_P Parameter: Age (day) Value: 14
  misc_feature: MA Experiment 20000451 PARAMETER Experiment Name: At_CS6879_Shoots-Roots_P Parameter: Organism Value: A. thaliana
  misc_feature: MA Experiment 20000451 PARAMETER Experiment Name: At_CS6879_Shoots-Roots_P Parameter: Plant Line Value: CS6879 vs. WS
  misc_feature: MA Experiment 20000451 PARAMETER Experiment Name: At_CS6879_Shoots-Roots_P Parameter: Tissue Value: Roots
  misc_feature: MA Experiment ID: 20000794 Result: Down-regulated in Transcription
  misc_feature: MA Experiment 20000794 PARAMETER Experiment Name: At_Petals_P Parameter: Age (day) Value: 23-25 days
  misc_feature: MA Experiment 20000794 PARAMETER Experiment Name: At_Petals_P Parameter: Plant Line Value: WS
  misc_feature: MA Experiment 20000794 PARAMETER Experiment Name: At_Petals_P Parameter: Tissue Value: Petals vs. Whole plant
  misc_feature: MA Experiment ID: 20001248 Result: Down-regulated in Transcription
  misc_feature: MA Experiment 20001248 PARAMETER Experiment Name: At_Far-red-induction_P Parameter: Age (day) Value: 7
  misc_feature: MA Experiment 20001248 PARAMETER Experiment Name: At_Far-red-induction_P Parameter: Light Value: Far-red vs. White
  misc_feature: MA Experiment 20001248 PARAMETER Experiment Name: At_Far-red-induction_P Parameter: Organism Value: A. thaliana
  misc_feature: MA Experiment 20001248 PARAMETER Experiment Name: At_Far-red-induction_P Parameter: Plant Line Value: Columbia
  misc_feature: MA Experiment 20001248 PARAMETER Experiment Name: At_Far-red-induction_P Parameter: Timepoint (hr) Value: 4
  misc_feature: MA Experiment 20001248 PARAMETER Experiment Name: At_Far-red-induction_P Parameter: Tissue Value: Whole Plant
  misc_feature: MA Experiment ID: 20001450 Result: Down-regulated in Transcription
  misc_feature: MA Experiment 20001450 PARAMETER Experiment Name: At_Far-red-induction_P Parameter: Age (day) Value: 7
  misc_feature: MA Experiment 20001450 PARAMETER Experiment Name: At_Far-red-induction_P Parameter: Light Value: Far-red vs. White
  misc_feature: MA Experiment 20001450 PARAMETER Experiment Name: At_Far-red-induction_P Parameter: Organism Value: A. thaliana
  misc_feature: MA Experiment 20001450 PARAMETER Experiment Name: At_Far-red-induction_P Parameter: Plant Line Value: Columbia
  misc_feature: MA Experiment 20001450 PARAMETER Experiment Name: At_Far-red-induction_P Parameter: Timepoint (hr) Value: 8
  misc_feature: MA Experiment 20001450 PARAMETER Experiment Name: At_Far-red-induction_P Parameter: Tissue Value: Whole Plant
  misc_feature: MA Experiment ID: 20001557 Result: Down-regulated in Transcription
  misc_feature: MA Experiment 20001557 PARAMETER Experiment Name: At_Drought_Soil_Dry_P Parameter: Age (day) Value: 27
  misc_feature: MA Experiment 20001557 PARAMETER Experiment Name: At_Drought_Soil_Dry_P Parameter: Organism Value: A. thaliana
  misc_feature: MA Experiment 20001557 PARAMETER Experiment Name: At_Drought_Soil_Dry_P Parameter: Plant Line Value: WS
  misc_feature: MA Experiment 20001557 PARAMETER Experiment Name: At_Drought_Soil_Dry_P Parameter: Post Timepoint (hr) Value: 3
  misc_feature: MA Experiment 20001557 PARAMETER Experiment Name: At_Drought_Soil_Dry_P Parameter: Post-Treatment Value: Re-Water vs. No Drought
  misc_feature: MA Experiment 20001557 PARAMETER Experiment Name: At_Drought_Soil_Dry_P Parameter: Timepoint (day) Value: 13
  misc_feature: MA Experiment 20001557 PARAMETER Experiment Name: At_Drought_Soil_Dry_P Parameter: Treatment Value: Drought vs. No Drought
  misc_feature: MA Experiment ID: 20001558 Result: Down-regulated in Transcription
  misc_feature: MA Experiment 20001558 PARAMETER Experiment Name: At_Drought_Soil_Dry_P Parameter: Age (day) Value: 27
  misc_feature: MA Experiment 20001558 PARAMETER Experiment Name: At_Drought_Soil_Dry_P Parameter: Organism Value: A. thaliana
  misc_feature: MA Experiment 20001558 PARAMETER Experiment Name: At_Drought_Soil_Dry_P Parameter: Plant Line Value: WS
  misc_feature: MA Experiment 20001558 PARAMETER Experiment Name: At_Drought_Soil_Dry_P Parameter: Post Timepoint (hr) Value: 6
  misc_feature: MA Experiment 20001558 PARAMETER Experiment Name: At_Drought_Soil_Dry_P Parameter: Post-Treatment Value: Re-Water vs. No Drought
  misc_feature: MA Experiment 20001558 PARAMETER Experiment Name: At_Drought_Soil_Dry_P Parameter: Timepoint (day) Value: 13
  misc_feature: MA Experiment 20001558 PARAMETER Experiment Name: At_Drought_Soil_Dry_P Parameter: Treatment Value: Drought vs. No Drought
  misc_feature: MA Experiment ID: 20001559 Result: Down-regulated in Transcription
  misc_feature: MA Experiment 20001559 PARAMETER Experiment Name: At_Drought_Soil_Dry_P Parameter: Age (day) Value: 28
  misc_feature: MA Experiment 20001559 PARAMETER Experiment Name: At_Drought_Soil_Dry_P Parameter: Organism Value: A. thaliana
  misc_feature: MA Experiment 20001559 PARAMETER Experiment Name: At_Drought_Soil_Dry_P Parameter: Plant Line Value: WS
  misc_feature: MA Experiment 20001559 PARAMETER Experiment Name: At_Drought_Soil_Dry_P Parameter: Post Timepoint (hr) Value: 29
  misc_feature: MA Experiment 20001559 PARAMETER Experiment Name: At_Drought_Soil_Dry_P Parameter: Post-Treatment Value: Re-Water vs. No Drought
  misc_feature: MA Experiment 20001559 PARAMETER Experiment Name: At_Drought_Soil_Dry_P Parameter: Timepoint (day) Value: 14
  misc_feature: MA Experiment 20001559 PARAMETER Experiment Name: At_Drought_Soil_Dry_P Parameter: Treatment Value: Drought vs. No Drought
  misc_feature: MA Experiment ID: 20001757 Result: Up-regulated in Transcription
  misc_feature: MA Experiment 20001757 PARAMETER Experiment Name: At_50mM_NH4NO3_L-to-H_P Parameter: Timepoint (hr) Value: 6
  misc_feature: MA Experiment 20001757 PARAMETER Experiment Name: At_50mM_NH4NO3_L-to-H_P Parameter: Tissue Value: Leaf
  misc_feature: MA Experiment 20001757 PARAMETER Experiment Name: At_50mM_NH4NO3_L-to-H_P Parameter: Treatment Value: 50mM NH4NO3 vs 100mM Mannitol
  misc_feature: MA Experiment ID: 20001904 Result: Down-regulated in Transcription
  misc_feature: MA Experiment 20001904 PARAMETER Experiment Name: At_Drought_Reproduction_P Parameter: Age (day) Value: 37
  misc_feature: MA Experiment 20001904 PARAMETER Experiment Name: At_Drought_Reproduction_P Parameter: Organism Value: A. thaliana
  misc_feature: MA Experiment 20001904 PARAMETER Experiment Name: At_Drought_Reproduction_P Parameter: Plant Line Value: WS
  misc_feature: MA Experiment 20001904 PARAMETER Experiment Name: At_Drought_Reproduction_P Parameter: Timepoint (day) Value: 7
  misc_feature: MA Experiment 20001904 PARAMETER Experiment Name: At_Drought_Reproduction_P Parameter: Tissue Value: Rosettes
  misc_feature: MA Experiment 20001904 PARAMETER Experiment Name: At_Drought_Reproduction_P Parameter: Treatment Value: Drought vs. No Drought
  misc_feature: MA Experiment ID: 20001906 Result: Down-regulated in Transcription
  misc_feature: MA Experiment 20001906 PARAMETER Experiment Name: At_Drought_Reproduction_P Parameter: Age (day) Value: 35
  misc_feature: MA Experiment 20001906 PARAMETER Experiment Name: At_Drought_Reproduction_P Parameter: Organism Value: A. thaliana
  misc_feature: MA Experiment 20001906 PARAMETER Experiment Name: At_Drought_Reproduction_P Parameter: Plant Line Value: WS
  misc_feature: MA Experiment 20001906 PARAMETER Experiment Name: At_Drought_Reproduction_P Parameter: Timepoint (day) Value: 5
  misc_feature: MA Experiment 20001906 PARAMETER Experiment Name: At_Drought_Reproduction_P Parameter: Tissue Value: Siliques
  misc_feature: MA Experiment 20001906 PARAMETER Experiment Name: At_Drought_Reproduction_P Parameter: Treatment Value: Drought vs. No Drought
aaccaaaaatttcttcgtctctgtctccaaaatcgaatcaaaatctctaaagtttcaatttttttgttctgttctttttatttttttaaagaatggcttcaatttctgcaactttgccttcgccattgttactcacacagagaaaatccaatctcacatcgattcaaaaactcccattttctctaactcgaggtacgaatgatctttctccattatctcttactcgaaaccctagcagcatcagtctgatggtgaaagctagtggagaaagctcagattcatcgactgatctcgacgttgttagtacgattcagaatgtttgggataagtctgaagataggttaggtcttattggtttgggttttgctggtattgtagctctttgggcatcattgaatctcatcacggcaatcgacaaattgcccgttatctcgagcggattcgaactagttggtatcttgttctccacgtggttcacatatcgatatctcttgttcaaaccggacagacaggagctttcgaaaattgtcaagaaatcagtagcggatatacttggccagtgaaccttgtgtgtgtgataatacttcatctttggaagatgatttgtttgcaagtttgtaaaattacatgacagggtggttgttgtttctagtccaataatgtcatgcatttgaaacctgtaaatactttattgttggtttttggttgtgagcaaaatcaatcttttctaatttcaaagattctcttttatgattatacgtttt

SEQ ID NO: 100714 - protein, 156 aa, Arabidopsis thaliana; identical to SEQ ID NO: 34973
  peptide (1)..(156): Ceres Seq. ID no. 13605918
  misc_feature (1)..(156): Homolog of NCBI NO: 18403896 NR Description: expressed protein [Arabidopsis thaliana]
  misc_feature (1)..(156): Homolog of NCBI NO: 21554231 NR Description: unknown [Arabidopsis thaliana]
  misc_feature (1)..(156): Homolog of NCBI NO: 34909746 NR Description: contains ESTs
  misc_feature (1)..(155): Homolog of NCBI NO: 18407178 NR Description: expressed protein [Arabidopsis thaliana]
  misc_feature (1)..(155): Homolog of NCBI NO: 21555057 NR Description: unknown [Arabidopsis thaliana]
  misc_feature (48)..(155): Homolog of NCBI NO: 34393236 NR Description: unknown protein [Oryza sativa (japonica
  misc_feature (46)..(143): Homolog of NCBI NO: 38175474 NR Description: unknown protein [Oryza sativa (japonica
  misc_feature (3)..(151): Homolog of NCBI NO: 687677 NR Description: unknown
  misc_feature (3)..(151): Homolog of NCBI NO: 18411555 NR Description: expressed protein [Arabidopsis thaliana]
  misc_feature (68)..(154): Homolog of NCBI NO: 37536446 NR Description: hypothetical protein [Oryza sativa (japonica group)] >gi|18057096|gb|AAL58119.1| hypothetical protein [Oryza

SEQ ID NO: 100715 - protein, 104 aa, Arabidopsis thaliana; identical to SEQ ID NO: 34974
  peptide (1)..(104): Ceres Seq. ID no. 13605919
  misc_feature (1)..(104): Homolog of NCBI NO: 18403896 NR Description: expressed protein [Arabidopsis thaliana]
  misc_feature (1)..(104): Homolog of NCBI NO: 21554231 NR Description: unknown [Arabidopsis thaliana]
  misc_feature (1)..(104): Homolog of NCBI NO: 34909746 NR Description: contains ESTs
  misc_feature (1)..(103): Homolog of NCBI NO: 18407178 NR Description: expressed protein [Arabidopsis thaliana]
  misc_feature (1)..(103): Homolog of NCBI NO: 21555057 NR Description: unknown [Arabidopsis thaliana]
  misc_feature (1)..(103): Homolog of NCBI NO: 34393236 NR Description: unknown protein [Oryza sativa (japonica
  misc_feature (1)..(91): Homolog of NCBI NO: 38175474 NR Description: unknown protein [Oryza sativa (japonica
  misc_feature (1)..(99): Homolog of NCBI NO: 687677 NR Description: unknown
  misc_feature (1)..(99): Homolog of NCBI NO: 18411555 NR Description: expressed protein [Arabidopsis thaliana]
  misc_feature (16)..(102): Homolog of NCBI NO: 37536446 NR Description: hypothetical protein [Oryza sativa (japonica group)] >gi|18057096|gb|AAL58119.1| hypothetical protein [Oryza

SEQ ID NO: 100716 - DNA, 1611 bp, Arabidopsis thaliana
  misc_feature (1)..(1611): Ceres Seq. ID no. 13605924
  misc_feature: MA Experiment ID: 108463 Result: Up-regulated in Transcription
  misc_feature: MA Experiment 108463 PARAMETER Experiment Name: At_Germinating_Seeds_cDNA_P Parameter: Age (day) Value: 3 vs. 0
  misc_feature: MA Experiment 108463 PARAMETER Experiment Name: At_Germinating_Seeds_cDNA_P Parameter: Tissue Value: Germinating Seeds
  misc_feature: MA Experiment ID: 108464 Result: Up-regulated in Transcription
  misc_feature: MA Experiment 108464 PARAMETER Experiment Name: At_Germinating_Seeds_cDNA_P Parameter: Age (day) Value: 4 vs. 0
  misc_feature: MA Experiment 108464 PARAMETER Experiment Name: At_Germinating_Seeds_cDNA_P Parameter: Tissue Value: Germinating Seeds
  misc_feature: MA Experiment ID: 108489 Result: Up-regulated in Transcription
  misc_feature: MA Experiment ID: 20000182 Result: Up-regulated in Transcription
  misc_feature: MA Experiment 20000182 PARAMETER Experiment Name: At_2mM_SA_P Parameter: Age (day) Value: 14
  misc_feature: MA Experiment 20000182 PARAMETER Experiment Name: At_2mM_SA_P Parameter: Organism Value: A. thaliana
  misc_feature: MA Experiment 20000182 PARAMETER Experiment Name: At_2mM_SA_P Parameter: Plant Line Value: WS
  misc_feature: MA Experiment 20000182 PARAMETER Experiment Name: At_2mM_SA_P Parameter: Timepoint (hr) Value: 6
  misc_feature: MA Experiment 20000182 PARAMETER Experiment Name: At_2mM_SA_P Parameter: Tissue Value: Aerial
  misc_feature: MA Experiment 20000182 PARAMETER Experiment Name: At_2mM_SA_P Parameter: Treatment Value: 2mM SA vs. No Treatment
  misc_feature: MA Experiment ID: 20000224 Result: Down-regulated in Transcription
  misc_feature: MA Experiment ID: 20000527 Result: Down-regulated in Transcription
  misc_feature: MA Experiment 20000527 PARAMETER Experiment Name: At_10percent_PEG_P Parameter: Age (day) Value: 20
  misc_feature: MA Experiment 20000527 PARAMETER Experiment Name: At_10percent_PEG_P Parameter: Organism Value: A. thaliana
  misc_feature: MA Experiment 20000527 PARAMETER Experiment Name: At_10percent_PEG_P Parameter: Plant Line Value: WS
  misc_feature: MA Experiment 20000527 PARAMETER Experiment Name: At_10percent_PEG_P Parameter: Timepoint (day) Value: 20
  misc_feature: MA Experiment 20000527 PARAMETER Experiment Name: At_10percent_PEG_P Parameter: Tissue Value: Whole Plant
  misc_feature: MA Experiment 20000527 PARAMETER Experiment Name: At_10percent_PEG_P Parameter: Treatment Value: 10percent PEG vs. No Treatment
  misc_feature: MA Experiment ID: 20001757 Result: Down-regulated in Transcription
  misc_feature: MA Experiment 20001757 PARAMETER Experiment Name: At_50mM_NH4NO3_L-to-H_P Parameter: Timepoint (hr) Value: 6
  misc_feature: MA Experiment 20001757 PARAMETER Experiment Name: At_50mM_NH4NO3_L-to-H_P Parameter: Tissue Value: Leaf
  misc_feature: MA Experiment 20001757 PARAMETER Experiment Name: At_50mM_NH4NO3_L-to-H_P Parameter: Treatment Value: 50mM NH4NO3 vs 100mM Mannitol
atgcacaatcattcccactaatagtttaataaagtgtataatttttttcaaattaaaacagctaaacacacacaaccacattcaaaaaggggttaagcattgaagaatattctaagaaaatttgtttctcttcttacagaagtaaaagcgactctctctctcattaagcatcaaaggagtttcgtttttcttgctttgctgttacattcttcaggaaaaaggcgttacctttactctctctgcatcaacgaggaagcgtgtagagctaaaggagctgaatttgagagatttttttgttttgtttctgggtttgttcaaagatgcaaatttttagttgtttctgctgtggaaaaggatttgatcggcaaaagaaggtgaaaacggagccatcgtggaggatcttttcactcaaggaacttcacgcagcaacaaacagttttaattacgataacaagctcggtgaaggcagatttggcagtgtgtattggggtcagctatgggatggatctcaaattgcagtcaagagattgaaggcatggagtagcagagaagagatagattttgctgtagaagtcgagattcttgctcgtatccgtcacaagaatctattgagtgtacgaggttactgtgcagaaggacaagaacgactcattgtatatgattacatgccaaatttgagcttggtctctcatcttcatggtcaacattcatctgagtcgcttcttgattggactaggcggatgaatattgctgtatcttctgctcaggcgattgcctacttgcatcattttgcaacacctagaatagtccatggagatgtgagagcaagcaatgtgctgctagattctgagtttgaagctcgggttacagatttcggatacgataagctgatgccagatgatggagctaacaaaagcaccaagggtaataacattgggtatctctcaccagaatgtatcgaatctggaaaagaatcagacatgggagatgtgtatagtttcggtgttcttttgctggagcttgtaactggtaagagacctacagagagggtaaacttaacaacaaagaggggtattaccgaatgggttttacctcttgtttacgaaagaaagtttggtgaaattgtggatcaaaggctgaatgggaagtatgtggaagaagagctgaaaaggatagttttggttggtctcatgtgtgctcagagggagtcagagaagagaccaacaatgtctgaagttgtggagatgctaatgattgaatcaaaggagaaaatggctcagcttgaagctaatccactcttcaatggaaacaatgatggtgaagttatagatgaaagctcagagatcatttctgaagtgagagatcatcaataacaagaacaagaatgttattcaaattcacgcattcttgttttcttttgctagaatctggtttttggttgtgcttgtttttagaagagtgtttgtgcttgtttttagaatagcgaagttgggttttaaaagtttattgtgtattttttttcagcttaagattggattttgatcattgatatttgagcttgtaagagagtgtagtggtacatatttggtatttatgagaaagtttttctga

SEQ ID NO: 100717 - protein, 350 aa, Arabidopsis thaliana; identical to SEQ ID NO: 34965
  peptide (1)..(350): Ceres Seq. ID no. 13605925
  misc_feature (1)..(350): Homolog of NCBI NO: 30695267 NR Description: protein kinase, putative [Arabidopsis thaliana]
  misc_feature (15)..(350): Homolog of NCBI NO: 25287618 NR Description: hypothetical protein F6D8.24 [imported] - thaliana >gi|5903051|gb|AAD55610.1|AC008016_20 Contains PF|00069 protein kinase domain. ESTs gb|W43822, gb|T20475 and gb|AA586152
  misc_feature (1)..(350): Homolog of NCBI NO: 21593950 NR Description: protein kinase, putative [Arabidopsis thaliana]
  misc_feature (1)..(350): Homolog of NCBI NO: 18400939 NR Description: protein kinase family [Arabidopsis thaliana]
  misc_feature (8)..(327): Homolog of NCBI NO: 34898392 NR Description: ESTs C22458(C62866),C22459(C62866) correspond to region of the predicted gene.~Similar to genomic sequence of
  misc_feature (28)..(334): Homolog of NCBI NO: 15223161 NR Description: protein kinase -related [Arabidopsis thaliana]
  misc_feature (26)..(310): Homolog of NCBI NO: 34894174 NR Description: putative protein kinase [Oryza sativa (japonica group)] >gi|13486635|dbj|BAB39873.1| putative protein kinase
  misc_feature (7)..(310): Homolog of NCBI NO: 15230129 NR Description: protein kinase family [Arabidopsis thaliana]
  misc_feature (28)..(310): Homolog of NCBI NO: 9294048 NR Description: protein kinase-like protein [Arabidopsis thaliana]
  misc_feature (28)..(345): Homolog of NCBI NO: 7488244 NR Description: protein kinase homolog F17M5.190 - Arabidopsis

SEQ ID NO: 100718 - protein, 235 aa, Arabidopsis thaliana; identical to SEQ ID NO: 34966
  peptide (1)..(235): Ceres Seq. ID no. 13605926
  misc_feature (1)..(235): Homolog of NCBI NO: 30695267 NR Description: protein kinase, putative [Arabidopsis thaliana]
  misc_feature (1)..(235): Homolog of NCBI NO: 25287618 NR Description: hypothetical protein F6D8.24 [imported] - thaliana >gi|5903051|gb|AAD55610.1|AC008016_20 Contains PF|00069 protein kinase domain. ESTs gb|W43822, gb|T20475 and gb|AA586152
  misc_feature (1)..(235): Homolog of NCBI NO: 21593950 NR Description: protein kinase, putative [Arabidopsis thaliana]
  misc_feature (1)..(235): Homolog of NCBI NO: 18400939 NR Description: protein kinase family [Arabidopsis thaliana]
  misc_feature (1)..(212): Homolog of NCBI NO: 34898392 NR Description: ESTs C22458(C62866),C22459(C62866) correspond to region of the predicted gene.~Similar to genomic sequence of
  misc_feature (1)..(219): Homolog of NCBI NO: 15223161 NR Description: protein kinase -related [Arabidopsis thaliana]
  misc_feature (1)..(195): Homolog of NCBI NO: 34894174 NR Description: putative protein kinase [Oryza sativa (japonica group)] >gi|13486635|dbj|BAB39873.1| putative protein kinase
  misc_feature (1)..(195): Homolog of NCBI NO: 15230129 NR Description: protein kinase family [Arabidopsis thaliana]
  misc_feature (1)..(195): Homolog of NCBI NO: 9294048 NR Description: protein kinase-like protein [Arabidopsis thaliana]
  misc_feature (1)..(230): Homolog of NCBI NO: 7488244 NR Description: protein kinase homolog F17M5.190 - Arabidopsis

SEQ ID NO: 100719 - protein, 210 aa, Arabidopsis thaliana; identical to SEQ ID NO: 34967
  peptide (1)..(210): Ceres Seq. ID no. 13605927
  misc_feature (1)..(210): Homolog of NCBI NO: 30695267 NR Description: protein kinase, putative [Arabidopsis thaliana]
  misc_feature (1)..(210): Homolog of NCBI NO: 25287618 NR Description: hypothetical protein F6D8.24 [imported] - thaliana >gi|5903051|gb|AAD55610.1|AC008016_20 Contains PF|00069 protein kinase domain. ESTs gb|W43822, gb|T20475 and gb|AA586152
  misc_feature (1)..(210): Homolog of NCBI NO: 21593950 NR Description: protein kinase, putative [Arabidopsis thaliana]
  misc_feature (1)..(210): Homolog of NCBI NO: 18400939 NR Description: protein kinase family [Arabidopsis thaliana]
  misc_feature (1)..(187): Homolog of NCBI NO: 34898392 NR Description: ESTs C22458(C62866),C22459(C62866) correspond to region of the predicted gene.~Similar to genomic sequence of
  misc_feature (1)..(194): Homolog of NCBI NO: 15223161 NR Description: protein kinase -related [Arabidopsis thaliana]
  misc_feature (1)..(170): Homolog of NCBI NO: 34894174 NR Description: putative protein kinase [Oryza sativa (japonica group)] >gi|13486635|dbj|BAB39873.1| putative protein kinase
  misc_feature (1)..(170): Homolog of NCBI NO: 15230129 NR Description: protein kinase family [Arabidopsis thaliana]
  misc_feature (1)..(170): Homolog of NCBI NO: 9294048 NR Description: protein kinase-like protein [Arabidopsis thaliana]
  misc_feature (1)..(205): Homolog of NCBI NO: 7488244 NR Description: protein kinase homolog F17M5.190 - Arabidopsis

SEQ ID NO: 100720 - DNA, 586 bp, Arabidopsis thaliana
  misc_feature (1)..(586): Ceres Seq. ID no. 13605936
  misc_feature: MA Experiment ID: 20000180 Result: Down-regulated in Transcription
  misc_feature: MA Experiment 20000180 PARAMETER Experiment Name: At_Germinating_Seeds_P Parameter: Age (hr) Value: 24 vs. 0
  misc_feature: MA Experiment 20000180 PARAMETER Experiment Name: At_Germinating_Seeds_P Parameter: Tissue Value: Germinating Seeds
  misc_feature: MA Experiment ID: 20000234 Result: Down-regulated in Transcription
  misc_feature: MA Experiment 20000234 PARAMETER Experiment Name: At_Siliques_P Parameter: Age (day) Value: 21
  misc_feature: MA Experiment 20000234 PARAMETER Experiment Name: At_Siliques_P Parameter: Organism Value: A. thaliana
  misc_feature: MA Experiment 20000234 PARAMETER Experiment Name: At_Siliques_P Parameter: Plant Line Value: WS
  misc_feature: MA Experiment 20000234 PARAMETER Experiment Name: At_Siliques_P Parameter: Tissue Value: Less Than 5mm Siliques vs. Whole Plant
  misc_feature: MA Experiment ID: 20000235 Result: Down-regulated in Transcription
  misc_feature: MA Experiment 20000235 PARAMETER Experiment Name: At_Siliques_P Parameter: Age (day) Value: 21
  misc_feature: MA Experiment 20000235 PARAMETER Experiment Name: At_Siliques_P Parameter: Organism Value: A. thaliana
  misc_feature: MA Experiment 20000235 PARAMETER Experiment Name: At_Siliques_P Parameter: Plant Line Value: WS
  misc_feature: MA Experiment 20000235 PARAMETER Experiment Name: At_Siliques_P Parameter: Tissue Value: 5-10mm Siliques vs. Whole Plant
  misc_feature: MA Experiment ID: 20000264 Result: Down-regulated in Transcription
  misc_feature: MA Experiment 20000264 PARAMETER Experiment Name: At_Open_Flower_P Parameter: Age (day) Value: 21
  misc_feature: MA Experiment 20000264 PARAMETER Experiment Name: At_Open_Flower_P Parameter: Plant Line Value: WS
  misc_feature: MA Experiment 20000264 PARAMETER Experiment Name: At_Open_Flower_P Parameter: Tissue Value: Open Flower vs. Whole Plant
  misc_feature: MA Experiment ID: 20000265 Result: Down-regulated in Transcription
  misc_feature: MA Experiment 20000265 PARAMETER Experiment Name: At_Open_Flower_P Parameter: Age (day) Value: 21
  misc_feature: MA Experiment 20000265 PARAMETER Experiment Name: At_Open_Flower_P Parameter: Plant Line Value: WS
  misc_feature: MA Experiment 20000265 PARAMETER Experiment Name: At_Open_Flower_P Parameter: Tissue Value: Closed Flower vs. Whole Plant
  misc_feature: MA Experiment ID: 20000286 Result: Down-regulated in Transcription
  misc_feature: MA Experiment 20000286 PARAMETER Experiment Name: At_Open_Flower_P Parameter: Age (day) Value: 21
  misc_feature: MA Experiment 20000286 PARAMETER Experiment Name: At_Open_Flower_P Parameter: Plant Line Value: WS
  misc_feature: MA Experiment 20000286 PARAMETER Experiment Name: At_Open_Flower_P Parameter: Tissue Value: Half Open vs. Whole Plant
  misc_feature: MA Experiment ID: 20000527 Result: Up-regulated in Transcription
  misc_feature: MA Experiment 20000527 PARAMETER Experiment Name: At_10percent_PEG_P Parameter: Age (day) Value: 20
  misc_feature: MA Experiment 20000527 PARAMETER Experiment Name: At_10percent_PEG_P Parameter: Organism Value: A. thaliana
  misc_feature: MA Experiment 20000527 PARAMETER Experiment Name: At_10percent_PEG_P Parameter: Plant Line Value: WS
  misc_feature: MA Experiment 20000527 PARAMETER Experiment Name: At_10percent_PEG_P Parameter: Timepoint (day) Value: 20
  misc_feature: MA Experiment 20000527 PARAMETER Experiment Name: At_10percent_PEG_P Parameter: Tissue Value: Whole Plant
  misc_feature: MA Experiment 20000527 PARAMETER Experiment Name: At_10percent_PEG_P Parameter: Treatment Value: 10percent PEG vs. No Treatment
  misc_feature: MA Experiment ID: 20001247 Result: Down-regulated in Transcription
  misc_feature: MA Experiment 20001247 PARAMETER Experiment Name: At_Far-red-induction_P Parameter: Age (day) Value: 7
  misc_feature: MA Experiment 20001247 PARAMETER Experiment Name: At_Far-red-induction_P Parameter: Light Value: Far-red vs. White
  misc_feature: MA Experiment 20001247 PARAMETER Experiment Name: At_Far-red-induction_P Parameter: Organism Value: A. thaliana
  misc_feature: MA Experiment 20001247 PARAMETER Experiment Name: At_Far-red-induction_P Parameter: Plant Line Value: Columbia
  misc_feature: MA Experiment 20001247 PARAMETER Experiment Name: At_Far-red-induction_P Parameter: Timepoint (hr) Value: 1
  misc_feature: MA Experiment 20001247 PARAMETER Experiment Name: At_Far-red-induction_P Parameter: Tissue Value: Whole Plant
attgtgttttattttacactcgttcgtcttcgtctagagagagatggcgacggcgtcgtttaggtggattctgcagcttcacagagacgtaccaaaagctgctcgattctatgctcaaggtctcgacttttccgtcaatgtcgtcactttacgctgggctgagctccattctggtcctatcaagctagctcttatgcaatctcctagcaatcatgttgctgagaagggatactcatcgcttctatcgttcacagtcactgacattaatacaacagtgactaaacttatggctttaggagctgaattagatggcactatcaagtatgagatacatggaaaggttgcggctatgaaatgccctgatggttacatgttaggcctttatgaggctgcatgagcaaatgaatagaattgaagcctgaaaggaagccaattatgcatagagtagatttgtttagagatcatatccataatctctttgaagctattgtatacttcttagaaacctaagccactattatactttatattggttcatgtttaacttgctcttcacattgtttctctagtaagcttttctcaagcc

SEQ ID NO: 100721 - protein, 117 aa, Arabidopsis thaliana
  peptide (1)..(117): Ceres Seq. ID no. 13605937
  misc_feature (5)..(113): Pfam Name: Glyoxalase/Bleomycin resistance Pfam Description: Glyoxalase/Bleomycin resistance
  misc_feature (1)..(117): Homolog of NCBI NO: 15238137 NR Description: expressed protein [Arabidopsis thaliana] gb|AAF24581.1~gene_id:MBK23.15~similar to unknown protein thaliana] >gi|26452670|dbj|BAC43418.1| unknown protein
  misc_feature (1)..(115): Homolog of NCBI NO: 18407989 NR Description: expressed protein [Arabidopsis thaliana]
  misc_feature (1)..(113): Homolog of NCBI NO: 25404929 NR Description: protein F22C12.6 [imported] - Arabidopsis >gi|6692116|gb|AAF24581.1|AC007764_23 F22C12.6 [Arabidopsis
  misc_feature (2)..(53): Homolog of NCBI NO: 34898280 NR Description: hypothetical protein~predicted by GENSCAN etc.
  misc_feature (3)..(117): Homolog of NCBI NO: 37523202 NR Description: hypothetical protein glr3633 [Gloeobacter
  misc_feature (3)..(115): Homolog of NCBI NO: 23039663 NR Description: hypothetical protein [Trichodesmium erythraeum
MATASFRWILQLHRDVPKAARFYAQGLDFSVNVVTLRWAELHSGPIKLALMQSPSNHVAEKGYSSLLSFTVTDINTTVTKLMALGAELDGTIKYEIHGKVAAMKCPDGYMLGLYEAA

SEQ ID NO: 100722 - protein, 67 aa, Arabidopsis thaliana
  peptide (1)..(67): Ceres Seq. ID no. 13605938
  misc_feature (1)..(63): Pfam Name: Glyoxalase/Bleomycin resistance Pfam Description: Glyoxalase/Bleomycin resistance
  misc_feature (1)..(67): Homolog of NCBI NO: 15238137 NR Description: expressed protein [Arabidopsis thaliana] gb|AAF24581.1~gene_id:MBK23.15~similar to unknown protein thaliana] >gi|26452670|dbj|BAC43418.1| unknown protein
  misc_feature (1)..(65): Homolog of NCBI NO: 18407989 NR Description: expressed protein [Arabidopsis thaliana]
  misc_feature (1)..(63): Homolog of NCBI NO: 25404929 NR Description: protein F22C12.6 [imported] - Arabidopsis >gi|6692116|gb|AAF24581.1|AC007764_23 F22C12.6 [Arabidopsis
  misc_feature (1)..(67): Homolog of NCBI NO: 37523202 NR Description: hypothetical protein glr3633 [Gloeobacter
  misc_feature (1)..(65): Homolog of NCBI NO: 23039663 NR Description: hypothetical protein [Trichodesmium erythraeum
MQSPSNHVAEKGYSSLLSFTVTDINTTVTKLMALGAELDGTIKYEIHGKVAAMKCPDGYMLGLYEAA

SEQ ID NO: 100723 - protein, 61 aa, Arabidopsis thaliana
  peptide (1)..(61): Ceres Seq. ID no. 13605939
CVLFYTRSSSSRERWRRRRLGGFCSFTETYQKLLDSMLKVSTFPSMSSLYAGLSSILVLSS

SEQ ID NO: 100724 - DNA, 723 bp, Arabidopsis thaliana
  misc_feature (1)..(723): Ceres Seq. ID no. 13605947
  misc_feature: MA Experiment ID: 20000315 Result: Down-regulated in Transcription
  misc_feature: MA Experiment 20000315 PARAMETER Experiment Name: At_14day_Shoots-Roots_Sub_P Parameter: Age (day) Value: 14
  misc_feature: MA Experiment 20000315 PARAMETER Experiment Name: At_14day_Shoots-Roots_Sub_P Parameter: Organism Value: A. thaliana
  misc_feature: MA Experiment 20000315 PARAMETER Experiment Name: At_14day_Shoots-Roots_Sub_P Parameter: Plant Line Value: WS
  misc_feature: MA Experiment 20000315 PARAMETER Experiment Name: At_14day_Shoots-Roots_Sub_P Parameter: Tissue Value: Shoots vs. Whole Plant
  misc_feature: MA Experiment ID: 20000328 Result: Down-regulated in Transcription
  misc_feature: MA Experiment 20000328 PARAMETER Experiment Name: At_42deg_Heat_Sub_P Parameter: Age (day) Value: 14
  misc_feature: MA Experiment 20000328 PARAMETER Experiment Name: At_42deg_Heat_Sub_P Parameter: Organism Value: A. thaliana
  misc_feature: MA Experiment 20000328 PARAMETER Experiment Name: At_42deg_Heat_Sub_P Parameter: Plant Line Value: WS
  misc_feature: MA Experiment 20000328 PARAMETER Experiment Name: At_42deg_Heat_Sub_P Parameter: Temperature (deg C) Value: 42 vs. 22
  misc_feature: MA Experiment 20000328 PARAMETER Experiment Name: At_42deg_Heat_Sub_P Parameter: Timepoint (hr) Value: 6
  misc_feature: MA Experiment 20000328 PARAMETER Experiment Name: At_42deg_Heat_Sub_P Parameter: Tissue Value: Aerial
  misc_feature: MA Experiment ID: 20000329 Result: Down-regulated in Transcription
  misc_feature: MA Experiment 20000329 PARAMETER Experiment Name: At_4deg_Cold_Sub_P Parameter: Age (day) Value: 14
  misc_feature: MA Experiment 20000329 PARAMETER Experiment Name: At_4deg_Cold_Sub_P Parameter: Organism Value: A. thaliana
  misc_feature: MA Experiment 20000329 PARAMETER Experiment Name: At_4deg_Cold_Sub_P Parameter: Plant Line Value: WS
  misc_feature: MA Experiment 20000329 PARAMETER Experiment Name: At_4deg_Cold_Sub_P Parameter: Temperature (deg C) Value: 4 vs. 22
  misc_feature: MA Experiment 20000329 PARAMETER Experiment Name: At_4deg_Cold_Sub_P Parameter: Timepoint (hr) Value: 6
  misc_feature: MA Experiment 20000329 PARAMETER Experiment Name: At_4deg_Cold_Sub_P Parameter: Tissue Value: Aerial
gactactttgactttgcgcctgtgatcttcttctcaaatccatccatttattcggtgatggatcaaacacagaacacaatcgccggaattggtgaaatcaacggttcgataaaaaccgaaatcaatgcaattgcaaccgtcgacgattcaaatgagaagctgaaccaaattataaactcgaatcagaaaattttagaactccttcatcaattaaaactcaccgtctcttctttcacacctgcttctcagcttcacctcctccaacgcctcaattctcttgtgatggagcttgataatatggctaagttgtctgataaatgcaacattcaagtccccattgaggttcttaacttgattgatgatgggaagaacccagatgagtttacaaaagatgttcttaataagaactgcattgctaaaaatcaagttacaaagggaaagagtgatgcttttaagggtttgagaaaacatctcttggaggagcttgaacaggcttttcctgatgaagtcgatcggtatagagacatacgtgctagttatgctgctgaagcaaaacggttggctcaaacgcaaagtgtgttaccaaatggggatgctaaggtcaagagtgagctataagagctatgaatcttgccttttagaataaaattttcaagtagatcaatgaggatgtaaacgaacaagccttcttggaatttctataacatccgttggttcttttgc

SEQ ID NO: 100725 - protein, 205 aa, Arabidopsis thaliana
  peptide (1)..(205): Ceres Seq. ID no. 13605948
  misc_feature (20)..(205): Homolog of NCBI NO: 15238215 NR Description: expressed protein [Arabidopsis thaliana] gene_id:MJC20.1~similar to unknown protein~sp|P45966 [Arabidopsis >gi|27754434|gb|AAO22665.1| unknown protein [Arabidopsis
  misc_feature (20)..(205): Homolog of NCBI NO: 18396004 NR Description: expressed protein [Arabidopsis thaliana] At1g26660/T24P13_4 [Arabidopsis thaliana]
  misc_feature (19)..(182): Homolog of NCBI NO: 25403266 NR Description: protein T24P13.4 [imported] - Arabidopsis >gi|9295719|gb|AAF87025.1|AC006535_3 T24P13.4 [Arabidopsis
  misc_feature (54)..(177): Homolog of NCBI NO: 31216855 NR Description: ENSANGP00000021242 [Anopheles gambiae]
  misc_feature (52)..(177): Homolog of NCBI NO: 20070410 NR Description: DNA segment, Chr 13, Wayne State University 50, [Mus musculus] >gi|27681537|ref|XP_214417.1| similar to DNA Chr 13, Wayne State University 50, expressed [Mus musculus]
  misc_feature (52)..(177): Homolog of NCBI NO: 29145113 NR Description: similar to DNA segment, Chr 13, Wayne State
  misc_feature (52)..(177): Homolog of NCBI NO: 34873422 NR Description: similar to DNA segment, Chr 13, Wayne State
  misc_feature (52)..(177): Homolog of NCBI NO: 13097162 NR Description: Similar to CG5057 gene product [Homo sapiens]
  misc_feature (62)..(177): Homolog of NCBI NO: 9799628 NR Description: Nut2 [Drosophila melanogaster]
  misc_feature (62)..(177): Homolog of NCBI NO: 24665095 NR Description: CG5057-PA [Drosophila melanogaster]
DYFDFAPVIFFSNPSIYSVMDQTQNTIAGIGEINGSIKTEINAIATVDDSNEKLNQIINSNQKILELLHQLKLTVSSFTPASQLHLLQRLNSLVMELDNMAKLSDKCNIQVPIEVLNLIDDGKNPDEFTKDVLNKNCIAKNQVTKGKSDAFKGLRKHLLEELEQAFPDEVDRYRDIRASYAAEAKRLAQTQSVLPNGDAKVKSEL

SEQ ID NO: 100726 - protein, 186 aa, Arabidopsis thaliana
  peptide (1)..(186): Ceres Seq. ID no. 13605949
  misc_feature (1)..(186): Homolog of NCBI NO: 15238215 NR Description: expressed protein [Arabidopsis thaliana] gene_id:MJC20.1~similar to unknown protein~sp|P45966 [Arabidopsis >gi|27754434|gb|AAO22665.1| unknown protein [Arabidopsis
  misc_feature (1)..(186): Homolog of NCBI NO: 18396004 NR Description: expressed protein [Arabidopsis thaliana] At1g26660/T24P13_4 [Arabidopsis thaliana]
  misc_feature (1)..(163): Homolog of NCBI NO: 25403266 NR Description: protein T24P13.4 [imported] - Arabidopsis >gi|9295719|gb|AAF87025.1|AC006535_3 T24P13.4 [Arabidopsis
  misc_feature (35)..(158): Homolog of NCBI NO: 31216855 NR Description: ENSANGP00000021242 [Anopheles gambiae]
  misc_feature (33)..(158): Homolog of NCBI NO: 20070410 NR Description: DNA segment, Chr 13, Wayne State University 50, [Mus musculus] >gi|27681537|ref|XP_214417.1| similar to DNA Chr 13, Wayne State University 50, expressed [Mus musculus]
  misc_feature (33)..(158): Homolog of NCBI NO: 29145113 NR Description: similar to DNA segment, Chr 13, Wayne State
  misc_feature (33)..(158): Homolog of NCBI NO: 34873422 NR Description: similar to DNA segment, Chr 13, Wayne State
  misc_feature (33)..(158): Homolog of NCBI NO: 13097162 NR Description: Similar to CG5057 gene product [Homo sapiens]
  misc_feature (43)..(158): Homolog of NCBI NO: 9799628 NR Description: Nut2 [Drosophila melanogaster]
  misc_feature (43)..(158): Homolog of NCBI NO: 24665095 NR Description: CG5057-PA [Drosophila melanogaster]
MDQTQNTIAGIGEINGSIKTEINAIATVDDSNEKLNQIINSNQKILELLHQLKLTVSSFTPASQLHLLQRLNSLVMELDNMAKLSDKCNIQVPIEVLNLIDDGKNPDEFTKDVLNKNCIAKNQVTKGKSDAFKGLRKHLLEELEQAFPDEVDRYRDIRASYAAEAKRLAQTQSVLPNGDAKVKSEL

SEQ ID NO: 100727 - protein, 111 aa, Arabidopsis thaliana
  peptide (1)..(111): Ceres Seq. ID no. 13605950
  misc_feature (1)..(111): Homolog of NCBI NO: 15238215 NR Description: expressed protein [Arabidopsis thaliana] gene_id:MJC20.1~similar to unknown protein~sp|P45966 [Arabidopsis >gi|27754434|gb|AAO22665.1| unknown protein [Arabidopsis
  misc_feature (1)..(111): Homolog of NCBI NO: 18396004 NR Description: expressed protein [Arabidopsis thaliana] At1g26660/T24P13_4 [Arabidopsis thaliana]
  misc_feature (1)..(88): Homolog of NCBI NO: 25403266 NR Description: protein T24P13.4 [imported] - Arabidopsis >gi|9295719|gb|AAF87025.1|AC006535_3 T24P13.4 [Arabidopsis
  misc_feature (1)..(83): Homolog of NCBI NO: 31216855 NR Description: ENSANGP00000021242 [Anopheles gambiae]
  misc_feature (1)..(83): Homolog of NCBI NO: 20070410 NR Description: DNA segment, Chr 13, Wayne State University 50, [Mus musculus] >gi|27681537|ref|XP_214417.1| similar to DNA Chr 13, Wayne State University 50, expressed [Mus musculus]
  misc_feature (1)..(83): Homolog of NCBI NO: 29145113 NR Description: similar to DNA segment, Chr 13, Wayne State
  misc_feature (1)..(83): Homolog of NCBI NO: 34873422 NR Description: similar to DNA segment, Chr 13, Wayne State
  misc_feature (1)..(83): Homolog of NCBI NO: 13097162 NR Description: Similar to CG5057 gene product [Homo sapiens]
  misc_feature (1)..(83): Homolog of NCBI NO: 9799628 NR Description: Nut2 [Drosophila melanogaster]
  misc_feature (1)..(83): Homolog of NCBI NO: 24665095 NR Description: CG5057-PA [Drosophila melanogaster]
MELDNMAKLSDKCNIQVPIEVLNLIDDGKNPDEFTKDVLNKNCIAKNQVTKGKSDAFKGLRKHLLEELEQAFPDEVDRYRDIRASYAAEAKRLAQTQSVLPNGDAKVKSEL

SEQ ID NO: 100728 - DNA, 1686 bp, Arabidopsis thaliana
  misc_feature (1)..(1686): Ceres Seq. ID no. 13605951
  misc_feature: MA Experiment ID: 20000234 Result: Up-regulated in Transcription
  misc_feature: MA Experiment 20000234 PARAMETER Experiment Name: At_Siliques_P Parameter: Age (day) Value: 21
  misc_feature: MA Experiment 20000234 PARAMETER Experiment Name: At_Siliques_P Parameter: Organism Value: A. thaliana
  misc_feature: MA Experiment 20000234 PARAMETER Experiment Name: At_Siliques_P Parameter: Plant Line Value: WS
  misc_feature: MA Experiment 20000234 PARAMETER Experiment Name: At_Siliques_P Parameter: Tissue Value: Less Than 5mm Siliques vs. Whole Plant
  misc_feature: MA Experiment ID: 20000235 Result: Up-regulated in Transcription
  misc_feature: MA Experiment 20000235 PARAMETER Experiment Name: At_Siliques_P Parameter: Age (day) Value: 21
  misc_feature: MA Experiment 20000235 PARAMETER Experiment Name: At_Siliques_P Parameter: Organism Value: A. thaliana
  misc_feature: MA Experiment 20000235 PARAMETER Experiment Name: At_Siliques_P Parameter: Plant Line Value: WS
  misc_feature: MA Experiment 20000235 PARAMETER Experiment Name: At_Siliques_P Parameter: Tissue Value: 5-10mm Siliques vs. Whole Plant
  misc_feature: MA Experiment ID: 20000264 Result: Up-regulated in Transcription
  misc_feature: MA Experiment 20000264 PARAMETER Experiment Name: At_Open_Flower_P Parameter: Age (day) Value: 21
  misc_feature: MA Experiment 20000264 PARAMETER Experiment Name: At_Open_Flower_P Parameter: Plant Line Value: WS
  misc_feature: MA Experiment 20000264 PARAMETER Experiment Name: At_Open_Flower_P Parameter: Tissue Value: Open Flower vs. Whole Plant
cctcttctttctcagacgcttcaactcaaaaagagaaaccagcatagttgtaatcttgaggatcagctatttttctgaaggatatttggcctaatttcgaaactcaaggtacttaggaaacgctgtagaagatggctattgtgtcgttgcgcgatgtggccatggtgatggtgacagtgcaggtgtttgcacgagggtatccggaaacagatttggttgtgaggcttcctggtcaaccaaaggttgtattcagacagtacgcagggtatgttgatctcgacttgaatgctggccgtagccttttctactacttcgtggaagctgaaaaacaccctgacacaaaaccgttaaccttgtggctcaatggaggtccaggttgttcttctgttggtggaggagctttcactgagctaggtccattttaccccacaggatatgggcgtggtcttcgcattaactccatgtcgtggaacaaagcctcaaacctgctatttgtggactcaccggctggagttggttggtcttactccaaccgaagctctgattacaacgctggggacaagtctgcggccagcgatatgctcgtgttcttgttgagatggttcgataagttcccggagttgaagtctcacgatctctttctcactggcgaaagctatgcaggacattacatacctcaactggctgatgcgattctcagctataactcacgctcaagtgggttcaaattcaacatcaaaggcattgcaatagggaatccacttctgaagcttgacagggacattccagctgtatacgagttcttctggtcgcatggcatgatctctgaggtagtgggacgtacaatcaagattcaatgtgacttctcacattacacatatgcatacccccataacgtaagtgatgcctgcaacgatgctatccgtgaagccggagacatcaccactgagtatgtcaatacctttgatgttctccctgacctatgctacccatctattgccctgcaagagctaaggcttaaacaaatggctactaagatgagcatgggagtggatgtgtgtatgaactacgaaagacagttctacctaaatatcccagaggtacagatggctcttcacgcaaaccgcacaaacctgccttattcatggtctttgtgcagcaacctgttaaactactctgccatcgatgtaaacaccaacatgcttccgactctgaagagaattatacagaacaaaattcctgttaggatcttcagtggagatcaagattctgtagttccatttctgggaacacgaactatcgtaggagaactcgccaacgatctcaatttcaagacgacagttccatatggagtgtggttccacaaaagacaggttggaggctgggccatcgagtatggaaacctactaacttttgcaacagtgagaggagcggctcatgcggtggcgtacacgcagccctcacgagctctgcatctattcagcacctttcttcgtgggcagagattgcccaacaagacagatattgctatgcatgactgaaagagaaggaatctcattattagagtacatatccttgggaacatataagggattgtgttgagacatattttcatatgattactagtaacaaaacccgtctggtttaatgatgtaaacgacacataatctccactcacaatcgttg

SEQ ID NO: 100729 - protein, 469 aa, Arabidopsis thaliana
  peptide (1)..(469): Ceres Seq. ID no. 13605952
  misc_feature (33)..(456): Pfam Name: Serine carboxypeptidase Pfam Description: Serine carboxypeptidase
  misc_feature (1)..(469): Homolog of NCBI NO: 15238327 NR Description: serine carboxypeptidase -related [Arabidopsis
  misc_feature (1)..(463): Homolog of NCBI NO: 15238328 NR Description: serine carboxypeptidase -related [Arabidopsis
  misc_feature (3)..(465): Homolog of NCBI NO: 15224454 NR Description: serine carboxypeptidase -related [Arabidopsis
  misc_feature (20)..(469): Homolog of NCBI NO: 15218514 NR Description: serine carboxypeptidase -related [Arabidopsis
  misc_feature (3)..(299): Homolog of NCBI NO: 28393789 NR Description: putative serine carboxypeptidase II [Arabidopsis
  misc_feature (10)..(462): Homolog of NCBI NO: 30685740 NR Description: serine carboxypeptidase -related [Arabidopsis >gi|18377727|gb|AAL67013.1| putative serine carboxypeptidase II
  misc_feature (10)..(462): Homolog of NCBI NO: 25289793 NR Description: probable serine carboxypeptidase II [imported] - thaliana >gi|2459435|gb|AAB80670.1| putative serine
  misc_feature (26)..(462): Homolog of NCBI NO: 18396647 NR Description: serine carboxypeptidase -related [Arabidopsis >gi|16648969|gb|AAL24336.1| serine carboxypeptidase II, putative
  misc_feature (26)..(462): Homolog of NCBI NO: 25289785 NR Description: probable serine carboxypeptidase II [imported] - thaliana >gi|12322985|gb|AAG51475.1|AC069471_6 serine
  misc_feature (25)..(461): Homolog of NCBI NO: 38347156 NR Description: OSJNBa0039C07.2 [Oryza sativa (japonica
MAIVSLRDVAMVMVTVQVFARGYPETDLVVRLPGQPKVVFRQYAGYVDLDLNAGRSLFYYFVEAEKHPDTKPLTLWLNGGPGCSSVGGGAFTELGPFYPTGYGRGLRINSMSWNKASNLLFVDSPAGVGWSYSNRSSDYNAGDKSAASDMLVFLLRWFDKFPELKSHDLFLTGESYAGHYIPQLADAILSYNSRSSGFKFNIKGIAIGNPLLKLDRDIPAVYEFFWSHGMISEVVGRTIKIQCDFSHYTYAYPHNVSDACNDAIREAGDITTEYVNTFDVLPDLCYPSIALQELRLKQMATKMSMGVDVCMNYERQFYLNIPEVQMALHANRTNLPYSWSLCSNLLNYSAIDVNTNMLPTLKRIIQNKIPVRIFSGDQDSVVPFLGTRTIVGELANDLNFKTTVPYGVWFHKRQVGGWAIEYGNLLTFATVRGAAHAVAYTQPSRALHLFSTFLRGQRLPNKTDIAMHD

SEQ ID NO: 100730 - protein, 459 aa, Arabidopsis thaliana
  peptide (1)..(459): Ceres Seq. ID no. 13605953
  misc_feature (23)..(446): Pfam Name: Serine carboxypeptidase Pfam Description: Serine carboxypeptidase
  misc_feature (1)..(459): Homolog of NCBI NO: 15238327 NR Description: serine carboxypeptidase -related [Arabidopsis
  misc_feature (1)..(453): Homolog of NCBI NO: 15238328 NR Description: serine carboxypeptidase -related [Arabidopsis
  misc_feature (1)..(455): Homolog of NCBI NO: 15224454 NR Description: serine carboxypeptidase -related [Arabidopsis
  misc_feature (10)..(459): Homolog of NCBI NO: 15218514 NR Description: serine carboxypeptidase -related [Arabidopsis
  misc_feature (1)..(289): Homolog of NCBI NO: 28393789 NR Description: putative serine carboxypeptidase II [Arabidopsis
  misc_feature (1)..(452): Homolog of NCBI NO: 30685740 NR Description: serine carboxypeptidase -related [Arabidopsis >gi|18377727|gb|AAL67013.1| putative serine carboxypeptidase II
  misc_feature (1)..(452): Homolog of NCBI NO: 25289793 NR Description: probable serine carboxypeptidase II [imported] - thaliana >gi|2459435|gb|AAB80670.1| putative serine
  misc_feature (16)..(452): Homolog of NCBI NO: 18396647 NR Description: serine carboxypeptidase -related [Arabidopsis >gi|16648969|gb|AAL24336.1| serine carboxypeptidase II, putative
  misc_feature (16)..(452): Homolog of NCBI NO: 25289785 NR Description: probable serine carboxypeptidase II [imported] - thaliana >gi|12322985|gb|AAG51475.1|AC069471_6 serine
  misc_feature (15)..(451): Homolog of NCBI NO: 38347156 NR Description: OSJNBa0039C07.2 [Oryza sativa (japonica
MVMVTVQVFARGYPETDLVVRLPGQPKVVFRQYAGYVDLDLNAGRSLFYYFVEAEKHPDTKPLTLWLNGGPGCSSVGGGAFTELGPFYPTGYGRGLRINSMSWNKASNLLFVDSPAGVGWSYSNRSSDYNAGDKSAASDMLVFLLRWFDKFPELKSHDLFLTGESYAGHYIPQLADAILSYNSRSSGFKFNIKGIAIGNPLLKLDRDIPAVYEFFWSHGMISEVVGRTIKIQCDFSHYTYAYPHNVSDACNDAIREAGDITTEYVNTFDVLPDLCYPSIALQELRLKQMATKMSMGVDVCMNYERQFYLNIPEVQMALHANRTNLPYSWSLCSNLLNYSAIDVNTNMLPTLKRIIQNKIPVRIFSGDQDSVVPFLGTRTIVGELANDLNFKTTVPYGVWFHKRQVGGWAIEYGNLLTFATVRGAAHAVAYTQPSRALHLFSTFLRGQRLPNKTDIAMHD

SEQ ID NO: 100731 - protein, 457 aa, Arabidopsis thaliana
  peptide (1)..(457): Ceres Seq. ID no. 13605954
  misc_feature (21)..(444): Pfam Name: Serine carboxypeptidase Pfam Description: Serine carboxypeptidase
  misc_feature (1)..(457): Homolog of NCBI NO: 15238327 NR Description: serine carboxypeptidase -related [Arabidopsis
  misc_feature (1)..(451): Homolog of NCBI NO: 15238328 NR Description: serine carboxypeptidase -related [Arabidopsis
  misc_feature (1)..(453): Homolog of NCBI NO: 15224454 NR Description: serine carboxypeptidase -related [Arabidopsis
  misc_feature (8)..(457): Homolog of NCBI NO: 15218514 NR Description: serine carboxypeptidase -related [Arabidopsis
  misc_feature (1)..(287): Homolog of NCBI NO: 28393789 NR Description: putative serine carboxypeptidase II [Arabidopsis
  misc_feature (1)..(450): Homolog of NCBI NO: 30685740 NR Description: serine carboxypeptidase -related [Arabidopsis >gi|18377727|gb|AAL67013.1| putative serine carboxypeptidase II
  misc_feature (1)..(450): Homolog of NCBI NO: 25289793 NR Description: probable serine carboxypeptidase II [imported] - thaliana >gi|2459435|gb|AAB80670.1| putative serine
  misc_feature (14)..(450): Homolog of NCBI NO: 18396647 NR Description: serine carboxypeptidase -related [Arabidopsis >gi|16648969|gb|AAL24336.1| serine carboxypeptidase II, putative
  misc_feature (14)..(450): Homolog of NCBI NO: 25289785 NR Description: probable serine carboxypeptidase II [imported] - thaliana >gi|12322985|gb|AAG51475.1|AC069471_6 serine
  misc_feature (13)..(449): Homolog of NCBI NO: 38347156 NR Description: OSJNBa0039C07.2 [Oryza sativa (japonica
MVTVQVFARGYPETDLVVRLPGQPKVVFRQYAGYVDLDLNAGRSLFYYFVEAEKHPDTKPLTLWLNGGPGCSSVGGGAFTELGPFYPTGYGRGLRINSMSWNKASNLLFVDSPAGVGWSYSNRSSDYNAGDKSAASDMLVFLLRWFDKFPELKSHDLFLTGESYAGHYIPQLADAILSYNSRSSGFKFNIKGIAIGNPLLKLDRDIPAVYEFFWSHGMISEVVGRTIKIQCDFSHYTYAYPHNVSDACNDAIREAGDITTEYVNTFDVLPDLCYPSIALQELRLKQMATKMSMGVDVCMNYERQFYLNIPEVQMALHANRTNLPYSWSLCSNLLNYSAIDVNTNMLPTLKRIIQNKIPVRIFSGDQDSVVPFLGTRTIVGELANDLNFKTTVPYGVWFHKRQVGGWAIEYGNLLTFATVRGAAHAVAYTQPSRALHLFSTFLRGQRLPNKTDIAMHD

SEQ ID NO: 100732 - DNA, 2843 bp, Arabidopsis thaliana
  misc_feature (1)..(2843): Ceres Seq. ID no. 13605983
  misc_feature: MA Experiment ID: 20000169 Result: Down-regulated in Transcription
  misc_feature: MA Experiment 20000169 PARAMETER Experiment Name: At_100uM_ABA_P Parameter: Age (day) Value: 14
  misc_feature: MA Experiment 20000169 PARAMETER Experiment Name: At_100uM_ABA_P Parameter: Organism Value: A. thaliana
  misc_feature: MA Experiment 20000169 PARAMETER Experiment Name: At_100uM_ABA_P Parameter: Plant Line Value: WS
  misc_feature: MA Experiment 20000169 PARAMETER Experiment Name: At_100uM_ABA_P Parameter: Timepoint (hr) Value: 6
  misc_feature: MA Experiment 20000169 PARAMETER Experiment Name: At_100uM_ABA_P Parameter: Tissue Value: Aerial
  misc_feature: MA Experiment 20000169 PARAMETER Experiment Name: At_100uM_ABA_P Parameter: Treatment Value: 100uM ABA vs. No Treatment
  misc_feature: MA Experiment ID: 20000179 Result: Down-regulated in Transcription
  misc_feature: MA Experiment 20000179 PARAMETER Experiment Name: At_Germinating_Seeds_P Parameter: Age (hr) Value: 6 vs. 0
  misc_feature: MA Experiment 20000179 PARAMETER Experiment Name: At_Germinating_Seeds_P Parameter: Tissue Value: Germinating Seeds
  misc_feature: MA Experiment ID: 20000180 Result: Down-regulated in Transcription
  misc_feature: MA Experiment 20000180 PARAMETER Experiment Name: At_Germinating_Seeds_P Parameter: Age (hr) Value: 24 vs. 0
  misc_feature: MA Experiment 20000180 PARAMETER Experiment Name: At_Germinating_Seeds_P Parameter: Tissue Value: Germinating Seeds
  misc_feature: MA Experiment ID: 20000184 Result: Down-regulated in Transcription
  misc_feature: MA Experiment 20000184 PARAMETER Experiment Name: At_Shoots__P Parameter: Age (day) Value: 7
  misc_feature: MA Experiment 20000184 PARAMETER Experiment Name: At_Shoots__P Parameter: Tissue Value: Shoots vs. Whole Plant
  misc_feature: MA Experiment ID: 20000227 Result: Up-regulated in Transcription
  misc_feature: MA Experiment 20000227 PARAMETER Experiment Name: At_Root-Tips-vs-Tops_P Parameter: Tissue Value: Root Tips vs. Root Tops
  misc_feature: MA Experiment ID: 20000234 Result: Up-regulated in Transcription
  misc_feature: MA Experiment 20000234 PARAMETER Experiment Name: At_Siliques_P Parameter: Age (day) Value: 21
  misc_feature: MA Experiment 20000234 PARAMETER Experiment Name: At_Siliques_P Parameter: Organism Value: A. thaliana
  misc_feature: MA Experiment 20000234 PARAMETER Experiment Name: At_Siliques_P Parameter: Plant Line Value: WS
  misc_feature: MA Experiment 20000234 PARAMETER Experiment Name: At_Siliques_P Parameter: Tissue Value: Less Than 5mm Siliques vs. Whole Plant
  misc_feature: MA Experiment ID: 20000264 Result: Up-regulated in Transcription
  misc_feature: MA Experiment 20000264 PARAMETER Experiment Name: At_Open_Flower_P Parameter: Age (day) Value: 21
  misc_feature: MA Experiment 20000264 PARAMETER Experiment Name: At_Open_Flower_P Parameter: Plant Line Value: WS
  misc_feature: MA Experiment 20000264 PARAMETER Experiment Name: At_Open_Flower_P Parameter: Tissue Value: Open Flower vs. Whole Plant
  misc_feature: MA Experiment ID: 20000438 Result: Down-regulated in Transcription
  misc_feature: MA Experiment 20000438 PARAMETER Experiment Name: At_Shoots__P Parameter: Age (day) Value: 14
  misc_feature: MA Experiment 20000438 PARAMETER Experiment Name: At_Shoots__P Parameter: Tissue Value: Shoots vs. Whole Plant
  misc_feature: MA Experiment ID: 20000794 Result: Up-regulated in Transcription
  misc_feature: MA Experiment 20000794 PARAMETER Experiment Name: At_Petals_P Parameter: Age (day) Value: 23-25 days
  misc_feature: MA Experiment 20000794 PARAMETER Experiment Name: At_Petals_P Parameter: Plant Line Value: WS
  misc_feature: MA Experiment 20000794 PARAMETER Experiment Name: At_Petals_P Parameter: Tissue Value: Petals vs. Whole plant
  misc_feature: MA Experiment ID: 20001248 Result: Up-regulated in Transcription
  misc_feature: MA Experiment 20001248 PARAMETER Experiment Name: At_Far-red-induction_P Parameter: Age (day) Value: 7
  misc_feature: MA Experiment 20001248 PARAMETER Experiment Name: At_Far-red-induction_P Parameter: Light Value: Far-red vs. White
  misc_feature: MA Experiment 20001248 PARAMETER Experiment Name: At_Far-red-induction_P Parameter: Organism Value: A. thaliana
  misc_feature: MA Experiment 20001248 PARAMETER Experiment Name: At_Far-red-induction_P Parameter: Plant Line Value: Columbia
  misc_feature: MA Experiment 20001248 PARAMETER Experiment Name: At_Far-red-induction_P Parameter: Timepoint (hr) Value: 4
  misc_feature: MA Experiment 20001248 PARAMETER Experiment Name: At_Far-red-induction_P Parameter: Tissue Value: Whole Plant
  misc_feature: MA Experiment ID: 20001556 Result: Up-regulated in Transcription
  misc_feature: MA Experiment 20001556 PARAMETER Experiment Name: At_Drought_Soil_Dry_P Parameter: Age (day) Value: 26
  misc_feature: MA Experiment 20001556 PARAMETER Experiment Name: At_Drought_Soil_Dry_P Parameter: Organism Value: A. thaliana
  misc_feature: MA Experiment 20001556 PARAMETER Experiment Name: At_Drought_Soil_Dry_P Parameter: Plant Line Value: WS
  misc_feature: MA Experiment 20001556 PARAMETER Experiment Name: At_Drought_Soil_Dry_P Parameter: Post Timepoint (hr) Value: None
  misc_feature: MA Experiment 20001556 PARAMETER Experiment Name: At_Drought_Soil_Dry_P Parameter: Post-Treatment Value: None
  misc_feature: MA Experiment 20001556 PARAMETER Experiment Name: At_Drought_Soil_Dry_P Parameter: Timepoint (day) Value: 12
  misc_feature: MA Experiment 20001556 PARAMETER Experiment Name: At_Drought_Soil_Dry_P Parameter: Treatment Value: Drought vs. No Drought
  misc_feature: MA Experiment ID: 20001557 Result: Up-regulated in Transcription
  misc_feature: MA Experiment 20001557 PARAMETER Experiment Name: At_Drought_Soil_Dry_P Parameter: Age (day) Value: 27
  misc_feature: MA Experiment 20001557 PARAMETER Experiment Name: At_Drought_Soil_Dry_P Parameter: Organism Value: A. thaliana
  misc_feature: MA Experiment 20001557 PARAMETER Experiment Name: At_Drought_Soil_Dry_P Parameter: Plant Line Value: WS
  misc_feature: MA Experiment 20001557 PARAMETER Experiment Name: At_Drought_Soil_Dry_P Parameter: Post Timepoint (hr) Value: 3
  misc_feature: MA Experiment 20001557 PARAMETER Experiment Name: At_Drought_Soil_Dry_P Parameter: Post-Treatment Value: Re-Water vs. No Drought
  misc_feature: MA Experiment 20001557 PARAMETER Experiment Name: At_Drought_Soil_Dry_P Parameter: Timepoint (day) Value: 13
  misc_feature: MA Experiment 20001557 PARAMETER Experiment Name: At_Drought_Soil_Dry_P Parameter: Treatment Value: Drought vs. No Drought
  misc_feature: MA Experiment ID: 20001558 Result: Up-regulated in Transcription
  misc_feature: MA Experiment 20001558 PARAMETER Experiment Name: At_Drought_Soil_Dry_P Parameter: Age (day) Value: 27
  misc_feature: MA Experiment 20001558 PARAMETER Experiment Name: At_Drought_Soil_Dry_P Parameter: Organism Value: A. thaliana
  misc_feature: MA Experiment 20001558 PARAMETER Experiment Name: At_Drought_Soil_Dry_P Parameter: Plant Line Value: WS
  misc_feature: MA Experiment 20001558 PARAMETER Experiment Name: At_Drought_Soil_Dry_P Parameter: Post Timepoint (hr) Value: 6
  misc_feature: MA Experiment 20001558 PARAMETER Experiment Name: At_Drought_Soil_Dry_P Parameter: Post-Treatment Value: Re-Water vs. No Drought
  misc_feature: MA Experiment 20001558 PARAMETER Experiment Name: At_Drought_Soil_Dry_P Parameter: Timepoint (day) Value: 13
  misc_feature: MA Experiment 20001558 PARAMETER Experiment Name: At_Drought_Soil_Dry_P Parameter: Treatment Value: Drought vs. No Drought
  misc_feature: MA Experiment ID: 20001560 Result: Up-regulated in Transcription
  misc_feature: MA Experiment 20001560 PARAMETER Experiment Name: At_Drought_Soil_Dry_P Parameter: Age (day) Value: 28
  misc_feature: MA Experiment 20001560 PARAMETER Experiment Name: At_Drought_Soil_Dry_P Parameter: Organism Value: A. thaliana
  misc_feature: MA Experiment 20001560 PARAMETER Experiment Name: At_Drought_Soil_Dry_P Parameter: Plant Line Value: WS
  misc_feature: MA Experiment 20001560 PARAMETER Experiment Name: At_Drought_Soil_Dry_P Parameter: Post Timepoint (hr) Value: None
  misc_feature: MA Experiment 20001560 PARAMETER Experiment Name: At_Drought_Soil_Dry_P Parameter: Post-Treatment Value: None
  misc_feature: MA Experiment 20001560 PARAMETER Experiment Name: At_Drought_Soil_Dry_P Parameter: Timepoint (day) Value: 14
  misc_feature: MA Experiment 20001560 PARAMETER Experiment Name: At_Drought_Soil_Dry_P Parameter: Treatment Value: Drought vs. No Drought
  misc_feature: MA Experiment ID: 20001911 Result: Up-regulated in Transcription
  misc_feature: MA Experiment 20001911 PARAMETER Experiment Name: At_Drought_Reproduction_P Parameter: Age (day) Value: 40
  misc_feature: MA Experiment 20001911 PARAMETER Experiment Name: At_Drought_Reproduction_P Parameter: Organism Value: A. thaliana
  misc_feature: MA Experiment 20001911 PARAMETER Experiment Name: At_Drought_Reproduction_P Parameter: Plant Line Value: WS
  misc_feature: MA Experiment 20001911 PARAMETER Experiment Name: At_Drought_Reproduction_P Parameter: Timepoint (day) Value: 10
  misc_feature: MA Experiment 20001911 PARAMETER Experiment Name: At_Drought_Reproduction_P Parameter: Tissue Value: Flowers
  misc_feature: MA Experiment 20001911 PARAMETER Experiment Name: At_Drought_Reproduction_P Parameter: Treatment Value: Drought vs. No Drought
tttctttaacatcattatacaaagttacaacaacttgaaaaaattaattatataagcccattaaatcttgtatcataagcccagcccaaagttataaacttttcaaaatgcaaggagctaaaaaacaagttggttttgttggtttcaaatcaaaccaaaccgtttttttaagattacgaatcgaatggtttatttttgctaaatcggttcggttttttctccagacctattagtaaacctcttgcttcgattaggcggtcgtctctctgaaattttctgaaacctcttaaaccctagcaatgccgtcgagtttcttctttgaggatgctagtgacgacgagctcgaattaatacgcaatcaagaggacagtagtgaggaagacgtaaaggaaggcgaagcagaagagcatgaagctggagaagacgaagatggagaagaggaatatgaagaagaagatgacgacgaagaagaagaagatgagaagcggaaacgagatgctgatgctcaatctccttgggattttgcatcttactcaagctccgttggtgaagaacacgcccgccgtcacacaacgtctattgatgaaaagatctctaaagctattcagcatcgtccagttcccatttcaataaatgaagaagaagaagaggaagaagaagaagaagatgcctccgatgctgaaactgacaaacaagaggagtatctttcggaagacgatgaggcagctgagtacaaaccagaagatgctactcccaagccgttcttctctacagtggatggagtttcatttcatgctgatactttcatggagcttaatctctctcgtccattgcttcgagcttgtgaaactctcggatacaagaaacctactccgattcaggcagcttgtatacctttagcacttacagggcgtgatctttgtgccagtgccatcactgggtcagggaagactgctgcattcgctttacctactcttgagaggttgctgttccgtcccaagcgggtctttgctactagagttcttattctcactccgactagggagttggccgtccagattcacagtatgattcagaatcttgcacagtttactgatatcaagtgtggattgattgtaggagggctttctgtaagggagcaagaggtggttctgaggtctatgccagatattgttgtggcgactcctggacgtatgatagatcatttgcgtaattctatgtctgttgatttggatgatctagcggttttaatccttgatgaggcagaccgccttctacagactgggtttgccactgaaatcacagagctggttcgcttatgtcccaagagaaggcaaacaatgctcttctcagccacaatgactgaagaagttaaagagctagtcaaactttccttgaacaaaccgttgcggctctcagctgatccatcagctagaaggccaccaggcttgactgaggaggtggtaagaatacgcaggactcgtgaggcaaatcaggaagctgttcttctatcattgtgcacaaggacttttaaatcaaaagtcattatctttagtggaacaaaacaagctgcacatagactgaaaattttattcggattagctggcctcaaagcagctgagcttcatggaaacctaactcaagcacaacgtcttgattctctggagcttttcagaaagcaggaggtcgattttctcattgctaccgatgtagccgctcgaggacttgacatcattggtgttcaaacagttataaattatgcttgtcctcgggaaatagacagttatgttcacagagttggtagaacagctagggctggaagggaaggttatgctgtaacgtttgtgactgatagtgaccgatcccttttgaaagtcattgcaaagaaggtgggttcaaagttgaagagccgagtcatcccagagcagtcaatcgtcaagtggtctcagataatcgatgaaatggaagatcaatattccgctgttatttcagcagagagggatgagcgagctctaaggaaagctgaaatggaatttgcaaaggcggagaacatgcttgagcacagagatgaaatatatgcacgcccaaaaaggacttggttcatgacagagaaggagaagaagctcgtggcacaggctgaaaaggattctgcagggaaccctgctggaggcgaactagttagtgctgatagagcagaggacctcaagatgaaggagaagagaaaacgtgaacgcgagaagaatcttcctaggaaaaaacgtagaaagctagaagctgccagagagatgctagaagataacgaaggagaagaagaggaagaagacgaagaaggagacgaaaagagaggaagatcaagagggaaagacaagaaaaaacaggagacagataagaagggattgacactaaaggatcttggttacatgagagcaaaagcggtgaaagcaaaacagagagcaattgattccggtaagatggagagaccaaagccggacaagaaacaaagccggagtaaaccaagaaaccagcctcgtggtgaagagatgaaagatctgttcaagagtgatatgggcgagaagaaacagggcagaggcggtgccgcggctgcagcaaaacctcggacgaagtcgaagaactcattcaagagcaaagccagatataagcgtaggtaaaaggaaaaagcatttttgagaagatatcgaaggacaaacccacgagaagaaggacatttcattgagaagggtttaaacaatttaaattattgttgtaatatcataatttagaacaaaactggttaagatgttcgaaattttgttttctttgtcctatggtttttataatctttc

SEQ ID NO: 100733 - protein, 789 aa, Arabidopsis thaliana
  peptide (1)..(789): Ceres Seq. ID no. 13605984
  misc_feature (180)..(388): Pfam Name: DEAD/DEAH box helicase Pfam Description: DEAD/DEAH box helicase
  misc_feature (20)..(651): Homolog of NCBI NO: 7485103 NR Description: hypothetical protein - Arabidopsis thaliana RNA helicase like protein [Arabidopsis thaliana]
  misc_feature (16)..(699): Homolog of NCBI NO: 32403416 NR Description: hypothetical protein [Neurospora crassa]
  misc_feature (88)..(700): Homolog of NCBI NO: 13274192 NR Description: dJ686N3.1 (novel ATP dependent RNA helicase
  misc_feature (88)..(700): Homolog of NCBI NO: 19743937 NR Description: DEAD/H (Asp-Glu-Ala-Asp/His) box polypeptide 27;
  misc_feature (88)..(700): Homolog of NCBI NO: 29427946 NR Description: Probable ATP-dependent RNA helicase DDX27
  misc_feature (12)..(66): Homolog of NCBI NO: 13274192 NR Description: dJ686N3.1 (novel ATP dependent RNA helicase
  misc_feature (12)..(66): Homolog of NCBI NO: 29427946 NR Description: Probable ATP-dependent RNA helicase DDX27
  misc_feature (12)..(66): Homolog of NCBI NO: 19743937 NR Description: DEAD/H (Asp-Glu-Ala-Asp/His) box polypeptide 27;
  misc_feature (88)..(700): Homolog of NCBI NO: 32425487 NR Description: Unknown (protein for IMAGE:4128730) [Homo sapiens]
  misc_feature (12)..(66): Homolog of NCBI NO: 32425487 NR Description: Unknown (protein for IMAGE:4128730) [Homo sapiens]
MPSSFFFEDASDDELELIRNQEDSSEEDVKEGEAEEHEAGEDEDGEEEYEEEDDDEEEEDEKRKRDADAQSPWDFASYSSSVGEEHARRHTTSIDEKISKAIQHRPVPISINEEEEEEEEEEDASDAETDKQEEYLSEDDEAAEYKPEDATPKPFFSTVDGVSFHADTFMELNLSRPLLRACETLGYKKPTPIQAACIPLALTGRDLCASAITGSGKTAAFALPTLERLLFRPKRVFATRVLILTPTRELAVQIHSMIQNLAQFTDIKCGLIVGGLSVREQEVVLRSMPDIVVATPGRMIDHLRNSMSVDLDDLAVLILDEADRLLQTGFATEITELVRLCPKRRQTMLFSATMTEEVKELVKLSLNKPLRLSADPSARRPPGLTEEVVRIRRTREANQEAVLLSLCTRTFKSKVIIFSGTKQAAHRLKILFGLAGLKAAELHGNLTQAQRLDSLELFRKQEVDFLIATDVAARGLDIIGVQTVINYACPREIDSYVHRVGRTARAGREGYAVTFVTDSDRSLLKVIAKKVGSKLKSRVIPEQSIVKWSQIIDEMEDQYSAVISAERDERALRKAEMEFAKAENMLEHRDEIYARPKRTWFMTEKEKKLVAQAEKDSAGNPAGGELVSADRAEDLKMKEKRKREREKNLPRKKRRKLEAAREMLEDNEGEEEEEDEEGDEKRGRSRGKDKKKQETDKKGLTLKDLGYMRAKAVKAKQRAIDSGKMERPKPDKKQSRSKPRNQPRGEEMKDLFKSDMGEKKQGRGGAAAAAKPRTKSKNSFKSKARYKRR

SEQ ID NO: 100734 - protein, 620 aa, Arabidopsis thaliana
  peptide (1)..(620): Ceres Seq. ID no. 13605985
  misc_feature (11)..(219): Pfam Name: DEAD/DEAH box helicase Pfam Description: DEAD/DEAH box helicase
  misc_feature (1)..(482): Homolog of NCBI NO: 7485103 NR Description: hypothetical protein - Arabidopsis thaliana RNA helicase like protein [Arabidopsis thaliana]
  misc_feature (1)..(530): Homolog of NCBI NO: 32403416 NR Description: hypothetical protein [Neurospora crassa]
  misc_feature (1)..(531): Homolog of NCBI NO: 13274192 NR Description: dJ686N3.1 (novel ATP dependent RNA helicase
  misc_feature (1)..(531): Homolog of NCBI NO: 19743937 NR Description: DEAD/H (Asp-Glu-Ala-Asp/His) box polypeptide 27;
  misc_feature (1)..(531): Homolog of NCBI NO: 29427946 NR Description: Probable ATP-dependent RNA helicase DDX27
  misc_feature (1)..(531): Homolog of NCBI NO: 32425487 NR Description: Unknown (protein for IMAGE:4128730) [Homo sapiens]
  misc_feature (1)..(531): Homolog of NCBI NO: 16359192 NR Description: DDX27 protein [Homo sapiens]
  misc_feature (1)..(531): Homolog of NCBI NO: 40225538 NR Description: DDX27 protein [Homo sapiens]
  misc_feature (1)..(531): Homolog of NCBI NO: 10434683 NR Description: unnamed protein product [Homo sapiens]
  misc_feature (1)..(531): Homolog of NCBI NO: 15422163 NR Description: RNA helicase-like protein [Homo sapiens]
MELNLSRPLLRACETLGYKKPTPIQAACIPLALTGRDLCASAITGSGKTAAFALPTLERLLFRPKRVFATRVLILTPTRELAVQIHSMIQNLAQFTDIKCGLIVGGLSVREQEVVLRSMPDIVVATPGRMIDHLRNSMSVDLDDLAVLILDEADRLLQTGFATEITELVRLCPKRRQTMLFSATMTEEVKELVKLSLNKPLRLSADPSARRPPGLTEEVVRIRRTREANQEAVLLSLCTRTFKSKVIIFSGTKQAAHRLKILFGLAGLKAAELHGNLTQAQRLDSLELFRKQEVDFLIATDVAARGLDIIGVQTVINYACPREIDSYVHRVGRTARAGREGYAVTFVTDSDRSLLKVIAKKVGSKLKSRVIPEQSIVKWSQIIDEMEDQYSAVISAERDERALRKAEMEFAKAENMLEHRDEIYARPKRTWFMTEKEKKLVAQAEKDSAGNPAGGELVSADRAEDLKMKEKRKREREKNLPRKKRRKLEAAREMLEDNEGEEEEEDEEGDEKRGRSRGKDKKKQETDKKGLTLKDLGYMRAKAVKAKQRAIDSGKMERPKPDKKQSRSKPRNQPRGEEMKDLFKSDMGEKKQGRGGAAAAAKPRTKSKNSFKSKARYKRR

SEQ ID NO: 100735 - protein, 533 aa, Arabidopsis thaliana
  peptide (1)..(533): Ceres Seq. ID no. 13605986
  misc_feature (1)..(132): Pfam Name: DEAD/DEAH box helicase Pfam Description: DEAD/DEAH box helicase
  misc_feature (1)..(395): Homolog of NCBI NO: 7485103 NR Description: hypothetical protein - Arabidopsis thaliana RNA helicase like protein [Arabidopsis thaliana]
  misc_feature (1)..(443): Homolog of NCBI NO: 32403416 NR Description: hypothetical protein [Neurospora crassa]
  misc_feature (1)..(444): Homolog of NCBI NO: 13274192 NR Description: dJ686N3.1 (novel ATP dependent RNA helicase
  misc_feature (1)..(444): Homolog of NCBI NO: 29427946 NR Description: Probable ATP-dependent RNA helicase DDX27
  misc_feature (1)..(444): Homolog of NCBI NO: 19743937 NR Description: DEAD/H (Asp-Glu-Ala-Asp/His) box polypeptide 27;
  misc_feature (1)..(444): Homolog of NCBI NO: 32425487 NR Description: Unknown (protein for IMAGE:4128730) [Homo sapiens]
  misc_feature (1)..(444): Homolog of NCBI NO: 16359192 NR Description: DDX27 protein [Homo sapiens]
  misc_feature (1)..(444): Homolog of NCBI NO: 40225538 NR Description: DDX27 protein [Homo sapiens]
  misc_feature (1)..(444): Homolog of NCBI NO: 10434683 NR Description: unnamed protein product [Homo sapiens]
  misc_feature (1)..(444): Homolog of NCBI NO: 15422163 NR Description: RNA helicase-like protein [Homo sapiens]
MIQNLAQFTDIKCGLIVGGLSVREQEVVLRSMPDIVVATPGRMIDHLRNSMSVDLDDLAVLILDEADRLLQTGFATEITELVRLCPKRRQTMLFSATMTEEVKELVKLSLNKPLRLSADPSARRPPGLTEEVVRIRRTREANQEAVLLSLCTRTFKSKVIIFSGTKQAAHRLKILFGLAGLKAAELHGNLTQAQRLDSLELFRKQEVDFLIATDVAARGLDIIGVQTVINYACPREIDSYVHRVGRTARAGREGYAVTFVTDSDRSLLKVIAKKVGSKLKSRVIPEQSIVKWSQIIDEMEDQYSAVISAERDERALRKAEMEFAKAENMLEHRDEIYARPKRTWFMTEKEKKLVAQAEKDSAGNPAGGELVSADRAEDLKMKEKRKREREKNLPRKKRRKLEAAREMLEDNEGEEEEEDEEGDEKRGRSRGKDKKKQETDKKGLTLKDLGYMRAKAVKAKQRAIDSGKMERPKPDKKQSRSKPRNQPRGEEMKDLFKSDMGEKKQGRGGAAAAAKPRTKSKNSFKSKARYKRR

SEQ ID NO: 100736 - DNA, 1076 bp, Arabidopsis thaliana
  misc_feature (1)..(1076): Ceres Seq. ID no. 13605987
  misc_feature: MA Experiment ID: 108434 Result: Up-regulated in Transcription
  misc_feature: MA Experiment 108434 PARAMETER Experiment Name: At_Root_Tips_cDNA_P Parameter: Tissue Value: Root Tips
  misc_feature: MA Experiment ID: 108435 Result: Up-regulated in Transcription
  misc_feature: MA Experiment 108435 PARAMETER Experiment Name: At_stm_Mutants_cDNA_P Parameter: Plant Line Value: wt Landsburg vs stm
  misc_feature: MA Experiment 108435 PARAMETER Experiment Name: At_stm_Mutants_cDNA_P Parameter: Tissue Value: Shoot Apical Meristem Region
  misc_feature: MA Experiment ID: 20000087 Result: Down-regulated in Transcription
  misc_feature: MA Experiment 20000087 PARAMETER Experiment Name: At_100uM_ABA_Mutants_cDNA_P Parameter: Plant Line Value: WS
  misc_feature: MA Experiment 20000087 PARAMETER Experiment Name: At_100uM_ABA_Mutants_cDNA_P Parameter: Timepoint (hr) Value: 6
  misc_feature: MA Experiment 20000087 PARAMETER Experiment Name: At_100uM_ABA_Mutants_cDNA_P Parameter: Tissue Value: Aerial
  misc_feature: MA Experiment 20000087 PARAMETER Experiment Name: At_100uM_ABA_Mutants_cDNA_P Parameter: Treatment Value: 100uM ABA vs. No Treatment
  misc_feature: MA Experiment ID: 20000089 Result: Down-regulated in Transcription
  misc_feature: MA Experiment ID: 20000111 Result: Down-regulated in Transcription
  misc_feature: MA Experiment 20000111 PARAMETER Experiment Name: At_42deg_Heat_cDNA_P Parameter: Temperature (deg C) Value: 42 vs. 22
  misc_feature: MA Experiment 20000111 PARAMETER Experiment Name: At_42deg_Heat_cDNA_P Parameter: Timepoint (hr) Value: 6
  misc_feature: MA Experiment 20000111 PARAMETER Experiment Name: At_42deg_Heat_cDNA_P Parameter: Tissue Value: Aerial
  misc_feature: MA Experiment ID: 20000234 Result: Down-regulated in Transcription
  misc_feature: MA Experiment 20000234 PARAMETER Experiment Name: At_Siliques_P Parameter: Age (day) Value: 21
  misc_feature: MA Experiment 20000234 PARAMETER Experiment Name: At_Siliques_P Parameter: Organism Value: A. thaliana
  misc_feature: MA Experiment 20000234 PARAMETER Experiment Name: At_Siliques_P Parameter: Plant Line Value: WS
  misc_feature: MA Experiment 20000234 PARAMETER Experiment Name: At_Siliques_P Parameter: Tissue Value: Less Than 5mm Siliques vs. Whole Plant
  misc_feature: MA Experiment ID: 20000235 Result: Down-regulated in Transcription
  misc_feature: MA Experiment 20000235 PARAMETER Experiment Name: At_Siliques_P Parameter: Age (day) Value: 21
  misc_feature: MA Experiment 20000235 PARAMETER Experiment Name: At_Siliques_P Parameter: Organism Value: A. thaliana
  misc_feature: MA Experiment 20000235 PARAMETER Experiment Name: At_Siliques_P Parameter: Plant Line Value: WS
  misc_feature: MA Experiment 20000235 PARAMETER Experiment Name: At_Siliques_P Parameter: Tissue Value: 5-10mm Siliques vs. Whole Plant
  misc_feature: MA Experiment ID: 20000264 Result: Down-regulated in Transcription
  misc_feature: MA Experiment 20000264 PARAMETER Experiment Name: At_Open_Flower_P Parameter: Age (day) Value: 21
  misc_feature: MA Experiment 20000264 PARAMETER Experiment Name: At_Open_Flower_P Parameter: Plant Line Value: WS
  misc_feature: MA Experiment 20000264 PARAMETER Experiment Name: At_Open_Flower_P Parameter: Tissue Value: Open Flower vs. Whole Plant
  misc_feature: MA Experiment ID: 20000265 Result: Down-regulated in Transcription
  misc_feature: MA Experiment 20000265 PARAMETER Experiment Name: At_Open_Flower_P Parameter: Age (day) Value: 21
  misc_feature: MA Experiment 20000265 PARAMETER Experiment Name: At_Open_Flower_P Parameter: Plant Line Value: WS
  misc_feature: MA Experiment 20000265 PARAMETER Experiment Name: At_Open_Flower_P Parameter: Tissue Value: Closed Flower vs. Whole Plant
  misc_feature: MA Experiment ID: 20000286 Result: Down-regulated in Transcription
  misc_feature: MA Experiment 20000286 PARAMETER Experiment Name: At_Open_Flower_P Parameter: Age (day) Value: 21
  misc_feature: MA Experiment 20000286 PARAMETER Experiment Name: At_Open_Flower_P Parameter: Plant Line Value: WS
  misc_feature: MA Experiment 20000286 PARAMETER Experiment Name: At_Open_Flower_P Parameter: Tissue Value: Half Open vs. Whole Plant
  misc_feature: MA Experiment ID: 20000308 Result: Down-regulated in Transcription
  misc_feature: MA Experiment 20000308 PARAMETER Experiment Name: At_100mM_NaCl__P Parameter: Age (day) Value: 17
  misc_feature: MA Experiment 20000308 PARAMETER Experiment Name: At_100mM_NaCl__P Parameter: Organism Value: A. thaliana
  misc_feature: MA Experiment 20000308 PARAMETER Experiment Name: At_100mM_NaCl__P Parameter: Plant Line Value: WS
  misc_feature: MA Experiment 20000308 PARAMETER Experiment Name: At_100mM_NaCl__P Parameter: Timepoint (hr) Value: 72
  misc_feature: MA Experiment 20000308 PARAMETER Experiment Name: At_100mM_NaCl__P Parameter: Tissue Value: Whole Plant
  misc_feature: MA Experiment 20000308 PARAMETER Experiment Name: At_100mM_NaCl__P Parameter: Treatment Value: 100mM NaCl vs. No Treatment
  misc_feature: MA Experiment ID: 20000437 Result: Down-regulated in Transcription
  misc_feature: MA Experiment 20000437 PARAMETER Experiment Name: At_Drought_P Parameter: Age (day) Value: 8
  misc_feature: MA Experiment 20000437 PARAMETER Experiment Name: At_Drought_P Parameter: Organism Value: A. thaliana
  misc_feature: MA Experiment 20000437 PARAMETER Experiment Name: At_Drought_P Parameter: Plant Line Value: WS
  misc_feature: MA Experiment 20000437 PARAMETER Experiment Name: At_Drought_P Parameter: Timepoint (hr) Value: 24
  misc_feature: MA Experiment 20000437 PARAMETER Experiment Name: At_Drought_P Parameter: Tissue Value: Whole Plant
  misc_feature: MA Experiment 20000437 PARAMETER Experiment Name: At_Drought_P Parameter: Treatment Value: Drought vs. No Drought
  misc_feature: MA Experiment ID: 20000575 Result: Up-regulated in Transcription
  misc_feature: MA Experiment 20000575 PARAMETER Experiment Name: At_100uM_ABA_Mutants__P Parameter: Organism Value: A. thaliana
  misc_feature: MA Experiment 20000575 PARAMETER Experiment Name: At_100uM_ABA_Mutants__P Parameter: Plant Line Value: CS22
  misc_feature: MA Experiment 20000575 PARAMETER Experiment Name: At_100uM_ABA_Mutants__P Parameter: Timepoint (hr) Value: 6
  misc_feature: MA Experiment 20000575 PARAMETER Experiment Name: At_100uM_ABA_Mutants__P Parameter: Tissue Value: Whole Plant
  misc_feature: MA Experiment 20000575 PARAMETER Experiment Name: At_100uM_ABA_Mutants__P Parameter: Treatment Value: 1uM ABA vs. No Treatment
  misc_feature: MA Experiment ID: 20000576 Result: Up-regulated in Transcription
  misc_feature: MA Experiment 20000576 PARAMETER Experiment Name: At_100uM_ABA_Mutants__P Parameter: Organism Value: A. thaliana
  misc_feature: MA Experiment 20000576 PARAMETER Experiment Name: At_100uM_ABA_Mutants__P Parameter: Plant Line Value: CS23
  misc_feature: MA Experiment 20000576 PARAMETER Experiment Name: At_100uM_ABA_Mutants__P Parameter: Timepoint (hr) Value: 6
  misc_feature: MA Experiment 20000576 PARAMETER Experiment Name: At_100uM_ABA_Mutants__P Parameter: Tissue Value: Whole Plant
  misc_feature: MA Experiment 20000576 PARAMETER Experiment Name: At_100uM_ABA_Mutants__P Parameter: Treatment Value: 1uM ABA vs. No Treatment
  misc_feature: MA Experiment ID: 20000794 Result: Down-regulated in Transcription
  misc_feature: MA Experiment 20000794 PARAMETER Experiment Name: At_Petals_P Parameter: Age (day) Value: 23-25 days
  misc_feature: MA Experiment 20000794 PARAMETER Experiment Name: At_Petals_P Parameter: Plant Line Value: WS
  misc_feature: MA Experiment 20000794 PARAMETER Experiment Name: At_Petals_P Parameter: Tissue Value: Petals vs. Whole plant
  misc_feature: MA Experiment ID: 20001247 Result: Up-regulated in Transcription
  misc_feature: MA Experiment 20001247 PARAMETER Experiment Name: At_Far-red-induction_P Parameter: Age (day) Value: 7
  misc_feature: MA Experiment 20001247 PARAMETER Experiment Name: At_Far-red-induction_P Parameter: Light Value: Far-red vs. White
  misc_feature: MA Experiment 20001247 PARAMETER Experiment Name: At_Far-red-induction_P Parameter: Organism Value: A. thaliana
  misc_feature: MA Experiment 20001247 PARAMETER Experiment Name: At_Far-red-induction_P Parameter: Plant Line Value: Columbia
  misc_feature: MA Experiment 20001247 PARAMETER Experiment Name: At_Far-red-induction_P Parameter: Timepoint (hr) Value: 1
  misc_feature: MA Experiment 20001247 PARAMETER Experiment Name: At_Far-red-induction_P Parameter: Tissue Value: Whole Plant
  misc_feature: MA Experiment ID: 20001248 Result: Up-regulated in Transcription
  misc_feature: MA Experiment 20001248 PARAMETER Experiment Name: At_Far-red-induction_P Parameter: Age (day) Value: 7
  misc_feature: MA Experiment 20001248 PARAMETER Experiment Name: At_Far-red-induction_P Parameter: Light Value: Far-red vs. White
  misc_feature: MA Experiment 20001248 PARAMETER Experiment Name: At_Far-red-induction_P Parameter: Organism Value: A. thaliana
  misc_feature: MA Experiment 20001248 PARAMETER Experiment Name: At_Far-red-induction_P Parameter: Plant Line Value: Columbia
  misc_feature: MA Experiment 20001248 PARAMETER Experiment Name: At_Far-red-induction_P Parameter: Timepoint (hr) Value: 4
  misc_feature: MA Experiment 20001248 PARAMETER Experiment Name: At_Far-red-induction_P Parameter: Tissue Value: Whole Plant
  misc_feature: MA Experiment ID: 20001450 Result: Up-regulated in Transcription
  misc_feature: MA Experiment 20001450 PARAMETER Experiment Name: At_Far-red-induction_P Parameter: Age (day) Value: 7
  misc_feature: MA Experiment 20001450 PARAMETER Experiment Name: At_Far-red-induction_P Parameter: Light Value: Far-red vs. White
  misc_feature: MA Experiment 20001450 PARAMETER Experiment Name: At_Far-red-induction_P Parameter: Organism Value: A. thaliana
  misc_feature: MA Experiment 20001450 PARAMETER Experiment Name: At_Far-red-induction_P Parameter: Plant Line Value: Columbia
  misc_feature: MA Experiment 20001450 PARAMETER Experiment Name: At_Far-red-induction_P Parameter: Timepoint (hr) Value: 8
  misc_feature: MA Experiment 20001450 PARAMETER Experiment Name: At_Far-red-induction_P Parameter: Tissue Value: Whole Plant
  misc_feature: MA Experiment ID: 20001451 Result: Up-regulated in Transcription
  misc_feature: MA Experiment 20001451 PARAMETER Experiment Name: At_Far-red-induction_P Parameter: Age (day) Value: 7
  misc_feature: MA Experiment 20001451 PARAMETER Experiment Name: At_Far-red-induction_P Parameter: Light Value: Far-red vs. White
  misc_feature: MA Experiment 20001451 PARAMETER Experiment Name: At_Far-red-induction_P Parameter: Organism Value: A. thaliana
  misc_feature: MA Experiment 20001451 PARAMETER Experiment Name: At_Far-red-induction_P Parameter: Plant Line Value: Columbia
  misc_feature: MA Experiment 20001451 PARAMETER Experiment Name: At_Far-red-induction_P Parameter: Timepoint (hr) Value: 24
  misc_feature: MA Experiment 20001451 PARAMETER Experiment Name: At_Far-red-induction_P Parameter: Tissue Value: Whole Plant
  misc_feature: MA Experiment ID: 20001503 Result: Up-regulated in Transcription
  misc_feature: MA Experiment 20001503 PARAMETER Experiment Name: At_Far-red-enriched_P Parameter: Age (day) Value: 7
  misc_feature: MA Experiment 20001503 PARAMETER Experiment Name: At_Far-red-enriched_P Parameter: Light Value: Far-red enriched vs. White
  misc_feature: MA Experiment 20001503 PARAMETER Experiment Name: At_Far-red-enriched_P Parameter: Organism Value: A. thaliana
  misc_feature: MA Experiment 20001503 PARAMETER Experiment Name: At_Far-red-enriched_P Parameter: Plant Line Value: Columbia
  misc_feature: MA Experiment 20001503 PARAMETER Experiment Name: At_Far-red-enriched_P Parameter: Timepoint (day) Value: 3
  misc_feature: MA Experiment 20001503 PARAMETER Experiment Name: At_Far-red-enriched_P Parameter: Tissue Value: Whole Plant
  misc_feature: MA Experiment ID: 20001504 Result: Up-regulated in Transcription
  misc_feature: MA Experiment 20001504 PARAMETER Experiment Name: At_Far-red-enriched_P Parameter: Age (day) Value: 10
  misc_feature: MA Experiment 20001504 PARAMETER Experiment Name: At_Far-red-enriched_P Parameter: Light Value: Far-red enriched vs. White
  misc_feature: MA Experiment 20001504 PARAMETER Experiment Name: At_Far-red-enriched_P Parameter: Organism Value: A. thaliana
  misc_feature: MA Experiment 20001504 PARAMETER Experiment Name: At_Far-red-enriched_P Parameter: Plant Line Value: Columbia
  misc_feature: MA Experiment 20001504 PARAMETER Experiment Name: At_Far-red-enriched_P Parameter: Timepoint (day) Value: 6
  misc_feature: MA Experiment 20001504 PARAMETER Experiment Name: At_Far-red-enriched_P Parameter: Tissue Value: Whole Plant
  misc_feature: MA Experiment ID: 20001556 Result: Down-regulated in Transcription
  misc_feature: MA Experiment 20001556 PARAMETER Experiment Name: At_Drought_Soil_Dry_P Parameter: Age (day) Value: 26
  misc_feature: MA Experiment 20001556 PARAMETER Experiment Name: At_Drought_Soil_Dry_P Parameter: Organism Value: A. thaliana
  misc_feature: MA Experiment 20001556 PARAMETER Experiment Name: At_Drought_Soil_Dry_P Parameter: Plant Line Value: WS
  misc_feature: MA Experiment 20001556 PARAMETER Experiment Name: At_Drought_Soil_Dry_P Parameter: Post Timepoint (hr) Value: None
  misc_feature: MA Experiment 20001556 PARAMETER Experiment Name: At_Drought_Soil_Dry_P Parameter: Post-Treatment Value: None
  misc_feature: MA Experiment 20001556 PARAMETER Experiment Name: At_Drought_Soil_Dry_P Parameter: Timepoint (day) Value: 12
  misc_feature: MA Experiment 20001556 PARAMETER Experiment Name: At_Drought_Soil_Dry_P Parameter: Treatment Value: Drought vs. No Drought
  misc_feature: MA Experiment ID: 20001557 Result: Down-regulated in Transcription
  misc_feature: MA Experiment 20001557 PARAMETER Experiment Name: At_Drought_Soil_Dry_P Parameter: Age (day) Value: 27
  misc_feature: MA Experiment 20001557 PARAMETER Experiment Name: At_Drought_Soil_Dry_P Parameter: Organism Value: A. thaliana
  misc_feature: MA Experiment 20001557 PARAMETER Experiment Name: At_Drought_Soil_Dry_P Parameter: Plant Line Value: WS
  misc_feature: MA Experiment 20001557 PARAMETER Experiment Name: At_Drought_Soil_Dry_P Parameter: Post Timepoint (hr) Value: 3
  misc_feature: MA Experiment 20001557 PARAMETER Experiment Name: At_Drought_Soil_Dry_P Parameter: Post-Treatment Value: Re-Water vs. No Drought
  misc_feature: MA Experiment 20001557 PARAMETER Experiment Name: At_Drought_Soil_Dry_P Parameter: Timepoint (day) Value: 13
  misc_feature: MA Experiment 20001557 PARAMETER Experiment Name: At_Drought_Soil_Dry_P Parameter: Treatment Value: Drought vs. No Drought
  misc_feature: MA Experiment ID: 20001558 Result: Down-regulated in Transcription
  misc_feature: MA Experiment 20001558 PARAMETER Experiment Name: At_Drought_Soil_Dry_P Parameter: Age (day) Value: 27
  misc_feature: MA Experiment 20001558 PARAMETER Experiment Name: At_Drought_Soil_Dry_P Parameter: Organism Value: A. thaliana
  misc_feature: MA Experiment 20001558 PARAMETER Experiment Name: At_Drought_Soil_Dry_P Parameter: Plant Line Value: WS
  misc_feature: MA Experiment 20001558 PARAMETER Experiment Name: At_Drought_Soil_Dry_P Parameter: Post Timepoint (hr) Value: 6
  misc_feature: MA Experiment 20001558 PARAMETER Experiment Name: At_Drought_Soil_Dry_P Parameter: Post-Treatment Value: Re-Water vs. No Drought
  misc_feature: MA Experiment 20001558 PARAMETER Experiment Name: At_Drought_Soil_Dry_P Parameter: Timepoint (day) Value: 13
  misc_feature: MA Experiment 20001558 PARAMETER Experiment Name: At_Drought_Soil_Dry_P Parameter: Treatment Value: Drought vs. No Drought
  misc_feature: MA Experiment ID: 20001559 Result: Down-regulated in Transcription
  misc_feature: MA Experiment 20001559 PARAMETER Experiment Name: At_Drought_Soil_Dry_P Parameter: Age (day) Value: 28
  misc_feature: MA Experiment 20001559 PARAMETER Experiment Name: At_Drought_Soil_Dry_P Parameter: Organism Value: A. thaliana
  misc_feature: MA Experiment 20001559 PARAMETER Experiment Name: At_Drought_Soil_Dry_P Parameter: Plant Line Value: WS
  misc_feature: MA Experiment 20001559 PARAMETER Experiment Name: At_Drought_Soil_Dry_P Parameter: Post Timepoint (hr) Value: 29
  misc_feature: MA Experiment 20001559 PARAMETER Experiment Name: At_Drought_Soil_Dry_P Parameter: Post-Treatment Value: Re-Water vs. No Drought
  misc_feature: MA Experiment 20001559 PARAMETER Experiment Name: At_Drought_Soil_Dry_P Parameter: Timepoint (day) Value: 14
  misc_feature: MA Experiment 20001559 PARAMETER Experiment Name: At_Drought_Soil_Dry_P Parameter: Treatment Value: Drought vs. No Drought
  misc_feature: MA Experiment ID: 20001560 Result: Down-regulated in Transcription
  misc_feature: MA Experiment 20001560 PARAMETER Experiment Name: At_Drought_Soil_Dry_P Parameter: Age (day) Value: 28
  misc_feature: MA Experiment 20001560 PARAMETER Experiment Name: At_Drought_Soil_Dry_P Parameter: Organism Value: A. thaliana
  misc_feature: MA Experiment 20001560 PARAMETER Experiment Name: At_Drought_Soil_Dry_P Parameter: Plant Line Value: WS
  misc_feature: MA Experiment 20001560 PARAMETER Experiment Name: At_Drought_Soil_Dry_P Parameter: Post Timepoint (hr) Value: None
  misc_feature: MA Experiment 20001560 PARAMETER Experiment Name: At_Drought_Soil_Dry_P Parameter: Post-Treatment Value: None
  misc_feature: MA Experiment 20001560 PARAMETER Experiment Name: At_Drought_Soil_Dry_P Parameter: Timepoint (day) Value: 14
  misc_feature: MA Experiment 20001560 PARAMETER Experiment Name: At_Drought_Soil_Dry_P Parameter: Treatment Value: Drought vs. No Drought
  misc_feature: MA Experiment ID: 20001768 Result: Up-regulated in Transcription
  misc_feature: MA Experiment 20001768 PARAMETER Experiment Name: At_Far-red-enriched-adult_P Parameter: Age (day) Value: 28
  misc_feature: MA Experiment 20001768 PARAMETER Experiment Name: At_Far-red-enriched-adult_P Parameter: Light Value: Far-red enriched vs. White
  misc_feature: MA Experiment 20001768 PARAMETER Experiment Name: At_Far-red-enriched-adult_P Parameter: Organism Value: A. thaliana
  misc_feature: MA Experiment 20001768 PARAMETER Experiment Name: At_Far-red-enriched-adult_P Parameter: Plant Line Value: Columbia
  misc_feature: MA Experiment 20001768 PARAMETER Experiment Name: At_Far-red-enriched-adult_P Parameter: Timepoint (hr) Value: 1
  misc_feature: MA Experiment 20001768 PARAMETER Experiment Name: At_Far-red-enriched-adult_P Parameter: Tissue Value: Aerial
  misc_feature: MA Experiment ID: 20001769 Result: Up-regulated in Transcription
  misc_feature: MA Experiment 20001769 PARAMETER Experiment Name: At_Far-red-enriched-adult_P Parameter: Age (day) Value: 28
  misc_feature: MA Experiment 20001769 PARAMETER Experiment Name: At_Far-red-enriched-adult_P Parameter: Light Value: Far-red enriched vs. White
  misc_feature: MA Experiment 20001769 PARAMETER Experiment Name: At_Far-red-enriched-adult_P Parameter: Organism Value: A. thaliana
  misc_feature: MA Experiment 20001769 PARAMETER Experiment Name: At_Far-red-enriched-adult_P Parameter: Plant Line Value: Columbia
  misc_feature: MA Experiment 20001769 PARAMETER Experiment Name: At_Far-red-enriched-adult_P Parameter: Timepoint (hr) Value: 4
  misc_feature: MA Experiment 20001769 PARAMETER Experiment Name: At_Far-red-enriched-adult_P Parameter: Tissue Value: Aerial
  misc_feature: MA Experiment ID: 20001770 Result: Up-regulated in Transcription
  misc_feature: MA Experiment 20001770 PARAMETER Experiment Name: At_Far-red-enriched-adult_P Parameter: Age (day) Value: 28
  misc_feature: MA Experiment 20001770 PARAMETER Experiment Name: At_Far-red-enriched-adult_P Parameter: Light Value: Far-red enriched vs. White
  misc_feature: MA Experiment 20001770 PARAMETER Experiment Name: At_Far-red-enriched-adult_P Parameter: Organism Value: A. thaliana
  misc_feature: MA Experiment 20001770 PARAMETER Experiment Name: At_Far-red-enriched-adult_P Parameter: Plant Line Value: Columbia
  misc_feature: MA Experiment 20001770 PARAMETER Experiment Name: At_Far-red-enriched-adult_P Parameter: Timepoint (hr) Value: 8
  misc_feature: MA Experiment 20001770 PARAMETER Experiment Name: At_Far-red-enriched-adult_P Parameter: Tissue Value: Aerial
  misc_feature: MA Experiment ID: 20001771 Result: Up-regulated in Transcription
  misc_feature: MA Experiment 20001771 PARAMETER Experiment Name: At_Far-red-enriched-adult_P Parameter: Age (day) Value: 28
  misc_feature: MA Experiment 20001771 PARAMETER Experiment Name: At_Far-red-enriched-adult_P Parameter: Light Value: Far-red enriched vs. White
  misc_feature: MA Experiment 20001771 PARAMETER Experiment Name: At_Far-red-enriched-adult_P Parameter: Organism Value: A. thaliana
  misc_feature: MA Experiment 20001771 PARAMETER Experiment Name: At_Far-red-enriched-adult_P Parameter: Plant Line Value: Columbia
  misc_feature: MA Experiment 20001771 PARAMETER Experiment Name: At_Far-red-enriched-adult_P Parameter: Timepoint (hr) Value: 16
  misc_feature: MA Experiment 20001771 PARAMETER Experiment Name: At_Far-red-enriched-adult_P Parameter: Tissue Value: Aerial
  misc_feature: MA Experiment ID: 20001773 Result: Up-regulated in Transcription
  misc_feature: MA Experiment 20001773 PARAMETER Experiment Name: At_Far-red-enriched-adult_P Parameter: Age (day) Value: 30
  misc_feature: MA Experiment 20001773 PARAMETER Experiment Name: At_Far-red-enriched-adult_P Parameter: Light Value: Far-red enriched vs. White
  misc_feature: MA Experiment 20001773 PARAMETER Experiment Name: At_Far-red-enriched-adult_P Parameter: Organism Value: A. thaliana
  misc_feature: MA Experiment 20001773 PARAMETER Experiment Name: At_Far-red-enriched-adult_P Parameter: Plant Line Value: Columbia
  misc_feature: MA Experiment 20001773 PARAMETER Experiment Name: At_Far-red-enriched-adult_P Parameter: Timepoint (hr) Value: 48
  misc_feature: MA Experiment 20001773 PARAMETER Experiment Name: At_Far-red-enriched-adult_P Parameter: Tissue Value: Aerial
  misc_feature: MA Experiment ID: 20001774 Result: Up-regulated in Transcription
  misc_feature: MA Experiment 20001774 PARAMETER Experiment Name: At_Far-red-enriched-adult_P Parameter: Age (day) Value: 31
  misc_feature: MA Experiment 20001774 PARAMETER Experiment Name: At_Far-red-enriched-adult_P Parameter: Light Value: Far-red enriched vs. White
  misc_feature: MA Experiment 20001774 PARAMETER Experiment Name: At_Far-red-enriched-adult_P Parameter: Organism Value: A. thaliana
  misc_feature: MA Experiment 20001774 PARAMETER Experiment Name: At_Far-red-enriched-adult_P Parameter: Plant Line Value: Columbia
  misc_feature: MA Experiment 20001774 PARAMETER Experiment Name: At_Far-red-enriched-adult_P Parameter: Timepoint (hr) Value: 72
  misc_feature: MA Experiment 20001774 PARAMETER Experiment Name: At_Far-red-enriched-adult_P Parameter: Tissue Value: Aerial
  misc_feature: MA Experiment ID: 20001904 Result: Down-regulated in Transcription
  misc_feature: MA Experiment 20001904 PARAMETER Experiment Name: At_Drought_Reproduction_P Parameter: Age (day) Value: 37
  misc_feature: MA Experiment 20001904 PARAMETER Experiment Name: At_Drought_Reproduction_P Parameter: Organism Value: A. thaliana
  misc_feature: MA Experiment 20001904 PARAMETER Experiment Name: At_Drought_Reproduction_P Parameter: Plant Line Value: WS
  misc_feature: MA Experiment 20001904 PARAMETER Experiment Name: At_Drought_Reproduction_P Parameter: Timepoint (day) Value: 7
  misc_feature: MA Experiment 20001904 PARAMETER Experiment Name: At_Drought_Reproduction_P Parameter: Tissue Value: Rosettes
  misc_feature: MA Experiment 20001904 PARAMETER Experiment Name: At_Drought_Reproduction_P Parameter: Treatment Value: Drought vs. No Drought
atcttctatctctcaaaagaaaagcagacaactttatttgcaaaaacagagtttttttttcttatcttgagaaagttcaacagaagatgatgttcgagaaagacgatctgggtctaagcttaggcttgaattttccaaagaaacagatcaatctcaaatcaaatccatctgtttctgttactccttcttcttcttcttttggattattcagaagatcttcatggaacgagagttttacttcttcagttccaaactcagattcgtcacaaaaagaaacaagaactttcatccgaggaatcgacgtgaacagaccaccgtctacagcggaatacggcgacgaagacgctggagtatcttcacctaacagtacagtctcaagctctacagggaaaagaagcgagagagaagaagacacagatccacaaggctcaagaggaatcagtgacgatgaagatggtgataactccaggaaaaagcttagactttccaaagatcaatctgctattcttgaagagaccttcaaagatcacagtactctcaatccgaagcagaagcaagcattggctaaacaattagggttacgagcaagacaagtggaagtttggtttcagaacagacgagcaagaacaaagctgaagcaaacggaggtagactgcgagttcttacggagatgctgcgagaatctaacggaagagaaccgtcggctacaaaaagaagtaacggaattgagagcacttaagctctctcctcagttctacatgcacatgagcccacccactactttgaccatgtgcccttcatgtgaacacgtgtcggtcccgccaccacaacctcaggctgctacgtcagcgcaccaccggtcgttgccggtcaatgcgtgggctcctgcgacgaggatatctcacggcttgacttttgacgctcttcgtcctaggtcctaagtctttttacttgcaaccaaagggcattttggtcgttttttaagtttcatggaccagatatgcatgtagttgttaacatgtatgtattttcttagaaagaaagaaaaacagattaatatttttctagcttaaacc

SEQ ID NO: 100737 - protein, 312 aa, Arabidopsis thaliana
  peptide (1)..(312): Ceres Seq. ID no. 13605988
  misc_feature (29)..(137): Pfam Name: HD-ZIP protein N terminus Pfam Description: HD-ZIP protein N terminus
  misc_feature (29)..(312): Homolog of NCBI NO: 15235882 NR Description: homeobox-leucine zipper protein HAT4 (HD-Zip
  misc_feature (29)..(312): Homolog of NCBI NO: 22759 NR Description: HAT4 [Arabidopsis thaliana]
  misc_feature (29)..(312): Homolog of NCBI NO: 8919876 NR Description: hypothetical protein [Capsella rubella]
LLSLKRKADNFICKNRVFFSYLEKVQQKMMFEKDDLGLSLGLNFPKKQINLKSNPSVSVTPSSSSFGLFRRSSWNESFTSSVPNSDSSQKETRTFIRGIDVNRPPSTAEYGDEDAGVSSPNSTVSSSTGKRSEREEDTDPQGSRGISDDEDGDNSRKKLRLSKDQSAILEETFKDHSTLNPKQKQALAKQLGLRARQVEVWFQNRRARTKLKQTEVDCEFLRRCCENLTEENRRLQKEVTELRALKLSPQFYMHMSPPTTLTMCPSCEHVSVPPPQPQAATSAHHRSLPVNAWAPATRISHGLTFDALRPRS

SEQ ID NO: 100738 - protein, 284 aa, Arabidopsis thaliana; identical to SEQ ID NO: 37759
  peptide (1)..(284): Ceres Seq. ID no. 13605989
  misc_feature (1)..(109): Pfam Name: HD-ZIP protein N terminus Pfam Description: HD-ZIP protein N terminus
  misc_feature (1)..(284): Homolog of NCBI NO: 15235882 NR Description: homeobox-leucine zipper protein HAT4 (HD-Zip
  misc_feature (1)..(284): Homolog of NCBI NO: 22759 NR Description: HAT4 [Arabidopsis thaliana]
  misc_feature (1)..(284): Homolog of NCBI NO: 8919876 NR Description: hypothetical protein [Capsella rubella]

SEQ ID NO: 100739 - protein, 283 aa, Arabidopsis thaliana; identical to SEQ ID NO: 37760
  peptide (1)..(283): Ceres Seq. ID no. 13605990
  misc_feature (1)..(108): Pfam Name: HD-ZIP protein N terminus Pfam Description: HD-ZIP protein N terminus
  misc_feature (1)..(283): Homolog of NCBI NO: 15235882 NR Description: homeobox-leucine zipper protein HAT4 (HD-Zip
  misc_feature (1)..(283): Homolog of NCBI NO: 22759 NR Description: HAT4 [Arabidopsis thaliana]
  misc_feature (1)..(283): Homolog of NCBI NO: 8919876 NR Description: hypothetical protein [Capsella rubella]

SEQ ID NO: 100740 - DNA, 2658 bp, Arabidopsis thaliana
  misc_feature (1)..(2658): Ceres Seq. ID no. 13606003
  misc_feature: MA Experiment ID: 20000314 Result: Up-regulated in Transcription
  misc_feature: MA Experiment 20000314 PARAMETER Experiment Name: At_14day_Shoots-Roots_Sub_P Parameter: Age (day) Value: 14
  misc_feature: MA Experiment 20000314 PARAMETER Experiment Name: At_14day_Shoots-Roots_Sub_P Parameter: Organism Value: A. thaliana
  misc_feature: MA Experiment 20000314 PARAMETER Experiment Name: At_14day_Shoots-Roots_Sub_P Parameter: Plant Line Value: WS
  misc_feature: MA Experiment 20000314 PARAMETER Experiment Name: At_14day_Shoots-Roots_Sub_P Parameter: Tissue Value: Roots vs. Whole Plant
  misc_feature: MA Experiment ID: 20000315 Result: Up-regulated in Transcription
  misc_feature: MA Experiment 20000315 PARAMETER Experiment Name: At_14day_Shoots-Roots_Sub_P Parameter: Age (day) Value: 14
  misc_feature: MA Experiment 20000315 PARAMETER Experiment Name: At_14day_Shoots-Roots_Sub_P Parameter: Organism Value: A. thaliana
  misc_feature: MA Experiment 20000315 PARAMETER Experiment Name: At_14day_Shoots-Roots_Sub_P Parameter: Plant Line Value: WS
  misc_feature: MA Experiment 20000315 PARAMETER Experiment Name: At_14day_Shoots-Roots_Sub_P Parameter: Tissue Value: Shoots vs. Whole Plant
gaagagaatccgatgcgtagaagactatcttccgtgctaatcaacaatcagtgcatcgcgtcccaacgccattaccacacatctcgacctgagaaacccacaaagaaagccagcagccatgaaccaactcacaaattcaccaggaagccatgggaggaagtgccatttctcaccgatctcaaagaaatcgaagacccagaggaagctctttctctcttccaccaataccaggaaatgggtttccgacacgactacccatcttactcttctctcatctacaagcttgcaaagtcccgtaacttcgacgccgtcgaccaaattctccgccttgttcgctatcgaaacgtccggtgcagagaatccctcttcatgggattgattcagcattacgggaaagccggttcggtcgacaaagccatcgatgttttccacaaaatcacctcctttgattgtgttcgcacgattcagtctctcaacactctcatcaacgttctggtcgataacggcgagttggaaaaggccaaaagctttttcgacggggcaaaggatatgcgtttgcgtcccaattcggtgtctttcaatattttgatcaaaggatttcttgataaatgcgattgggaagctgcatgtaaggtgttcgacgaaatgcttgagatggaggtgcaaccgagtgttgtgacatacaatagcctgattggtttcttatgccgaaatgacgatatgggtaaggcgaagagcttgcttgaagatatgattaagaaaagaatacgtccgaatgctgtgacatttgggttgttaatgaaaggtttatgttgtaagggagagtacaatgaagcaaagaagttgatgttcgatatggagtatcgtgggtgtaaaccgggtctcgttaactacggaattttgatgagtgatcttgggaagagagggagaattgatgaggcaaagcttctactcggcgagatgaagaaaagacggataaaaccagatgttgtgatctataacattctggtaaaccatctttgcactgagtgtagagtccctgaggcttatagagtgctgacggaaatgcagatgaaagggtgtaaaccaaatgcagctacataccgtatgatgattgatgggttttgtcgtatcgaggattttgattcagggttgaatgttttgaatgcaatgcttgcaagcagacactgtcccacacctgcaacgtttgtatgtatggttgctgggctgattaaaggcggtaacttggaccatgcttgctttgtgttagaggtgatgggaaagaaaaacttaagttttgggtctggtgcttggcaaaatctactttctgatctctgcatcaaggatggaggagtatattgtgaggctttgtcagaagtaatttccatctaagcaatgacctttttaaaggctgcaaagtactcttcttcctgattttagctctcgccattacttttgtctcagctgctcggcttcttgatgaagaagaagatattgggttggtccctttgcctaccacgagtcctggtcctttaccaacagttggttttaggcccctttcccactgctaattcaggccctgcaactggtatcgcttcaggtacaggttcagcctcagggggtttaggttccttgggtaccaatactggccccgggcctctatcgaccactggttctagtcttttaccagttgctagttcgggtaccttgcctgttactggccccggtcctctaccaaccagttctggtctcttaccgggtgctagttcgggtaacttgcctggttcaggttcagggcctttgcctactgttggttcaggtgctgcagctacgggtctgggcgcaggtgcagggtcagtgattggtggttcagttcctgacaacactttggttttcttcatgcacgatatactcggtggctcaaacccgacagcgagggctgtgactggagtcgtcgcaaacgcagccctcagtggccaaattccattcgctaagcccaatggtgcaaacctccctgttagtaacggcgttccatcagacaataacaacaatggaatcctgaacaataacaacgtcccacttctcgtcgggcttggcggaaccacttccaacattctacagaacaatggaaacaacatgttgaacggtcttcccgtggctaacggcggccagctcccatcgggttcgtctcttcagatgctcatgtttgggacattgacggtgatggacaacgaactaaccgaaggacacgaactcgggtctggtctgctgggtaaagcccaaggcttctacgtggcaagtgcccttgatgggaccagccagactatggctttcacggctatgtttgagagcggtggatatgaagatagcatcagtttcttcggtgtgcatagaacagctgcatcggaatctcatcttggggtaatgggcggtactggtaagtatgtgaatgcgagaggcttcgcaattgtcaagacttttacgggttcctccgggacccagcagcagcagccgcaccagttcacagatgggctcgagactgttctggagtgcaccgtttatctttcttactagtttcttttccctcttctcttatcttttttgtctaccaagaaaacgtgaaaacctattaatttgacaaccaatcccttgttattc

SEQ ID NO: 100741 - protein, 463 aa, Arabidopsis thaliana; identical to SEQ ID NO: 76097
  peptide (1)..(463): Ceres Seq. ID no. 13606004
  misc_feature (261)..(295): Pfam Name: PPR repeat Pfam Description: PPR repeat
  misc_feature (5)..(463): Homolog of NCBI NO: 15222997 NR Description: pentatricopeptide (PPR) repeat-containing protein thaliana] >gi|25407002|pir||G86212 hypothetical protein
  misc_feature (19)..(463): Homolog of NCBI NO: 15237345 NR Description: pentatricopeptide (PPR) repeat-containing protein
  misc_feature (60)..(462): Homolog of NCBI NO: 15219274 NR Description: pentatricopeptide (PPR) repeat-containing protein
  misc_feature (64)..(463): Homolog of NCBI NO: 15237375 NR Description: pentatricopeptide (PPR) repeat-containing protein
  misc_feature (126)..(432): Homolog of NCBI NO: 15218325 NR Description: pentatricopeptide (PPR) repeat-containing protein
  misc_feature (81)..(426): Homolog of NCBI NO: 15219049 NR Description: hypothetical protein [Arabidopsis thaliana]
  misc_feature (37)..(392): Homolog of NCBI NO: 7486352 NR Description: hypothetical protein F3D13.1 - Arabidopsis
  misc_feature (80)..(450): Homolog of NCBI NO: 14488357 NR Description: unknown protein [Oryza sativa (japonica
  misc_feature (67)..(426): Homolog of NCBI NO: 15240891 NR Description: pentatricopeptide (PPR) repeat-containing protein
  misc_feature (57)..(450): Homolog of NCBI NO: 15217608 NR Description: pentatricopeptide (PPR) repeat-containing protein

SEQ ID NO: 100742 - protein, 459 aa, Arabidopsis thaliana; identical to SEQ ID NO: 76098
  peptide (1)..(459): Ceres Seq. ID no. 13606005
  misc_feature (257)..(291): Pfam Name: PPR repeat Pfam Description: PPR repeat
  misc_feature (1)..(459): Homolog of NCBI NO: 15222997 NR Description: pentatricopeptide (PPR) repeat-containing protein thaliana] >gi|25407002|pir||G86212 hypothetical protein
  misc_feature (15)..(459): Homolog of NCBI NO: 15237345 NR Description: pentatricopeptide (PPR) repeat-containing protein
  misc_feature (56)..(458): Homolog of NCBI NO: 15219274 NR Description: pentatricopeptide (PPR) repeat-containing protein
  misc_feature (60)..(459): Homolog of NCBI NO: 15237375 NR Description: pentatricopeptide (PPR) repeat-containing protein
  misc_feature (122)..(428): Homolog of NCBI NO: 15218325 NR Description: pentatricopeptide (PPR) repeat-containing protein
  misc_feature (77)..(422): Homolog of NCBI NO: 15219049 NR Description: hypothetical protein [Arabidopsis thaliana]
  misc_feature (33)..(388): Homolog of NCBI NO: 7486352 NR Description: hypothetical protein F3D13.1 - Arabidopsis
  misc_feature (76)..(446): Homolog of NCBI NO: 14488357 NR Description: unknown protein [Oryza sativa (japonica
  misc_feature (63)..(422): Homolog of NCBI NO: 15240891 NR Description: pentatricopeptide (PPR) repeat-containing protein
  misc_feature (53)..(446): Homolog of NCBI NO: 15217608 NR Description: pentatricopeptide (PPR) repeat-containing protein

SEQ ID NO: 100743 - protein, 385 aa, Arabidopsis thaliana; identical to SEQ ID NO: 76099
  peptide (1)..(385): Ceres Seq. ID no. 13606006
  misc_feature (183)..(217): Pfam Name: PPR repeat Pfam Description: PPR repeat
  misc_feature (1)..(385): Homolog of NCBI NO: 15222997 NR Description: pentatricopeptide (PPR) repeat-containing protein thaliana] >gi|25407002|pir||G86212 hypothetical protein
  misc_feature (1)..(385): Homolog of NCBI NO: 15237345 NR Description: pentatricopeptide (PPR) repeat-containing protein
  misc_feature (1)..(384): Homolog of NCBI NO: 15219274 NR Description: pentatricopeptide (PPR) repeat-containing protein
  misc_feature (1)..(385): Homolog of NCBI NO: 15237375 NR Description: pentatricopeptide (PPR) repeat-containing protein
  misc_feature (48)..(354): Homolog of NCBI NO: 15218325 NR Description: pentatricopeptide (PPR) repeat-containing protein
  misc_feature (3)..(348): Homolog of NCBI NO: 15219049 NR Description: hypothetical protein [Arabidopsis thaliana]
  misc_feature (1)..(314): Homolog of NCBI NO: 7486352 NR Description: hypothetical protein F3D13.1 - Arabidopsis
  misc_feature (2)..(372): Homolog of NCBI NO: 14488357 NR Description: unknown protein [Oryza sativa (japonica
  misc_feature (1)..(348): Homolog of NCBI NO: 15240891 NR Description: pentatricopeptide (PPR) repeat-containing protein
  misc_feature (1)..(372): Homolog of NCBI NO: 15217608 NR Description: pentatricopeptide (PPR) repeat-containing protein

SEQ ID NO: 100744 - DNA, 591 bp, Arabidopsis thaliana
  misc_feature (1)..(591): Ceres Seq. ID no. 13606007
  misc_feature: MA Experiment ID: 20000307 Result: Up-regulated in Transcription
  misc_feature: MA Experiment 20000307 PARAMETER Experiment Name: At_Germinating_Seeds_Sub_P Parameter: Age (hr) Value: 24 vs. 0
  misc_feature: MA Experiment 20000307 PARAMETER Experiment Name: At_Germinating_Seeds_Sub_P Parameter: Organism Value: A. thaliana
  misc_feature: MA Experiment 20000307 PARAMETER Experiment Name: At_Germinating_Seeds_Sub_P Parameter: Plant Line Value: WS
  misc_feature: MA Experiment 20000307 PARAMETER Experiment Name: At_Germinating_Seeds_Sub_P Parameter: Tissue Value: Germinating Seeds
  misc_feature: MA Experiment ID: 20000314 Result: Down-regulated in Transcription
  misc_feature: MA Experiment 20000314 PARAMETER Experiment Name: At_14day_Shoots-Roots_Sub_P Parameter: Age (day) Value: 14
  misc_feature: MA Experiment 20000314 PARAMETER Experiment Name: At_14day_Shoots-Roots_Sub_P Parameter: Organism Value: A. thaliana
  misc_feature: MA Experiment 20000314 PARAMETER Experiment Name: At_14day_Shoots-Roots_Sub_P Parameter: Plant Line Value: WS
  misc_feature: MA Experiment 20000314 PARAMETER Experiment Name: At_14day_Shoots-Roots_Sub_P Parameter: Tissue Value: Roots vs. Whole Plant
  misc_feature: MA Experiment ID: 20000346 Result: Down-regulated in Transcription
  misc_feature: MA Experiment 20000346 PARAMETER Experiment Name: At_2mM_SA_Sub_P Parameter: Age (day) Value: 14
  misc_feature: MA Experiment 20000346 PARAMETER Experiment Name: At_2mM_SA_Sub_P Parameter: Organism Value: A. thaliana
  misc_feature: MA Experiment 20000346 PARAMETER Experiment Name: At_2mM_SA_Sub_P Parameter: Plant Line Value: WS
  misc_feature: MA Experiment 20000346 PARAMETER Experiment Name: At_2mM_SA_Sub_P Parameter: Timepoint (hr) Value: 1
  misc_feature: MA Experiment 20000346 PARAMETER Experiment Name: At_2mM_SA_Sub_P Parameter: Tissue Value: Aerial
  misc_feature: MA Experiment 20000346 PARAMETER Experiment Name: At_2mM_SA_Sub_P Parameter: Treatment Value: 2mM SA vs. No Treatment
  misc_feature: MA Experiment ID: 20000347 Result: Down-regulated in Transcription
  misc_feature: MA Experiment 20000347 PARAMETER Experiment Name: At_2mM_SA_Sub_P Parameter: Age (day) Value: 14
  misc_feature: MA Experiment 20000347 PARAMETER Experiment Name: At_2mM_SA_Sub_P Parameter: Organism Value: A. thaliana
  misc_feature: MA Experiment 20000347 PARAMETER Experiment Name: At_2mM_SA_Sub_P Parameter: Plant Line Value: WS
  misc_feature: MA Experiment 20000347 PARAMETER Experiment Name: At_2mM_SA_Sub_P Parameter: Timepoint (hr) Value: 6
  misc_feature: MA Experiment 20000347 PARAMETER Experiment Name: At_2mM_SA_Sub_P Parameter: Tissue Value: Aerial
  misc_feature: MA Experiment 20000347 PARAMETER Experiment Name: At_2mM_SA_Sub_P Parameter: Treatment Value: 2mM SA vs. No Treatment
atggcgaatgagagtaataatcttggactcgaaatcaccgaactacggctaggtcttcccggagatatcgtcgtctccggtgagtccatctccgggaagaagagggcttctccggaagtagagattgatttgaaatgtgaaccggcgaaaaagagtcaagttgtgggttggccaccggtttgttcgtaccggagaaagaacagtctcgaacggaccaaaagttcgtacgtgaaagtgagtgtagatggagctgcatttttaaggaagattgatttggaaatgtacaaatgttaccaagatcttgcttccgctctgcaaattctgttcggatgctatatcaattttgatgatacgttgaaggaaagtgaatgtgtaccaatatatgaagacaaagatggagattggatgcttgctggagatgttccttgggaaatgttccttggatcgtgcaagaggttaaggattatgaagagatcatgtaacagaggatgaatgatatttatagtcacatgtgaatgtgagtgagccttacagatatctaaatatacatttttgcagttactcaatatttctcttcggaagtctaagatt

SEQ ID NO: 100745 - protein, 163 aa, Arabidopsis thaliana
  peptide (1)..(163): Ceres Seq. ID no. 13606008
  misc_feature (8)..(162): Pfam Name: AUX/IAA family Pfam Description: AUX/IAA family
  misc_feature (1)..(163): Homolog of NCBI NO: 15218243 NR Description: auxin-responsive protein IAA5 (Indoleacetic
  misc_feature (1)..(159): Homolog of NCBI NO: 1168608 NR Description: Auxin-responsive protein IAA5 (Indoleacetic
  misc_feature (1)..(159): Homolog of NCBI NO: 2119766 NR Description: auxin-induced protein IAA5 - Arabidopsis thaliana
  misc_feature (1)..(159): Homolog of NCBI NO: 99664 NR Description: auxin-induced protein AUX2-27 - Arabidopsis
  misc_feature (8)..(163): Homolog of NCBI NO: 972913 NR Description: IAA5
  misc_feature (4)..(163): Homolog of NCBI NO: 11131101 NR Description: Auxin-induced protein 22C (Indole-3-acetic acid
  misc_feature (1)..(163): Homolog of NCBI NO: 114733 NR Description: AUXIN-INDUCED PROTEIN AUX22 >gi|81758|pir||B28993
  misc_feature (1)..(163): Homolog of NCBI NO: 416640 NR Description: Auxin-induced protein 22A (Indole-3-acetic acid
  misc_feature (1)..(163): Homolog of NCBI NO: 1352058 NR Description: AUXIN-INDUCED PROTEIN IAA6 >gi|629634|pir||S39078
  misc_feature (1)..(163): Homolog of NCBI NO: 4887012 NR Description: Nt-iaa2.3 deduced protein [Nicotiana tabacum]
MANESNNLGLEITELRLGLPGDIVVSGESISGKKRASPEVEIDLKCEPAKKSQVVGWPPVCSYRRKNSLERTKSSYVKVSVDGAAFLRKIDLEMYKCYQDLASALQILFGCYINFDDTLKESECVPIYEDKDGDWMLAGDVPWEMFLGSCKRLRIMKRSCNRG

SEQ ID NO: 100746 - DNA, 1757 bp, Arabidopsis thaliana
  misc_feature (1)..(1757): Ceres Seq. ID no. 13606009
gtctccatcgctcgtttgtttcttcttcagccatatcggaaaaaacgatatccgacgagccattcggtgtttgttccgagaagctccgatcgatctgtgttagggtttttctttttccgccttatgaatctctctatcgcggtttcattagattcagtttaactcgagtgatgaaaccaatctccgtgctagagctctttgatcccgtggctggtaggatattacggcgtttgtagctctgtcgtcgtggatagagttagaacgacgaaatcagccttggtttcctaactgttatttggcatttcagtatctgaatttttgcaacaatgtctgagctaaaagagcgcctgcttcctccaagacctgcttcagctatgaacctcagagatgcttctgtgactcggccttctgcttctggaagaccaccccttcttggagttgatgtcttgggtctgaagaagcgtggacaaggcctacgctcttggattcgtgttgatacttctggtaatactcaggtcatggaggttgacaagttcactatgatgcgtaggtgtgacttacccgcccgtgatttaaggctgcttgatcccttattcgtgtatccctctactatcctaggccgagagaaggctattgttgtcaacttagagcagatccgttgtattattactgcagacgaagttctgcttctgaattcccttgacaactacgtgctgcgctatgttgttgagttgcagcagagactaaagactagtagtgtaggtgagatgtggcagcaggaaaattcccagttgagtaggaggaggagcaggagttttgacaatgcttttgagaattcatcccctgattatttacctttcgagtttagagctcttgaaatagcccttgaagctgcttgtacgtttctcgattcccaggcttcagagttggagattgaggcatacccgttattagatgagcttacctcaaagatcagtacactaaacttggagcgtgtgcgtagactaaagagcaggcttgtagcactgacaagaagagttcagaaggttcgggatgagatcgagcagctaatggatgatgatggagatatggcagaaatgtatctaacagagaagaagaggagaatggaaggatctatgtacggtgaccagtccttattgggttacaggtcaaatgatggtctatctgtttctgcaccggtgtctcctgtttcttctccacctgattcccgaagacttgataaaagcttgagcattgcgaggagtcggcatgacagtgcaaggagttctgaaggtgcagagaatatagaagagctagagatgttgctggaagcttactttgtcgtcattgatagtactctaaacaagttgacatcgttaaaggagtacattgatgacactgaagatttcattaacattcaactggataatgtgcggaatcagctgatccagttcgagttgcttctgacgactgcaacgtttgttgtagccatatttggggtcgttgctgggatctttgggatgaactttgagatagacttcttcaatcagccaggtgcattcagatgggtactcataattactggagtatgtggctttgtgatattttcggcattcgtctggttcttcaagtacagaagactcatgcctctataagaagagagacatgaatgtgctccccagaaagtagacatcaacttatattgttatgttgcttacagatattaatgatttgtttcctttacacaatggaatctt

SEQ ID NO: 100747 - protein, 442 aa, Arabidopsis thaliana; identical to SEQ ID NO: 76969
  peptide (1)..(442): Ceres Seq. ID no. 13606010
  misc_feature (1)..(442): Homolog of NCBI NO: 18394312 NR Description: expressed protein [Arabidopsis thaliana]
  misc_feature (1)..(442): Homolog of NCBI NO: 21553824 NR Description: unknown [Arabidopsis thaliana]
  misc_feature (1)..(442): Homolog of NCBI NO: 18412911 NR Description: expressed protein [Arabidopsis thaliana]
  misc_feature (174)..(442): Homolog of NCBI NO: 38345033 NR Description: OSJNBa0029H02.17 [Oryza sativa (japonica
  misc_feature (5)..(140): Homolog of NCBI NO: 38345033 NR Description: OSJNBa0029H02.17 [Oryza sativa (japonica
  misc_feature (311)..(440): Homolog of NCBI NO: 30685422 NR Description: expressed protein [Arabidopsis thaliana]
  misc_feature (152)..(270): Homolog of NCBI NO: 30685422 NR Description: expressed protein [Arabidopsis thaliana]
  misc_feature (42)..(140): Homolog of NCBI NO: 30685422 NR Description: expressed protein [Arabidopsis thaliana]
  misc_feature (1)..(440): Homolog of NCBI NO: 18411070 NR Description: expressed protein [Arabidopsis thaliana] AT3g58970/F17J16_20 [Arabidopsis thaliana]
  misc_feature (114)..(442): Homolog of NCBI NO: 15227679 NR Description: MRS2-5 protein [Arabidopsis thaliana]

SEQ ID NO: 100748 - protein, 426 aa, Arabidopsis thaliana; identical to SEQ ID NO: 76970
  peptide (1)..(426): Ceres Seq. ID no. 13606011
  misc_feature (1)..(426): Homolog of NCBI NO: 18394312 NR Description: expressed protein [Arabidopsis thaliana]
  misc_feature (1)..(426): Homolog of NCBI NO: 21553824 NR Description: unknown [Arabidopsis thaliana]
  misc_feature (1)..(426): Homolog of NCBI NO: 18412911 NR Description: expressed protein [Arabidopsis thaliana]
  misc_feature (158)..(426): Homolog of NCBI NO: 38345033 NR Description: OSJNBa0029H02.17 [Oryza sativa (japonica
  misc_feature (1)..(124): Homolog of NCBI NO: 38345033 NR Description: OSJNBa0029H02.17 [Oryza sativa (japonica
  misc_feature (295)..(424): Homolog of NCBI NO: 30685422 NR Description: expressed protein [Arabidopsis thaliana]
  misc_feature (136)..(254): Homolog of NCBI NO: 30685422 NR Description: expressed protein [Arabidopsis thaliana]
  misc_feature (26)..(124): Homolog of NCBI NO: 30685422 NR Description: expressed protein [Arabidopsis thaliana]
  misc_feature (1)..(424): Homolog of NCBI NO: 18411070 NR Description: expressed protein [Arabidopsis thaliana] AT3g58970/F17J16_20 [Arabidopsis thaliana]
  misc_feature (98)..(426): Homolog of NCBI NO: 15227679 NR Description: MRS2-5 protein [Arabidopsis thaliana]

SEQ ID NO: 100749 - protein, 378 aa, Arabidopsis thaliana; identical to SEQ ID NO: 76971
  peptide (1)..(378): Ceres Seq. ID no. 13606012
  misc_feature (1)..(378): Homolog of NCBI NO: 18394312 NR Description: expressed protein [Arabidopsis thaliana]
  misc_feature (1)..(378): Homolog of NCBI NO: 21553824 NR Description: unknown [Arabidopsis thaliana]
  misc_feature (1)..(378): Homolog of NCBI NO: 18412911 NR Description: expressed protein [Arabidopsis thaliana]
  misc_feature (110)..(378): Homolog of NCBI NO: 38345033 NR Description: OSJNBa0029H02.17 [Oryza sativa (japonica
  misc_feature (1)..(76): Homolog of NCBI NO: 38345033 NR Description: OSJNBa0029H02.17 [Oryza sativa (japonica
  misc_feature (247)..(376): Homolog of NCBI NO: 30685422 NR Description: expressed protein [Arabidopsis thaliana]
  misc_feature (88)..(206): Homolog of NCBI NO: 30685422 NR Description: expressed protein [Arabidopsis thaliana]
  misc_feature (1)..(76): Homolog of NCBI NO: 30685422 NR Description: expressed protein [Arabidopsis thaliana]
  misc_feature (1)..(376): Homolog of NCBI NO: 18411070 NR Description: expressed protein [Arabidopsis thaliana] AT3g58970/F17J16_20 [Arabidopsis thaliana]
  misc_feature (50)..(378): Homolog of NCBI NO: 15227679 NR Description: MRS2-5 protein [Arabidopsis thaliana]

SEQ ID NO: 100750 - DNA, 2331 bp, Arabidopsis thaliana
  misc_feature (1)..(2331): Ceres Seq. ID no. 13606013
  misc_feature: MA Experiment ID: 20000307 Result: Down-regulated in Transcription
  misc_feature: MA Experiment 20000307 PARAMETER Experiment Name: At_Germinating_Seeds_Sub_P Parameter: Age (hr) Value: 24 vs. 0
  misc_feature: MA Experiment 20000307 PARAMETER Experiment Name: At_Germinating_Seeds_Sub_P Parameter: Organism Value: A. thaliana
  misc_feature: MA Experiment 20000307 PARAMETER Experiment Name: At_Germinating_Seeds_Sub_P Parameter: Plant Line Value: WS
  misc_feature: MA Experiment 20000307 PARAMETER Experiment Name: At_Germinating_Seeds_Sub_P Parameter: Tissue Value: Germinating Seeds
  misc_feature: MA Experiment ID: 20000315 Result: Down-regulated in Transcription
  misc_feature: MA Experiment 20000315 PARAMETER Experiment Name: At_14day_Shoots-Roots_Sub_P Parameter: Age (day) Value: 14
  misc_feature: MA Experiment 20000315 PARAMETER Experiment Name: At_14day_Shoots-Roots_Sub_P Parameter: Organism Value: A. thaliana
  misc_feature: MA Experiment 20000315 PARAMETER Experiment Name: At_14day_Shoots-Roots_Sub_P Parameter: Plant Line Value: WS
  misc_feature: MA Experiment 20000315 PARAMETER Experiment Name: At_14day_Shoots-Roots_Sub_P Parameter: Tissue Value: Shoots vs. Whole Plant
  misc_feature: MA Experiment ID: 20000328 Result: Up-regulated in Transcription
  misc_feature: MA Experiment 20000328 PARAMETER Experiment Name: At_42deg_Heat_Sub_P Parameter: Age (day) Value: 14
  misc_feature: MA Experiment 20000328 PARAMETER Experiment Name: At_42deg_Heat_Sub_P Parameter: Organism Value: A. thaliana
  misc_feature: MA Experiment 20000328 PARAMETER Experiment Name: At_42deg_Heat_Sub_P Parameter: Plant Line Value: WS
  misc_feature: MA Experiment 20000328 PARAMETER Experiment Name: At_42deg_Heat_Sub_P Parameter: Temperature (deg C) Value: 42 vs. 22
  misc_feature: MA Experiment 20000328 PARAMETER Experiment Name: At_42deg_Heat_Sub_P Parameter: Timepoint (hr) Value: 6
  misc_feature: MA Experiment 20000328 PARAMETER Experiment Name: At_42deg_Heat_Sub_P Parameter: Tissue Value: Aerial
  misc_feature: MA Experiment ID: 20000346 Result: Up-regulated in Transcription
  misc_feature: MA Experiment 20000346 PARAMETER Experiment Name: At_2mM_SA_Sub_P Parameter: Age (day) Value: 14
  misc_feature: MA Experiment 20000346 PARAMETER Experiment Name: At_2mM_SA_Sub_P Parameter: Organism Value: A. thaliana
  misc_feature: MA Experiment 20000346 PARAMETER Experiment Name: At_2mM_SA_Sub_P Parameter: Plant Line Value: WS
  misc_feature: MA Experiment 20000346 PARAMETER Experiment Name: At_2mM_SA_Sub_P Parameter: Timepoint (hr) Value: 1
  misc_feature: MA Experiment 20000346 PARAMETER Experiment Name: At_2mM_SA_Sub_P Parameter: Tissue Value: Aerial
  misc_feature: MA Experiment 20000346 PARAMETER Experiment Name: At_2mM_SA_Sub_P Parameter: Treatment Value: 2mM SA vs. No Treatment
  misc_feature: MA Experiment ID: 20000347 Result: Up-regulated in Transcription
  misc_feature: MA Experiment 20000347 PARAMETER Experiment Name: At_2mM_SA_Sub_P Parameter: Age (day) Value: 14
  misc_feature: MA Experiment 20000347 PARAMETER Experiment Name: At_2mM_SA_Sub_P Parameter: Organism Value: A. thaliana
  misc_feature: MA Experiment 20000347 PARAMETER Experiment Name: At_2mM_SA_Sub_P Parameter: Plant Line Value: WS
  misc_feature: MA Experiment 20000347 PARAMETER Experiment Name: At_2mM_SA_Sub_P Parameter: Timepoint (hr) Value: 6
  misc_feature: MA Experiment 20000347 PARAMETER Experiment Name: At_2mM_SA_Sub_P Parameter: Tissue Value: Aerial
  misc_feature: MA Experiment 20000347 PARAMETER Experiment Name: At_2mM_SA_Sub_P Parameter: Treatment Value: 2mM SA vs. No Treatment
ggtacgtttgcgcgatttctccacctttccacaatcccctgggttgtgccacgaccttttttctcgaaatgtctcgttcctctcgtcggattcgtatatatagcttcttccatcgtttccgattcttcatcaaacagataaacaaacaaaagaaatcgaaaaacctcacttccaatttcattcaattactgaagcttttttttagcaacaatggcgacgaaatcagagaaagctattggtatcgatctcggcactacatacagttgtgtcggagtttggatgaatgatcgtgtggagatcattccgaacgatcagggaaaccgtacgacgccgtcgtacgtcgccttcactgatactgagcggctgatcggagacgcggcaaagaatcaagtggctttgaatcctcagaacactgtattcgatgcgaaacgtctcatcggaaggaagttctctgatccttctgttcagagtgacatactccactggccgttcaaggttgtttccggccccggtgagaagccgatgatagtcgtttcgtataagaatgaagagaagcagttttctcctgaggaaatatcttccatggtgttggtgaagatgaaggaagtcgctgaggctttcttaggtcgcacagttaaaaacgccgttgtaacggttccggcgtattttaacgattcgcagagacaggctacgaaggacgccggagctatctctgggcttaatgttttgaggataatcaatgagccgactgctgcagctatagcttatggtttggataagaagggtacgaaggccggtgagaagaacgttttgattttcgatctcggtggtggaacttttgatgtttcgctgttgacgattgaagaaggtgtctttgaagtgaaagctactgctggagatactcatcttggtggtgaagactttgacaacagacttgtgaaccatttcgttgcggagtttaggaggaaacacaagaaggatattgctgggaatgcgagagctcttaggaggctaaggacagcttgtgagagagcaaagagaacactttcgtccacggctcagacgactattgagattgattctctgcacgagggtattgacttctatgcgacgatatcacgtgcaaggtttgaggagatgaacatggatttgttcaggaaatgtatggatcctgtggagaaagttcttaaagacgccaagctcgacaagagcagtgtgcacgatgttgttctggttggagggtcgacgaggattccgaaaattcaacagcttttgcaagatttctttaatgggaaggagttatgcaagagcataaaccctgatgaagctgttgcctatggagctgcggttcaggctgcgattcttacaggtgaaggaagtgaaaaggtccaggatcttctgcttcttgatgttgctccgcttagccttggacttgagacagcaggtggggtcatgactgtgttaattccaagaaacacgacggttccttgtaagaaggagcaagtgttctctacgtatgcagacaatcaaccaggcgttctgatccaagtctacgaaggagaacgtgcaaggaccagagataacaaccttctcggaactttcgagctcaagggcattcctcctgctccacgtggggttcctcaaatcaatgtttgcttcgacattgacgcgaatgggatcttaaatgtgtcggctgaggataaaaccgctggtgtgaagaaccagatcacgatcaccaacgacaaaggaaggttgagtaaagaggagatagagaagatggtgcaagatgctgagaagtacaaggctgaggatgagcaagtgaagaagaaggtggaggccaagaattcgcttgagaactatgcttacaacatgagaaacactatcaaggatgagaaactcgcacagaaactaactcaagaggataagcagaagattgagaaggcgattgatgaaacaattgaatggatcgaaggaaaccagctggcggaagttgatgagtttgagtacaagttgaaagagttagaaggtatttgcaacccaatcatctcaaagatgtatcagggtggtgctgctgctggaggtatgccgacagatggtgatttcagtagctcaggtgctgctggaggtcccaagatcgaagaggtggattagagcgtgtttagtgtgttaagacgaaagagtggctttggaccattagcgagtcttttctttgtattgtgtcaaatagtgttgtgtactcataggtgttttgctagtgaacgatagttgtatgctttacatatttcagctgtttcagttgtttcgagtaataaagtgatatacttttttctc

SEQ ID NO: 100751 - protein, 646 aa, Arabidopsis thaliana
  peptide (1)..(646): Ceres Seq. ID no. 13606014
  misc_feature (1)..(646): Homolog of NCBI NO: 1076529 NR Description: dnaK-type molecular chaperone HSP71.2 - garden >gi|562006|gb|AAA82975.1| PsHSP71.2 >gi|1771479|emb|CAA67867.1|
MATKSEKAIGIDLGTTYSCVGVWMNDRVEIIPNDQGNRTTPSYVAFTDTERLIGDAAKNQVALNPQNTVFDAKRLIGRKFSDPSVQSDILHWPFKVVSGPGEKPMIVVSYKNEEKQFSPEEISSMVLVKMKEVAEAFLGRTVKNAVVTVPAYFNDSQRQATKDAGAISGLNVLRIINEPTAAAIAYGLDKKGTKAGEKNVLIFDLGGGTFDVSLLTIEEGVFEVKATAGDTHLGGEDFDNRLVNHFVAEFRRKHKKDIAGNARALRRLRTACERAKRTLSSTAQTTIEIDSLHEGIDFYATISRARFEEMNMDLFRKCMDPVEKVLKDAKLDKSSVHDVVLVGGSTRIPKIQQLLQDFFNGKELCKSINPDEAVAYGAAVQAAILTGEGSEKVQDLLLLDVAPLSLGLETAGGVMTVLIPRNTTVPCKKEQVFSTYADNQPGVLIQVYEGERARTRDNNLLGTFELKGIPPAPRGVPQINVCFDIDANGILNVSAEDKTAGVKNQITITNDKGRLSKEEIEKMVQDAEKYKAEDEQVKKKVEAKNSLENYAYNMRNTIKDEKLAQKLTQEDKQKIEKAIDETIEWIEGNQLAEVDEFEYKLKELEGICNPIISKMYQGGAAAGGMPTDGDFSSSGAAGGPKIEEVD

SEQ ID NO: 100752 - protein, 623 aa, Arabidopsis thaliana
  peptide (1)..(623): Ceres Seq. ID no. 13606015
  misc_feature (1)..(623): Homolog of NCBI NO: 1076529 NR Description: dnaK-type molecular chaperone HSP71.2 - garden >gi|562006|gb|AAA82975.1| PsHSP71.2 >gi|1771479|emb|CAA67867.1|
MNDRVEIIPNDQGNRTTPSYVAFTDTERLIGDAAKNQVALNPQNTVFDAKRLIGRKFSDPSVQSDILHWPFKVVSGPGEKPMIVVSYKNEEKQFSPEEISSMVLVKMKEVAEAFLGRTVKNAVVTVPAYFNDSQRQATKDAGAISGLNVLRIINEPTAAAIAYGLDKKGTKAGEKNVLIFDLGGGTFDVSLLTIEEGVFEVKATAGDTHLGGEDFDNRLVNHFVAEFRRKHKKDIAGNARALRRLRTACERAKRTLSSTAQTTIEIDSLHEGIDFYATISRARFEEMNMDLFRKCMDPVEKVLKDAKLDKSSVHDVVLVGGSTRIPKIQQLLQDFFNGKELCKSINPDEAVAYGAAVQAAILTGEGSEKVQDLLLLDVAPLSLGLETAGGVMTVLIPRNTTVPCKKEQVFSTYADNQPGVLIQVYEGERARTRDNNLLGTFELKGIPPAPRGVPQINVCFDIDANGILNVSAEDKTAGVKNQITITNDKGRLSKEEIEKMVQDAEKYKAEDEQVKKKVEAKNSLENYAYNMRNTIKDEKLAQKLTQEDKQKIEKAIDETIEWIEGNQLAEVDEFEYKLKELEGICNPIISKMYQGGAAAGGMPTDGDFSSSGAAGGPKIEEVD

SEQ ID NO: 100753 - protein, 542 aa, Arabidopsis thaliana
  peptide (1)..(542): Ceres Seq. ID no. 13606016
  misc_feature (1)..(542): Homolog of NCBI NO: 1076529 NR Description: dnaK-type molecular chaperone HSP71.2 - garden >gi|562006|gb|AAA82975.1| PsHSP71.2 >gi|1771479|emb|CAA67867.1|
MIVVSYKNEEKQFSPEEISSMVLVKMKEVAEAFLGRTVKNAVVTVPAYFNDSQRQATKDAGAISGLNVLRIINEPTAAAIAYGLDKKGTKAGEKNVLIFDLGGGTFDVSLLTIEEGVFEVKATAGDTHLGGEDFDNRLVNHFVAEFRRKHKKDIAGNARALRRLRTACERAKRTLSSTAQTTIEIDSLHEGIDFYATISRARFEEMNMDLFRKCMDPVEKVLKDAKLDKSSVHDVVLVGGSTRIPKIQQLLQDFFNGKELCKSINPDEAVAYGAAVQAAILTGEGSEKVQDLLLLDVAPLSLGLETAGGVMTVLIPRNTTVPCKKEQVFSTYADNQPGVLIQVYEGERARTRDNNLLGTFELKGIPPAPRGVPQINVCFDIDANGILNVSAEDKTAGVKNQITITNDKGRLSKEEIEKMVQDAEKYKAEDEQVKKKVEAKNSLENYAYNMRNTIKDEKLAQKLTQEDKQKIEKAIDETIEWIEGNQLAEVDEFEYKLKELEGICNPIISKMYQGGAAAGGMPTDGDFSSSGAAGGPKIEEVD

SEQ ID NO: 100754 - DNA, 2552 bp, Arabidopsis thaliana
  misc_feature (1)..(2552): Ceres Seq. ID no. 13606021
  misc_feature: MA Experiment ID: 20000315 Result: Down-regulated in Transcription
  misc_feature: MA Experiment 20000315 PARAMETER Experiment Name: At_14day_Shoots-Roots_Sub_P Parameter: Age (day) Value: 14
  misc_feature: MA Experiment 20000315 PARAMETER Experiment Name: At_14day_Shoots-Roots_Sub_P Parameter: Organism Value: A. thaliana
  misc_feature: MA Experiment 20000315 PARAMETER Experiment Name: At_14day_Shoots-Roots_Sub_P Parameter: Plant Line Value: WS
  misc_feature: MA Experiment 20000315 PARAMETER Experiment Name: At_14day_Shoots-Roots_Sub_P Parameter: Tissue Value: Shoots vs. Whole Plant
  misc_feature: MA Experiment ID: 20000355 Result: Down-regulated in Transcription
  misc_feature: MA Experiment 20000355 PARAMETER Experiment Name: At_Siliques_Sub_P Parameter: Age (day) Value: 21
  misc_feature: MA Experiment 20000355 PARAMETER Experiment Name: At_Siliques_Sub_P Parameter: Organism Value: A. thaliana
  misc_feature: MA Experiment 20000355 PARAMETER Experiment Name: At_Siliques_Sub_P Parameter: Plant Line Value: WS
  misc_feature: MA Experiment 20000355 PARAMETER Experiment Name: At_Siliques_Sub_P Parameter: Tissue Value: Less Than 5mm Siliques vs. Whole Plant
  misc_feature: MA Experiment ID: 20000440 Result: Down-regulated in Transcription
  misc_feature: MA Experiment 20000440 PARAMETER Experiment Name: At_Closed-Flower__Sub_P Parameter: Tissue Value: Closed Flower vs. Whole Plant
  misc_feature: MA Experiment ID: 20000634 Result: Up-regulated in Transcription
  misc_feature: MA Experiment 20000634 PARAMETER Experiment Name: At_10percent_PEG_Sub_P Parameter: Age (day) Value: 12
  misc_feature: MA Experiment 20000634 PARAMETER Experiment Name: At_10percent_PEG_Sub_P Parameter: Organism Value: A. thaliana
  misc_feature: MA Experiment 20000634 PARAMETER Experiment Name: At_10percent_PEG_Sub_P Parameter: Plant Line Value: WS
  misc_feature: MA Experiment 20000634 PARAMETER Experiment Name: At_10percent_PEG_Sub_P Parameter: Timepoint (day) Value: 12
  misc_feature: MA Experiment 20000634 PARAMETER Experiment Name: At_10percent_PEG_Sub_P Parameter: Tissue Value: Whole Plant
  misc_feature: MA Experiment 20000634 PARAMETER Experiment Name: At_10percent_PEG_Sub_P Parameter: Treatment Value: 10% PEG vs. No Treatment
acgcatcatccatcttatctcatttctgacattttcgtctatgcagagtcttgatttttgttttctcccttcattaaacaacattactagaatcaaaagatcagatagagctggcaagttgagagaacaagaacaagatcagtatgaagacagagactcacaaccgtcaatgcattccactagcgatctctgtcctatctctgttcatcaatggcgtctcatcagcaagacaacctccagatcggtgtaacagagtctgcggagaaatatcaattcctttcccgtttggcatcggtgggaaagattgctatctaaacccgtggtacgaggttgtctgtaacagcacaaactctgttccgttcctctcaaggatcaacagagaattggtgaacatctctctcaatggagttgtccacatcaaagctcccgtaacttcctccggctgttctacaggaacatctcagccacttacaccgccgcctttaaacgttgctggccaaggcagcccctatttcctcacggacaagaacctactcgtggcggttggttgcaaattcaaggctgttatggcgggtattacatcgcagatcaccagttgtgagtcgagttgtaacgagagaaacagtagcagccaagaaggaagaaacaaaatctgcaatggttataaatgttgccagacgaggataccagaagggcagccgcaagtaatcagtgtggatatagagatccctcaaggtaacaacacaacaggagaaggaggatgcagagttgcgtttttgacgagcgacaagtattcaagtttaaatgttacagagccagaaaagtttcatggtcatggatacgcggcggtcgagcttggatggttctttgatacttccgattctcgtgatacacaacccataagttgtaaaaatgcgtcagatacaacaccgtacacttccgatacgaggtgtagttgctcatacggctacttttctggattcagctatagggactgctactgtaactccccaggttataaagggaatccgttccttccaggtggttgtgtagacgtggatgaatgtaaactagatataggacgcaaccagtgtaaagatcaaagctgtgtgaatctgcccggttggtttgactgccagcccaagaaaccagagcagctcaagcgggtgattcaaggtgttcttataggttcagcactgttgcttttcgccttcggaatcttcgggttgtacaagttcgtacagaagcggaggaaactaatccgaatgaggaagttcttcagacgtaatggaggtatgttgttaaaacaacagttagctagaaaagaaggcaatgtagagatgtcaagaatattcagctcacatgagttggagaaagctactgataacttcaacaagaatagggttcttgggcaaggaggtcaaggtacagtgtataagggaatgctcgttgatggtagaatcgtcgcagtaaaaaggtcgaaagctgtggatgaagatagggtagaagagttcatcaatgaagttgttgttcttgcgcagatcaatcatagaaatattgttaaacttttggggtgttgtcttgaaacggaagttccagtcttagtttatgagtttgttccaaatggagacttatgcaagcgtcttcatgatgaatctgatgattacacaatgacatgggaggtgcgtcttcacattgctatagagattgcaggagcactttcttatttgcattctgctgcatctttccccatatatcatagagatatcaagactactaatatactcttagatgagagaaaccgagctaaggtgtcggatttcggaacttcaagatcagtaactatagatcaaactcacttgacaactcaagttgcaggcacttttggatatgtggatccagagtactttcaatcaagcaagtttacggaaaaaagtgatgtttatagttttggagttgtccttgtggagctcttaaccggagaaaaaccttcctcccgtgtccggtctgaagaaaacaggggccttgcagctcactttgtcgaagccgtgaaagagaacagagtgcttgacatagttgatgatcggatcaaagatgaatgcaacatggaccaagtaatgtcagtggcaaatctagctagaaggtgtttaaaccgaaaagggaagaagaggccaaacatgagagaggtttcaattgagctggagatgattcgttcatcacattatgattcaggaattcatatagaggacgacgatgaggaagatgatcaagccatggaactcaactttaacgacacttgggaggttggtgcgactgctccagcctccatgtttaacaatgcatcccccacgtctgatgctgagcctctggtgcctttacgaacatggtaatgatcaactcaaaacactgcatatgtatactctcatctgatgtaaactttcgataatgaatatttggttttcaccatgtaatataacacacaaattgcattatattttcaagaagaaaaataatgttttagtacaagaacaataaatggggcttcaaccttc

SEQ ID NO: 100755 - protein, 748 aa, Arabidopsis thaliana
  peptide (1)..(748): Ceres Seq. ID no. 13606022
  misc_feature (299)..(748): Homolog of NCBI NO: 25287660 NR Description: hypothetical protein T24D18.23 [imported] - thaliana >gi|6587819|gb|AAF18510.1|AC010924_23 Contains
  misc_feature (1)..(276): Homolog of NCBI NO: 25287660 NR Description: hypothetical protein T24D18.23 [imported] - thaliana >gi|6587819|gb|AAF18510.1|AC010924_23 Contains
  misc_feature (15)..(748): Homolog of NCBI NO: 15219445 NR Description: WAK-like kinase (WLK) [Arabidopsis thaliana]
  misc_feature (177)..(748): Homolog of NCBI NO: 30699443 NR Description: WAK-like kinase (WLK) [Arabidopsis thaliana]
  misc_feature (15)..(139): Homolog of NCBI NO: 30699443 NR Description: WAK-like kinase (WLK) [Arabidopsis thaliana]
  misc_feature (341)..(748): Homolog of NCBI NO: 25405037 NR Description: protein F20B17.10 [imported] - Arabidopsis >gi|7715604|gb|AAF68122.1|AC010793_17 F20B17.10 [Arabidopsis
  misc_feature (53)..(387): Homolog of NCBI NO: 25405037 NR Description: protein F20B17.10 [imported] - Arabidopsis >gi|7715604|gb|AAF68122.1|AC010793_17 F20B17.10 [Arabidopsis
  misc_feature (1)..(714): Homolog of NCBI NO: 15219132 NR Description: WAK-like kinase (WLK) [Arabidopsis thaliana]
  misc_feature (35)..(714): Homolog of NCBI NO: 15219143 NR Description: WAK-like kinase (WLK) [Arabidopsis thaliana]
  misc_feature (2)..(621): Homolog of NCBI NO: 15219130 NR Description: WAK-like kinase (WLK) [Arabidopsis thaliana]
MKTETHNRQCIPLAISVLSLFINGVSSARQPPDRCNRVCGEISIPFPFGIGGKDCYLNPWYEVVCNSTNSVPFLSRINRELVNISLNGVVHIKAPVTSSGCSTGTSQPLTPPPLNVAGQGSPYFLTDKNLLVAVGCKFKAVMAGITSQITSCESSCNERNSSSQEGRNKICNGYKCCQTRIPEGQPQVISVDIEIPQGNNTTGEGGCRVAFLTSDKYSSLNVTEPEKFHGHGYAAVELGWFFDTSDSRDTQPISCKNASDTTPYTSDTRCSCSYGYFSGFSYRDCYCNSPGYKGNPFLPGGCVDVDECKLDIGRNQCKDQSCVNLPGWFDCQPKKPEQLKRVIQGVLIGSALLLFAFGIFGLYKFVQKRRKLIRMRKFFRRNGGMLLKQQLARKEGNVEMSRIFSSHELEKATDNFNKNRVLGQGGQGTVYKGMLVDGRIVAVKRSKAVDEDRVEEFINEVVVLAQINHRNIVKLLGCCLETEVPVLVYEFVPNGDLCKRLHDESDDYTMTWEVRLHIAIEIAGALSYLHSAASFPIYHRDIKTTNILLDERNRAKVSDFGTSRSVTIDQTHLTTQVAGTFGYVDPEYFQSSKFTEKSDVYSFGVVLVELLTGEKPSSRVRSEENRGLAAHFVEAVKENRVLDIVDDRIKDECNMDQVMSVANLARRCLNRKGKKRPNMREVSIELEMIRSSHYDSGIHIEDDDEEDDQAMELNFNDTWEVGATAPASMFNNASPTSDAEPLVPLRTW

SEQ ID NO: 100756 - protein, 607 aa, Arabidopsis thaliana
  peptide (1)..(607): Ceres Seq. ID no. 13606023
  misc_feature (158)..(607): Homolog of NCBI NO: 25287660 NR Description: hypothetical protein T24D18.23 [imported] - thaliana >gi|6587819|gb|AAF18510.1|AC010924_23 Contains
  misc_feature (1)..(135): Homolog of NCBI NO: 25287660 NR Description: hypothetical protein T24D18.23 [imported] - thaliana >gi|6587819|gb|AAF18510.1|AC010924_23 Contains
  misc_feature (1)..(607): Homolog of NCBI NO: 15219445 NR Description: WAK-like kinase (WLK) [Arabidopsis thaliana]
  misc_feature (36)..(607): Homolog of NCBI NO: 30699443 NR Description: WAK-like kinase (WLK) [Arabidopsis thaliana]
  misc_feature (200)..(607): Homolog of NCBI NO: 25405037 NR Description: protein F20B17.10 [imported] - Arabidopsis >gi|7715604|gb|AAF68122.1|AC010793_17 F20B17.10 [Arabidopsis
  misc_feature (1)..(246): Homolog of NCBI NO: 25405037 NR Description: protein F20B17.10 [imported] - Arabidopsis >gi|7715604|gb|AAF68122.1|AC010793_17 F20B17.10 [Arabidopsis
  misc_feature (1)..(573): Homolog of NCBI NO: 15219132 NR Description: WAK-like kinase (WLK) [Arabidopsis thaliana]
  misc_feature (1)..(573): Homolog of NCBI NO: 15219143 NR Description: WAK-like kinase (WLK) [Arabidopsis thaliana]
  misc_feature (1)..(480): Homolog of NCBI NO: 15219130 NR Description: WAK-like kinase (WLK) [Arabidopsis thaliana]
  misc_feature (124)..(164): Homolog of NCBI NO: 25287660 NR Description: hypothetical protein T24D18.23 [imported] - thaliana >gi|6587819|gb|AAF18510.1|AC010924_23 Contains
MAGITSQITSCESSCNERNSSSQEGRNKICNGYKCCQTRIPEGQPQVISVDIEIPQGNNTTGEGGCRVAFLTSDKYSSLNVTEPEKFHGHGYAAVELGWFFDTSDSRDTQPISCKNASDTTPYTSDTRCSCSYGYFSGFSYRDCYCNSPGYKGNPFLPGGCVDVDECKLDIGRNQCKDQSCVNLPGWFDCQPKKPEQLKRVIQGVLIGSALLLFAFGIFGLYKFVQKRRKLIRMRKFFRRNGGMLLKQQLARKEGNVEMSRIFSSHELEKATDNFNKNRVLGQGGQGTVYKGMLVDGRIVAVKRSKAVDEDRVEEFINEVVVLAQINHRNIVKLLGCCLETEVPVLVYEFVPNGDLCKRLHDESDDYTMTWEVRLHIAIEIAGALSYLHSAASFPIYHRDIKTTNILLDERNRAKVSDFGTSRSVTIDQTHLTTQVAGTFGYVDPEYFQSSKFTEKSDVYSFGVVLVELLTGEKPSSRVRSEENRGLAAHFVEAVKENRVLDIVDDRIKDECNMDQVMSVANLARRCLNRKGKKRPNMREVSIELEMIRSSHYDSGIHIEDDDEEDDQAMELNFNDTWEVGATAPASMFNNASPTSDAEPLVPLRTW

SEQ ID NO: 100757 - protein, 374 aa, Arabidopsis thaliana
  peptide (1)..(374): Ceres Seq. ID no. 13606024
  misc_feature (1)..(374): Homolog of NCBI NO: 25287660 NR Description: hypothetical protein T24D18.23 [imported] - thaliana >gi|6587819|gb|AAF18510.1|AC010924_23 Contains
  misc_feature (1)..(374): Homolog of NCBI NO: 15219445 NR Description: WAK-like kinase (WLK) [Arabidopsis thaliana]
  misc_feature (1)..(374): Homolog of NCBI NO: 30699443 NR Description: WAK-like kinase (WLK) [Arabidopsis thaliana]
  misc_feature (1)..(374): Homolog of NCBI NO: 25405037 NR Description: protein F20B17.10 [imported] - Arabidopsis >gi|7715604|gb|AAF68122.1|AC010793_17 F20B17.10 [Arabidopsis
  misc_feature (1)..(13): Homolog of NCBI NO: 25405037 NR Description: protein F20B17.10 [imported] - Arabidopsis >gi|7715604|gb|AAF68122.1|AC010793_17 F20B17.10 [Arabidopsis
  misc_feature (1)..(340): Homolog of NCBI NO: 15219132 NR Description: WAK-like kinase (WLK) [Arabidopsis thaliana]
  misc_feature (1)..(340): Homolog of NCBI NO: 15219143 NR Description: WAK-like kinase (WLK) [Arabidopsis thaliana]
  misc_feature (1)..(247): Homolog of NCBI NO: 15219130 NR Description: WAK-like kinase (WLK) [Arabidopsis thaliana]
  misc_feature (1)..(366): Homolog of NCBI NO: 25405037 NR Description: protein F20B17.10 [imported] - Arabidopsis >gi|7715604|gb|AAF68122.1|AC010793_17 F20B17.10 [Arabidopsis
  misc_feature (1)..(373): Homolog of NCBI NO: 7486495 NR Description: hypothetical protein F6E21.30 - Arabidopsis >gi|7270013|emb|CAB79829.1| putative protein [Arabidopsis
MRKFFRRNGGMLLKQQLARKEGNVEMSRIFSSHELEKATDNFNKNRVLGQGGQGTVYKGMLVDGRIVAVKRSKAVDEDRVEEFINEVVVLAQINHRNIVKLLGCCLETEVPVLVYEFVPNGDLCKRLHDESDDYTMTWEVRLHIAIEIAGALSYLHSAASFPIYHRDIKTTNILLDERNRAKVSDFGTSRSVTIDQTHLTTQVAGTFGYVDPEYFQSSKFTEKSDVYSFGVVLVELLTGEKPSSRVRSEENRGLAAHFVEAVKENRVLDIVDDRIKDECNMDQVMSVANLARRCLNRKGKKRPNMREVSIELEMIRSSHYDSGIHIEDDDEEDDQAMELNFNDTWEVGATAPASMFNNASPTSDAEPLVPLRTW

SEQ ID NO: 100758 - DNA, 778 bp, Arabidopsis thaliana
  misc_feature (1)..(778): Ceres Seq. ID no. 13606025
  misc_feature: MA Experiment ID: 20000182 Result: Up-regulated in Transcription
  misc_feature: MA Experiment 20000182 PARAMETER Experiment Name: At_2mM_SA_P Parameter: Age (day) Value: 14
  misc_feature: MA Experiment 20000182 PARAMETER Experiment Name: At_2mM_SA_P Parameter: Organism Value: A. thaliana
  misc_feature: MA Experiment 20000182 PARAMETER Experiment Name: At_2mM_SA_P Parameter: Plant Line Value: WS
  misc_feature: MA Experiment 20000182 PARAMETER Experiment Name: At_2mM_SA_P Parameter: Timepoint (hr) Value: 6
  misc_feature: MA Experiment 20000182 PARAMETER Experiment Name: At_2mM_SA_P Parameter: Tissue Value: Aerial
  misc_feature: MA Experiment 20000182 PARAMETER Experiment Name: At_2mM_SA_P Parameter: Treatment Value: 2mM SA vs. No Treatment
  misc_feature: MA Experiment ID: 20000185 Result: Down-regulated in Transcription
  misc_feature: MA Experiment 20000185 PARAMETER Experiment Name: At_Roots__P Parameter: Age (day) Value: 7 vs. 21
  misc_feature: MA Experiment 20000185 PARAMETER Experiment Name: At_Roots__P Parameter: Organism Value: A. thaliana
  misc_feature: MA Experiment 20000185 PARAMETER Experiment Name: At_Roots__P Parameter: Tissue Value: Roots vs. Whole Plant
  misc_feature: MA Experiment ID: 20000234 Result: Down-regulated in Transcription
  misc_feature: MA Experiment 20000234 PARAMETER Experiment Name: At_Siliques_P Parameter: Age (day) Value: 21
  misc_feature: MA Experiment 20000234 PARAMETER Experiment Name: At_Siliques_P Parameter: Organism Value: A. thaliana
  misc_feature: MA Experiment 20000234 PARAMETER Experiment Name: At_Siliques_P Parameter: Plant Line Value: WS
  misc_feature: MA Experiment 20000234 PARAMETER Experiment Name: At_Siliques_P Parameter: Tissue Value: Less Than 5mm Siliques vs. Whole Plant
  misc_feature: MA Experiment ID: 20000235 Result: Down-regulated in Transcription
  misc_feature: MA Experiment 20000235 PARAMETER Experiment Name: At_Siliques_P Parameter: Age (day) Value: 21
  misc_feature: MA Experiment 20000235 PARAMETER Experiment Name: At_Siliques_P Parameter: Organism Value: A. thaliana
  misc_feature: MA Experiment 20000235 PARAMETER Experiment Name: At_Siliques_P Parameter: Plant Line Value: WS
  misc_feature: MA Experiment 20000235 PARAMETER Experiment Name: At_Siliques_P Parameter: Tissue Value: 5-10mm Siliques vs. Whole Plant
  misc_feature: MA Experiment ID: 20000437 Result: Up-regulated in Transcription
  misc_feature: MA Experiment 20000437 PARAMETER Experiment Name: At_Drought_P Parameter: Age (day) Value: 8
  misc_feature: MA Experiment 20000437 PARAMETER Experiment Name: At_Drought_P Parameter: Organism Value: A. thaliana
  misc_feature: MA Experiment 20000437 PARAMETER Experiment Name: At_Drought_P Parameter: Plant Line Value: WS
  misc_feature: MA Experiment 20000437 PARAMETER Experiment Name: At_Drought_P Parameter: Timepoint (hr) Value: 24
  misc_feature: MA Experiment 20000437 PARAMETER Experiment Name: At_Drought_P Parameter: Tissue Value: Whole Plant
  misc_feature: MA Experiment 20000437 PARAMETER Experiment Name: At_Drought_P Parameter: Treatment Value: Drought vs. No Drought
  misc_feature: MA Experiment ID: 20000438 Result: Down-regulated in Transcription
  misc_feature: MA Experiment 20000438 PARAMETER Experiment Name: At_Shoots__P Parameter: Age (day) Value: 14
  misc_feature: MA Experiment 20000438 PARAMETER Experiment Name: At_Shoots__P Parameter: Tissue Value: Shoots vs. Whole Plant
  misc_feature: MA Experiment ID: 20000439 Result: Down-regulated in Transcription
  misc_feature: MA Experiment 20000439 PARAMETER Experiment Name: At_Roots__P Parameter: Age (day) Value: 14 vs. 21
  misc_feature: MA Experiment 20000439 PARAMETER Experiment Name: At_Roots__P Parameter: Organism Value: A. thaliana
  misc_feature: MA Experiment 20000439 PARAMETER Experiment Name: At_Roots__P Parameter: Tissue Value: Roots vs. Whole Plant
  misc_feature: MA Experiment ID: 20000453 Result: Up-regulated in Transcription
  misc_feature: MA Experiment 20000453 PARAMETER Experiment Name: At_100uM_ABA_P Parameter: Age (day) Value: 15
  misc_feature: MA Experiment 20000453 PARAMETER Experiment Name: At_100uM_ABA_P Parameter: Organism Value: A. thaliana
  misc_feature: MA Experiment 20000453 PARAMETER Experiment Name: At_100uM_ABA_P Parameter: Plant Line Value: WS
  misc_feature: MA Experiment 20000453 PARAMETER Experiment Name: At_100uM_ABA_P Parameter: Timepoint (hr) Value: 24
  misc_feature: MA Experiment 20000453 PARAMETER Experiment Name: At_100uM_ABA_P Parameter: Tissue Value: Aerial
  misc_feature: MA Experiment 20000453 PARAMETER Experiment Name: At_100uM_ABA_P Parameter: Treatment Value: 100uM ABA vs. No Treatment
  misc_feature: MA Experiment ID: 20000527 Result: Down-regulated in Transcription
  misc_feature: MA Experiment 20000527 PARAMETER Experiment Name: At_10percent_PEG_P Parameter: Age (day) Value: 20
  misc_feature: MA Experiment 20000527 PARAMETER Experiment Name: At_10percent_PEG_P Parameter: Organism Value: A. thaliana
  misc_feature: MA Experiment 20000527 PARAMETER Experiment Name: At_10percent_PEG_P Parameter: Plant Line Value: WS
  misc_feature: MA Experiment 20000527 PARAMETER Experiment Name: At_10percent_PEG_P Parameter: Timepoint (day) Value: 20
  misc_feature: MA Experiment 20000527 PARAMETER Experiment Name: At_10percent_PEG_P Parameter: Tissue Value: Whole Plant
  misc_feature: MA Experiment 20000527 PARAMETER Experiment Name: At_10percent_PEG_P Parameter: Treatment Value: 10percent PEG vs. No Treatment
  misc_feature: MA Experiment ID: 20001247 Result: Up-regulated in Transcription
  misc_feature: MA Experiment 20001247 PARAMETER Experiment Name: At_Far-red-induction_P Parameter: Age (day) Value: 7
  misc_feature: MA Experiment 20001247 PARAMETER Experiment Name: At_Far-red-induction_P Parameter: Light Value: Far-red vs. White
  misc_feature: MA Experiment 20001247 PARAMETER Experiment Name: At_Far-red-induction_P Parameter: Organism Value: A. thaliana
  misc_feature: MA Experiment 20001247 PARAMETER Experiment Name: At_Far-red-induction_P Parameter: Plant Line Value: Columbia
  misc_feature: MA Experiment 20001247 PARAMETER Experiment Name: At_Far-red-induction_P Parameter: Timepoint (hr) Value: 1
  misc_feature: MA Experiment 20001247 PARAMETER Experiment Name: At_Far-red-induction_P Parameter: Tissue Value: Whole Plant
  misc_feature: MA Experiment ID: 20001248 Result: Up-regulated in Transcription
  misc_feature: MA Experiment 20001248 PARAMETER Experiment Name: At_Far-red-induction_P Parameter: Age (day) Value: 7
  misc_feature: MA Experiment 20001248 PARAMETER Experiment Name: At_Far-red-induction_P Parameter: Light Value: Far-red vs. White
  misc_feature: MA Experiment 20001248 PARAMETER Experiment Name: At_Far-red-induction_P Parameter: Organism Value: A. thaliana
  misc_feature: MA Experiment 20001248 PARAMETER Experiment Name: At_Far-red-induction_P Parameter: Plant Line Value: Columbia
  misc_feature: MA Experiment 20001248 PARAMETER Experiment Name: At_Far-red-induction_P Parameter: Timepoint (hr) Value: 4
  misc_feature: MA Experiment 20001248 PARAMETER Experiment Name: At_Far-red-induction_P Parameter: Tissue Value: Whole Plant
  misc_feature: MA Experiment ID: 20001560 Result: Up-regulated in Transcription
  misc_feature: MA Experiment 20001560 PARAMETER Experiment Name: At_Drought_Soil_Dry_P Parameter: Age (day) Value: 28
  misc_feature: MA Experiment 20001560 PARAMETER Experiment Name: At_Drought_Soil_Dry_P Parameter: Organism Value: A. thaliana
  misc_feature: MA Experiment 20001560 PARAMETER Experiment Name: At_Drought_Soil_Dry_P Parameter: Plant Line Value: WS
  misc_feature: MA Experiment 20001560 PARAMETER Experiment Name: At_Drought_Soil_Dry_P Parameter: Post Timepoint (hr) Value: None
  misc_feature: MA Experiment 20001560 PARAMETER Experiment Name: At_Drought_Soil_Dry_P Parameter: Post-Treatment Value: None
  misc_feature: MA Experiment 20001560 PARAMETER Experiment Name: At_Drought_Soil_Dry_P Parameter: Timepoint (day) Value: 14
  misc_feature: MA Experiment 20001560 PARAMETER Experiment Name: At_Drought_Soil_Dry_P Parameter: Treatment Value: Drought vs. No Drought
  misc_feature: MA Experiment ID: 20001904 Result: Up-regulated in Transcription
  misc_feature: MA Experiment 20001904 PARAMETER Experiment Name: At_Drought_Reproduction_P Parameter: Age (day) Value: 37
  misc_feature: MA Experiment 20001904 PARAMETER Experiment Name: At_Drought_Reproduction_P Parameter: Organism Value: A. thaliana
  misc_feature: MA Experiment 20001904 PARAMETER Experiment Name: At_Drought_Reproduction_P Parameter: Plant Line Value: WS
  misc_feature: MA Experiment 20001904 PARAMETER Experiment Name: At_Drought_Reproduction_P Parameter: Timepoint (day) Value: 7
  misc_feature: MA Experiment 20001904 PARAMETER Experiment Name: At_Drought_Reproduction_P Parameter: Tissue Value: Rosettes
  misc_feature: MA Experiment 20001904 PARAMETER Experiment Name: At_Drought_Reproduction_P Parameter: Treatment Value: Drought vs. No Drought
  misc_feature: MA Experiment ID: 20001905 Result: Up-regulated in Transcription
  misc_feature: MA Experiment 20001905 PARAMETER Experiment Name: At_Drought_Reproduction_P Parameter: Age (day) Value: 40
  misc_feature: MA Experiment 20001905 PARAMETER Experiment Name: At_Drought_Reproduction_P Parameter: Organism Value: A. thaliana
  misc_feature: MA Experiment 20001905 PARAMETER Experiment Name: At_Drought_Reproduction_P Parameter: Plant Line Value: WS
  misc_feature: MA Experiment 20001905 PARAMETER Experiment Name: At_Drought_Reproduction_P Parameter: Timepoint (day) Value: 10
  misc_feature: MA Experiment 20001905 PARAMETER Experiment Name: At_Drought_Reproduction_P Parameter: Tissue Value: Rosettes
  misc_feature: MA Experiment 20001905 PARAMETER Experiment Name: At_Drought_Reproduction_P Parameter: Treatment Value: Drought vs. No Drought
gtagtgtaacatagtatttgatttgtatactaaaataaatgtaaaatttatcgggctgttgtacctggcaagtacaccatatgtgtactctctcctcaatgctctcgtcataatctttccatgtcttcttctctctatatatattacttaactctttctcactctctctaattttaaatttatctatcattagtttaaaccgccggagaacaaaaaatgaagcatctcatccgccgcctctctagagtcgccgactcatcctccgaattctccatccgccgttccacctcctccttccgcaaccgtcgcggtcaccatcgtctccacgcgccgccgcctccgtggtcaatatgtccagctagaagagtcaacaccgtccccgctggtcacgtacctgtctacgtcggcgaggagatggagaggttcgtggttagcgcagagcttatgaaccacccgatcttcgttggtttgctaaaccgatccgctcaagaatacggttacgctcagaaaggagttcttcatatcccttgccacgtcatcgtgtttgagcgcgtggtggaaacgctccggttgggagggtttgaagggtccggtgatctagagaatcttgtggcttcgttgctctccggtgatgagttgatacctgaaactacagagtagcttttgaagaagaatccaaatcggcgatttgatattttctctgttttctctgttttctttcaattttccgtttttttactttctcgattttgtaaacatataattatatatacaccag

SEQ ID NO: 100759 - protein, 147 aa, Arabidopsis thaliana
  peptide (1)..(147): Ceres Seq. ID no. 13606026
  misc_feature (14)..(118): Pfam Name: Auxin responsive protein Pfam Description: Auxin responsive protein
  misc_feature (1)..(147): Homolog of NCBI NO: 15219275 NR Description: auxin-induced (indole-3-acetic acid induced)
  misc_feature (1)..(120): Homolog of NCBI NO: 15230601 NR Description: auxin-induced (indole-3-acetic acid induced)
  misc_feature (1)..(144): Homolog of NCBI NO: 15219296 NR Description: auxin-induced (indole-3-acetic acid induced) family [Arabidopsis thaliana] >gi|7487901|pir||T01042
  misc_feature (1)..(120): Homolog of NCBI NO: 15223462 NR Description: auxin-induced (indole-3-acetic acid induced) family [Arabidopsis thaliana] >gi|25296219|pir||H96602 unknown
  misc_feature (54)..(124): Homolog of NCBI NO: 38345606 NR Description: OSJNBa0093O08.8 [Oryza sativa (japonica
  misc_feature (54)..(124): Homolog of NCBI NO: 5852079 NR Description: zwh0002.1 [Oryza sativa (indica cultivar-group)]
  misc_feature (54)..(145): Homolog of NCBI NO: 15238919 NR Description: auxin-induced (indole-3-acetic acid induced) family [Arabidopsis thaliana] >gi|11358297|pir||T50808
  misc_feature (47)..(114): Homolog of NCBI NO: 15231081 NR Description: auxin-induced (indole-3-acetic acid induced) putative [Arabidopsis thaliana] >gi|9293978|dbj|BAB01881.1|
  misc_feature (1)..(127): Homolog of NCBI NO: 20161745 NR Description: B1033B05.12 [Oryza sativa (japonica
  misc_feature (51)..(114): Homolog of NCBI NO: 15236186 NR Description: auxin-induced (indole-3-acetic acid induced) putative (SAUR_e) [Arabidopsis thaliana] >gi|7487665|pir||T05295
MKHLIRRLSRVADSSSEFSIRRSTSSFRNRRGHHRLHAPPPPWSICPARRVNTVPAGHVPVYVGEEMERFVVSAELMNHPIFVGLLNRSAQEYGYAQKGVLHIPCHVIVFERVVETLRLGGFEGSGDLENLVASLLSGDELIPETTE

SEQ ID NO: 100760 - protein, 81 aa, Arabidopsis thaliana
  peptide (1)..(81): Ceres Seq. ID no. 13606027
  misc_feature (1)..(52): Pfam Name: Auxin responsive protein Pfam Description: Auxin responsive protein
  misc_feature (1)..(81): Homolog of NCBI NO: 15219275 NR Description: auxin-induced (indole-3-acetic acid induced)
  misc_feature (1)..(54): Homolog of NCBI NO: 15230601 NR Description: auxin-induced (indole-3-acetic acid induced)
  misc_feature (1)..(78): Homolog of NCBI NO: 15219296 NR Description: auxin-induced (indole-3-acetic acid induced) family [Arabidopsis thaliana] >gi|7487901|pir||T01042
  misc_feature (1)..(54): Homolog of NCBI NO: 15223462 NR Description: auxin-induced (indole-3-acetic acid induced) family [Arabidopsis thaliana] >gi|25296219|pir||H96602 unknown
  misc_feature (1)..(58): Homolog of NCBI NO: 38345606 NR Description: OSJNBa0093O08.8 [Oryza sativa (japonica
  misc_feature (1)..(58): Homolog of NCBI NO: 5852079 NR Description: zwh0002.1 [Oryza sativa (indica cultivar-group)]
  misc_feature (1)..(79): Homolog of NCBI NO: 15238919 NR Description: auxin-induced (indole-3-acetic acid induced) family [Arabidopsis thaliana] >gi|11358297|pir||T50808
  misc_feature (1)..(48): Homolog of NCBI NO: 15231081 NR Description: auxin-induced (indole-3-acetic acid induced) putative [Arabidopsis thaliana] >gi|9293978|dbj|BAB01881.1|
  misc_feature (1)..(61): Homolog of NCBI NO: 20161745 NR Description: B1033B05.12 [Oryza sativa (japonica
  misc_feature (1)..(48): Homolog of NCBI NO: 15236186 NR Description: auxin-induced (indole-3-acetic acid induced) putative (SAUR_e) [Arabidopsis thaliana] >gi|7487665|pir||T05295
MERFVVSAELMNHPIFVGLLNRSAQEYGYAQKGVLHIPCHVIVFERVVETLRLGGFEGSGDLENLVASLLSGDELIPETTE

SEQ ID NO: 100761 - DNA, 1349 bp, Arabidopsis thaliana
  misc_feature (1)..(1349): Ceres Seq. ID no. 13606028
  misc_feature: MA Experiment ID: 20000179 Result: Up-regulated in Transcription
  misc_feature: MA Experiment 20000179 PARAMETER Experiment Name: At_Germinating_Seeds_P Parameter: Age (hr) Value: 6 vs. 0
  misc_feature: MA Experiment 20000179 PARAMETER Experiment Name: At_Germinating_Seeds_P Parameter: Tissue Value: Germinating Seeds
  misc_feature: MA Experiment ID: 20001451 Result: Up-regulated in Transcription
  misc_feature: MA Experiment 20001451 PARAMETER Experiment Name: At_Far-red-induction_P Parameter: Age (day) Value: 7
  misc_feature: MA Experiment 20001451 PARAMETER Experiment Name: At_Far-red-induction_P Parameter: Light Value: Far-red vs. White
  misc_feature: MA Experiment 20001451 PARAMETER Experiment Name: At_Far-red-induction_P Parameter: Organism Value: A. thaliana
  misc_feature: MA Experiment 20001451 PARAMETER Experiment Name: At_Far-red-induction_P Parameter: Plant Line Value: Columbia
  misc_feature: MA Experiment 20001451 PARAMETER Experiment Name: At_Far-red-induction_P Parameter: Timepoint (hr) Value: 24
  misc_feature: MA Experiment 20001451 PARAMETER Experiment Name: At_Far-red-induction_P Parameter: Tissue Value: Whole Plant
attcattatatgcacaaataataggttagatttggcttttagctttgcctacatctctttttttcttgtttcatccaaggagaagaaagcccccatggaagccaaagaagaaaccccgtggagctctattttagttccttctgttcaggagatggtgaaggataagatgatcacgaccgttcctcccagatatgttcggtatgatcaagacaaaactgaagtcgtcgtccatgattctggcctcatatccgagatccccatcatcgacatgaatcggttgtgttcttctaccgccgtggactctgaggttgagaaactcgactttgcttgcaaagaatatggatttttccagcttgtaaaccatggaatagacccaagtttcttggacaaaataaagtcagagattcaagatttcttcaaccttcccatggaagaaaaaaagaagttgtggcagacaccagcggtgatggaagggtttggacaagcttttgtggtttcagaagatcagaaactcgactgggcagatttattcttccttataatgcaacctgttcaattacgcaagcgtcacttgttccccaagctacctcttccctttagggatacgttagatatgtattccactcgagtaaagagtatagctaagatcttactagcgaaaatggcgaaagccttgcagatcaagccagaggaggtagaagaaatatttggtgatgatatgatgcagagtatgaggatgaactactatcccccgtgtccacaacctaatctggttacgggtctaattccgcattccgatgcagtcgggctcaccatacttttgcaggtgaatgaagttgacggtctccaaatcaagaaaaatggcaagtggttttttgtcaaacctctccaaaatgctttcattgtcaatgttggggacgtgttagagatcataacgaacgggacataccgaagcatcgagcaccgggcaatggtgaacttggagaaagagaggctctccattgcgacatttcacaacacgggaatggataaagaaattggtccggcgagaagccttgttcaaagacaagaggctgcaaagtttagaagcctgaaaactaaagactacttgaatggcttgttttcccgtgaactcaaaggaaaggcttatcttgatgctatgagaattgaagggaagtgatatcttgtttcccaagaaattctgttttctccaactggtcactgtcgtgttcatattctgtttttccttctctcttatgtctttggttcaaatctgttaaagaaaaaaacgcctgtgaataatacttaataagctcgttcgtcttcgtcaacatacaaaaatatcaact

SEQ ID NO: 100762 - protein, 392 aa, Arabidopsis thaliana
  peptide (1)..(392): Ceres Seq. ID no. 13606029
  misc_feature (240)..(340): Pfam Name: 2OG-Fe(II) oxygenase superfamily Pfam Description: 2OG-Fe(II) oxygenase superfamily
  misc_feature (32)..(392): Homolog of NCBI NO: 15219986 NR Description: oxidoreductase, 2OG-Fe(II) oxygenase family
  misc_feature (32)..(392): Homolog of NCBI NO: 26451337 NR Description: SRG1 like protein [Arabidopsis thaliana]
  misc_feature (32)..(392): Homolog of NCBI NO: 25285681 NR Description: SRG1 homolog [imported] - Arabidopsis thaliana
  misc_feature (32)..(389): Homolog of NCBI NO: 15219988 NR Description: oxidoreductase, 2OG-Fe(II) oxygenase family
  misc_feature (32)..(389): Homolog of NCBI NO: 15235014 NR Description: oxidoreductase, 2OG-Fe(II) oxygenase family
  misc_feature (32)..(389): Homolog of NCBI NO: 15235017 NR Description: oxidoreductase, 2OG-Fe(II) oxygenase family
  misc_feature (32)..(389): Homolog of NCBI NO: 15218400 NR Description: oxidoreductase, 2OG-Fe(II) oxygenase family
  misc_feature (42)..(388): Homolog of NCBI NO: 34895204 NR Description: P0463A02.24 [Oryza sativa (japonica
  misc_feature (60)..(389): Homolog of NCBI NO: 40736992 NR Description: putative oxidoreductase [Oryza sativa (japonica
  misc_feature (25)..(386): Homolog of NCBI NO: 15229694 NR Description: oxidoreductase, 2OG-Fe(II) oxygenase family thaliana] >gi|6016680|gb|AAF01507.1|AC009991_3 putative dioxygenase [Arabidopsis thaliana]
FIICTNNRLDLAFSFAYISFFLVSSKEKKAPMEAKEETPWSSILVPSVQEMVKDKMITTVPPRYVRYDQDKTEVVVHDSGLISEIPIIDMNRLCSSTAVDSEVEKLDFACKEYGFFQLVNHGIDPSFLDKIKSEIQDFFNLPMEEKKKLWQTPAVMEGFGQAFVVSEDQKLDWADLFFLIMQPVQLRKRHLFPKLPLPFRDTLDMYSTRVKSIAKILLAKMAKALQIKPEEVEEIFGDDMMQSMRMNYYPPCPQPNLVTGLIPHSDAVGLTILLQVNEVDGLQIKKNGKWFFVKPLQNAFIVNVGDVLEIITNGTYRSIEHRAMVNLEKERLSIATFHNTGMDKEIGPARSLVQRQEAAKFRSLKTKDYLNGLFSRELKGKAYLDAMRIEGK

SEQ ID NO: 100763 - protein, 361 aa, Arabidopsis thaliana
  peptide (1)..(361): Ceres Seq. ID no. 13606030
  misc_feature (209)..(309): Pfam Name: 2OG-Fe(II) oxygenase superfamily Pfam Description: 2OG-Fe(II) oxygenase superfamily
  misc_feature (1)..(361): Homolog of NCBI NO: 15219986 NR Description: oxidoreductase, 2OG-Fe(II) oxygenase family
  misc_feature (1)..(361): Homolog of NCBI NO: 26451337 NR Description: SRG1 like protein [Arabidopsis thaliana]
  misc_feature (1)..(361): Homolog of NCBI NO: 25285681 NR Description: SRG1 homolog [imported] - Arabidopsis thaliana
  misc_feature (1)..(358): Homolog of NCBI NO: 15219988 NR Description: oxidoreductase, 2OG-Fe(II) oxygenase family
  misc_feature (1)..(358): Homolog of NCBI NO: 15235014 NR Description: oxidoreductase, 2OG-Fe(II) oxygenase family
  misc_feature (1)..(358): Homolog of NCBI NO: 15235017 NR Description: oxidoreductase, 2OG-Fe(II) oxygenase family
  misc_feature (1)..(358): Homolog of NCBI NO: 15218400 NR Description: oxidoreductase, 2OG-Fe(II) oxygenase family
  misc_feature (11)..(357): Homolog of NCBI NO: 34895204 NR Description: P0463A02.24 [Oryza sativa (japonica
  misc_feature (29)..(358): Homolog of NCBI NO: 40736992 NR Description: putative oxidoreductase [Oryza sativa (japonica
  misc_feature (1)..(355): Homolog of NCBI NO: 15229694 NR Description: oxidoreductase, 2OG-Fe(II) oxygenase family thaliana] >gi|6016680|gb|AAF01507.1|AC009991_3 putative dioxygenase [Arabidopsis thaliana]
MEAKEETPWSSILVPSVQEMVKDKMITTVPPRYVRYDQDKTEVVVHDSGLISEIPIIDMNRLCSSTAVDSEVEKLDFACKEYGFFQLVNHGIDPSFLDKIKSEIQDFFNLPMEEKKKLWQTPAVMEGFGQAFVVSEDQKLDWADLFFLIMQPVQLRKRHLFPKLPLPFRDTLDMYSTRVKSIAKILLAKMAKALQIKPEEVEEIFGDDMMQSMRMNYYPPCPQPNLVTGLIPHSDAVGLTILLQVNEVDGLQIKKNGKWFFVKPLQNAFIVNVGDVLEIITNGTYRSIEHRAMVNLEKERLSIATFHNTGMDKEIGPARSLVQRQEAAKFRSLKTKDYLNGLFSRELKGKAYLDAMRIEGK

SEQ ID NO: 100764 - protein, 342 aa, Arabidopsis thaliana
  peptide (1)..(342): Ceres Seq. ID no. 13606031
  misc_feature (190)..(290): Pfam Name: 2OG-Fe(II) oxygenase superfamily Pfam Description: 2OG-Fe(II) oxygenase superfamily
  misc_feature (1)..(342): Homolog of NCBI NO: 15219986 NR Description: oxidoreductase, 2OG-Fe(II) oxygenase family
  misc_feature (1)..(342): Homolog of NCBI NO: 26451337 NR Description: SRG1 like protein [Arabidopsis thaliana]
  misc_feature (1)..(342): Homolog of NCBI NO: 25285681 NR Description: SRG1 homolog [imported] - Arabidopsis thaliana
  misc_feature (1)..(339): Homolog of NCBI NO: 15219988 NR Description: oxidoreductase, 2OG-Fe(II) oxygenase family
  misc_feature (1)..(339): Homolog of NCBI NO: 15235014 NR Description: oxidoreductase, 2OG-Fe(II) oxygenase family
  misc_feature (1)..(339): Homolog of NCBI NO: 15235017 NR Description: oxidoreductase, 2OG-Fe(II) oxygenase family
  misc_feature (1)..(339): Homolog of NCBI NO: 15218400 NR Description: oxidoreductase, 2OG-Fe(II) oxygenase family
  misc_feature (1)..(338): Homolog of NCBI NO: 34895204 NR Description: P0463A02.24 [Oryza sativa (japonica
  misc_feature (10)..(339): Homolog of NCBI NO: 40736992 NR Description: putative oxidoreductase [Oryza sativa (japonica
  misc_feature (1)..(336): Homolog of NCBI NO: 15229694 NR Description: oxidoreductase, 2OG-Fe(II) oxygenase family thaliana] >gi|6016680|gb|AAF01507.1|AC009991_3 putative dioxygenase [Arabidopsis thaliana]
MVKDKMITTVPPRYVRYDQDKTEVVVHDSGLISEIPIIDMNRLCSSTAVDSEVEKLDFACKEYGFFQLVNHGIDPSFLDKIKSEIQDFFNLPMEEKKKLWQTPAVMEGFGQAFVVSEDQKLDWADLFFLIMQPVQLRKRHLFPKLPLPFRDTLDMYSTRVKSIAKILLAKMAKALQIKPEEVEEIFGDDMMQSMRMNYYPPCPQPNLVTGLIPHSDAVGLTILLQVNEVDGLQIKKNGKWFFVKPLQNAFIVNVGDVLEIITNGTYRSIEHRAMVNLEKERLSIATFHNTGMDKEIGPARSLVQRQEAAKFRSLKTKDYLNGLFSRELKGKAYLDAMRIEGK

SEQ ID NO: 100765 - DNA, 1396 bp, Arabidopsis thaliana
  misc_feature (1)..(1396): Ceres Seq. ID no. 13606032
  misc_feature: MA Experiment ID: 20000169 Result: Up-regulated in Transcription
  misc_feature: MA Experiment 20000169 PARAMETER Experiment Name: At_100uM_ABA_P Parameter: Age (day) Value: 14
  misc_feature: MA Experiment 20000169 PARAMETER Experiment Name: At_100uM_ABA_P Parameter: Organism Value: A. thaliana
  misc_feature: MA Experiment 20000169 PARAMETER Experiment Name: At_100uM_ABA_P Parameter: Plant Line Value: WS
  misc_feature: MA Experiment 20000169 PARAMETER Experiment Name: At_100uM_ABA_P Parameter: Timepoint (hr) Value: 6
  misc_feature: MA Experiment 20000169 PARAMETER Experiment Name: At_100uM_ABA_P Parameter: Tissue Value: Aerial
  misc_feature: MA Experiment 20000169 PARAMETER Experiment Name: At_100uM_ABA_P Parameter: Treatment Value: 100uM ABA vs. No Treatment
  misc_feature: MA Experiment ID: 20000182 Result: Up-regulated in Transcription
  misc_feature: MA Experiment 20000182 PARAMETER Experiment Name: At_2mM_SA_P Parameter: Age (day) Value: 14
  misc_feature: MA Experiment 20000182 PARAMETER Experiment Name: At_2mM_SA_P Parameter: Organism Value: A. thaliana
  misc_feature: MA Experiment 20000182 PARAMETER Experiment Name: At_2mM_SA_P Parameter: Plant Line Value: WS
  misc_feature: MA Experiment 20000182 PARAMETER Experiment Name: At_2mM_SA_P Parameter: Timepoint (hr) Value: 6
  misc_feature: MA Experiment 20000182 PARAMETER Experiment Name: At_2mM_SA_P Parameter: Tissue Value: Aerial
  misc_feature: MA Experiment 20000182 PARAMETER Experiment Name: At_2mM_SA_P Parameter: Treatment Value: 2mM SA vs. No Treatment
  misc_feature: MA Experiment ID: 20000227 Result: Down-regulated in Transcription
  misc_feature: MA Experiment 20000227 PARAMETER Experiment Name: At_Root-Tips-vs-Tops_P Parameter: Tissue Value: Root Tips vs. Root Tops
  misc_feature: MA Experiment ID: 20000264 Result: Up-regulated in Transcription
  misc_feature: MA Experiment 20000264 PARAMETER Experiment Name: At_Open_Flower_P Parameter: Age (day) Value: 21
  misc_feature: MA Experiment 20000264 PARAMETER Experiment Name: At_Open_Flower_P Parameter: Plant Line Value: WS
  misc_feature: MA Experiment 20000264 PARAMETER Experiment Name: At_Open_Flower_P Parameter: Tissue Value: Open Flower vs. Whole Plant
  misc_feature: MA Experiment ID: 20000265 Result: Down-regulated in Transcription
  misc_feature: MA Experiment 20000265 PARAMETER Experiment Name: At_Open_Flower_P Parameter: Age (day) Value: 21
  misc_feature: MA Experiment 20000265 PARAMETER Experiment Name: At_Open_Flower_P Parameter: Plant Line Value: WS
  misc_feature: MA Experiment 20000265 PARAMETER Experiment Name: At_Open_Flower_P Parameter: Tissue Value: Closed Flower vs. Whole Plant
  misc_feature: MA Experiment ID: 20000308 Result: Up-regulated in Transcription
  misc_feature: MA Experiment 20000308 PARAMETER Experiment Name: At_100mM_NaCl__P Parameter: Age (day) Value: 17
  misc_feature: MA Experiment 20000308 PARAMETER Experiment Name: At_100mM_NaCl__P Parameter: Organism Value: A. thaliana
  misc_feature: MA Experiment 20000308 PARAMETER Experiment Name: At_100mM_NaCl__P Parameter: Plant Line Value: WS
  misc_feature: MA Experiment 20000308 PARAMETER Experiment Name: At_100mM_NaCl__P Parameter: Timepoint (hr) Value: 72
  misc_feature: MA Experiment 20000308 PARAMETER Experiment Name: At_100mM_NaCl__P Parameter: Tissue Value: Whole Plant
  misc_feature: MA Experiment 20000308 PARAMETER Experiment Name: At_100mM_NaCl__P Parameter: Treatment Value: 100mM NaCl vs. No Treatment
  misc_feature: MA Experiment ID: 20000436 Result: Up-regulated in Transcription
  misc_feature: MA Experiment 20000436 PARAMETER Experiment Name: At_Drought_P Parameter: Age (day) Value: 7
  misc_feature: MA Experiment 20000436 PARAMETER Experiment Name: At_Drought_P Parameter: Organism Value: A. thaliana
  misc_feature: MA Experiment 20000436 PARAMETER Experiment Name: At_Drought_P Parameter: Plant Line Value: WS
  misc_feature: MA Experiment 20000436 PARAMETER Experiment Name: At_Drought_P Parameter: Timepoint (hr) Value: 12
  misc_feature: MA Experiment 20000436 PARAMETER Experiment Name: At_Drought_P Parameter: Tissue Value: Whole Plant
  misc_feature: MA Experiment 20000436 PARAMETER Experiment Name: At_Drought_P Parameter: Treatment Value: Drought vs. No Drought
  misc_feature: MA Experiment ID: 20000437 Result: Up-regulated in Transcription
  misc_feature: MA Experiment 20000437 PARAMETER Experiment Name: At_Drought_P Parameter: Age (day) Value: 8
  misc_feature: MA Experiment 20000437 PARAMETER Experiment Name: At_Drought_P Parameter: Organism Value: A. thaliana
  misc_feature: MA Experiment 20000437 PARAMETER Experiment Name: At_Drought_P Parameter: Plant Line Value: WS
  misc_feature: MA Experiment 20000437 PARAMETER Experiment Name: At_Drought_P Parameter: Timepoint (hr) Value: 24
  misc_feature: MA Experiment 20000437 PARAMETER Experiment Name: At_Drought_P Parameter: Tissue Value: Whole Plant
  misc_feature: MA Experiment 20000437 PARAMETER Experiment Name: At_Drought_P Parameter: Treatment Value: Drought vs. No Drought
  misc_feature: MA Experiment ID: 20000438 Result: Down-regulated in Transcription
  misc_feature: MA Experiment 20000438 PARAMETER Experiment Name: At_Shoots__P Parameter: Age (day) Value: 14
  misc_feature: MA Experiment 20000438 PARAMETER Experiment Name: At_Shoots__P Parameter: Tissue Value: Shoots vs. Whole Plant
  misc_feature: MA Experiment ID: 20000453 Result: Up-regulated in Transcription
  misc_feature: MA Experiment 20000453 PARAMETER Experiment Name: At_100uM_ABA_P Parameter: Age (day) Value: 15
  misc_feature: MA Experiment 20000453 PARAMETER Experiment Name: At_100uM_ABA_P Parameter: Organism Value: A. thaliana
  misc_feature: MA Experiment 20000453 PARAMETER Experiment Name: At_100uM_ABA_P Parameter: Plant Line Value: WS
  misc_feature: MA Experiment 20000453 PARAMETER Experiment Name: At_100uM_ABA_P Parameter: Timepoint (hr) Value: 24
  misc_feature: MA Experiment 20000453 PARAMETER Experiment Name: At_100uM_ABA_P Parameter: Tissue Value: Aerial
  misc_feature: MA Experiment 20000453 PARAMETER Experiment Name: At_100uM_ABA_P Parameter: Treatment Value: 100uM ABA vs. No Treatment
  misc_feature: MA Experiment ID: 20000527 Result: Down-regulated in Transcription
  misc_feature: MA Experiment 20000527 PARAMETER Experiment Name: At_10percent_PEG_P Parameter: Age (day) Value: 20
  misc_feature: MA Experiment 20000527 PARAMETER Experiment Name: At_10percent_PEG_P Parameter: Organism Value: A. thaliana
  misc_feature: MA Experiment 20000527 PARAMETER Experiment Name: At_10percent_PEG_P Parameter: Plant Line Value: WS
  misc_feature: MA Experiment 20000527 PARAMETER Experiment Name: At_10percent_PEG_P Parameter: Timepoint (day) Value: 20
  misc_feature: MA Experiment 20000527 PARAMETER Experiment Name: At_10percent_PEG_P Parameter: Tissue Value: Whole Plant
  misc_feature: MA Experiment 20000527 PARAMETER Experiment Name: At_10percent_PEG_P Parameter: Treatment Value: 10percent PEG vs. No Treatment
  misc_feature: MA Experiment ID: 20000574 Result: Up-regulated in Transcription
  misc_feature: MA Experiment 20000574 PARAMETER Experiment Name: At_100uM_ABA_Mutants__P Parameter: Organism Value: A. thaliana
  misc_feature: MA Experiment 20000574 PARAMETER Experiment Name: At_100uM_ABA_Mutants__P Parameter: Plant Line Value: CS23 vs. Ler wt
  misc_feature: MA Experiment 20000574 PARAMETER Experiment Name: At_100uM_ABA_Mutants__P Parameter: Timepoint (hr) Value: N/A
  misc_feature: MA Experiment 20000574 PARAMETER Experiment Name: At_100uM_ABA_Mutants__P Parameter: Tissue Value: Whole Plant
  misc_feature: MA Experiment 20000574 PARAMETER Experiment Name: At_100uM_ABA_Mutants__P Parameter: Treatment Value: None
  misc_feature: MA Experiment ID: 20000794 Result: Up-regulated in Transcription
  misc_feature: MA Experiment 20000794 PARAMETER Experiment Name: At_Petals_P Parameter: Age (day) Value: 23-25 days
  misc_feature: MA Experiment 20000794 PARAMETER Experiment Name: At_Petals_P Parameter: Plant Line Value: WS
  misc_feature: MA Experiment 20000794 PARAMETER Experiment Name: At_Petals_P Parameter: Tissue Value: Petals vs. Whole plant
  misc_feature: MA Experiment ID: 20001457 Result: Down-regulated in Transcription
  misc_feature: MA Experiment 20001457 PARAMETER Experiment Name: At_50mM_NH4NO3_L-to-H_P Parameter: Age (day) Value: Undefined
  misc_feature: MA Experiment 20001457 PARAMETER Experiment Name: At_50mM_NH4NO3_L-to-H_P Parameter: Organism Value: Undefined
  misc_feature: MA Experiment 20001457 PARAMETER Experiment Name: At_50mM_NH4NO3_L-to-H_P Parameter: Plant Line Value: Undefined
  misc_feature: MA Experiment 20001457 PARAMETER Experiment Name: At_50mM_NH4NO3_L-to-H_P Parameter: Timepoint (hr) Value: 0.5
  misc_feature: MA Experiment 20001457 PARAMETER Experiment Name: At_50mM_NH4NO3_L-to-H_P Parameter: Tissue Value: Siliques
  misc_feature: MA Experiment 20001457 PARAMETER Experiment Name: At_50mM_NH4NO3_L-to-H_P Parameter: Treatment Value: 50mM NH4NO3 vs. 100mM Manitol
  misc_feature: MA Experiment ID: 20001555 Result: Up-regulated in Transcription
  misc_feature: MA Experiment 20001555 PARAMETER Experiment Name: At_Drought_Soil_Dry_P Parameter: Age (day) Value: 24
  misc_feature: MA Experiment 20001555 PARAMETER Experiment Name: At_Drought_Soil_Dry_P Parameter: Organism Value: A. thaliana
  misc_feature: MA Experiment 20001555 PARAMETER Experiment Name: At_Drought_Soil_Dry_P Parameter: Plant Line Value: WS
  misc_feature: MA Experiment 20001555 PARAMETER Experiment Name: At_Drought_Soil_Dry_P Parameter: Post Timepoint (hr) Value: None
  misc_feature: MA Experiment 20001555 PARAMETER Experiment Name: At_Drought_Soil_Dry_P Parameter: Post-Treatment Value: None
  misc_feature: MA Experiment 20001555 PARAMETER Experiment Name: At_Drought_Soil_Dry_P Parameter: Timepoint (day) Value: 10
  misc_feature: MA Experiment 20001555 PARAMETER Experiment Name: At_Drought_Soil_Dry_P Parameter: Treatment Value: Drought vs. No Drought
  misc_feature: MA Experiment ID: 20001556 Result: Up-regulated in Transcription
  misc_feature: MA Experiment 20001556 PARAMETER Experiment Name: At_Drought_Soil_Dry_P Parameter: Age (day) Value: 26
  misc_feature: MA Experiment 20001556 PARAMETER Experiment Name: At_Drought_Soil_Dry_P Parameter: Organism Value: A. thaliana
  misc_feature: MA Experiment 20001556 PARAMETER Experiment Name: At_Drought_Soil_Dry_P Parameter: Plant Line Value: WS
  misc_feature: MA Experiment 20001556 PARAMETER Experiment Name: At_Drought_Soil_Dry_P Parameter: Post Timepoint (hr) Value: None
  misc_feature: MA Experiment 20001556 PARAMETER Experiment Name: At_Drought_Soil_Dry_P Parameter: Post-Treatment Value: None
  misc_feature: MA Experiment 20001556 PARAMETER Experiment Name: At_Drought_Soil_Dry_P Parameter: Timepoint (day) Value: 12
  misc_feature: MA Experiment 20001556 PARAMETER Experiment Name: At_Drought_Soil_Dry_P Parameter: Treatment Value: Drought vs. No Drought
  misc_feature: MA Experiment ID: 20001557 Result: Up-regulated in Transcription
  misc_feature: MA Experiment 20001557 PARAMETER Experiment Name: At_Drought_Soil_Dry_P Parameter: Age (day) Value: 27
  misc_feature: MA Experiment 20001557 PARAMETER Experiment Name: At_Drought_Soil_Dry_P Parameter: Organism Value: A. thaliana
  misc_feature: MA Experiment 20001557 PARAMETER Experiment Name: At_Drought_Soil_Dry_P Parameter: Plant Line Value: WS
  misc_feature: MA Experiment 20001557 PARAMETER Experiment Name: At_Drought_Soil_Dry_P Parameter: Post Timepoint (hr) Value: 3
  misc_feature: MA Experiment 20001557 PARAMETER Experiment Name: At_Drought_Soil_Dry_P Parameter: Post-Treatment Value: Re-Water vs. No Drought
  misc_feature: MA Experiment 20001557 PARAMETER Experiment Name: At_Drought_Soil_Dry_P Parameter: Timepoint (day) Value: 13
  misc_feature: MA Experiment 20001557 PARAMETER Experiment Name: At_Drought_Soil_Dry_P Parameter: Treatment Value: Drought vs. No Drought
  misc_feature: MA Experiment ID: 20001558 Result: Up-regulated in Transcription
  misc_feature: MA Experiment 20001558 PARAMETER Experiment Name: At_Drought_Soil_Dry_P Parameter: Age (day) Value: 27
  misc_feature: MA Experiment 20001558 PARAMETER Experiment Name: At_Drought_Soil_Dry_P Parameter: Organism Value: A. thaliana
  misc_feature: MA Experiment 20001558 PARAMETER Experiment Name: At_Drought_Soil_Dry_P Parameter: Plant Line Value: WS
  misc_feature: MA Experiment 20001558 PARAMETER Experiment Name: At_Drought_Soil_Dry_P Parameter: Post Timepoint (hr) Value: 6
  misc_feature: MA Experiment 20001558 PARAMETER Experiment Name: At_Drought_Soil_Dry_P Parameter: Post-Treatment Value: Re-Water vs. No Drought
  misc_feature: MA Experiment 20001558 PARAMETER Experiment Name: At_Drought_Soil_Dry_P Parameter: Timepoint (day) Value: 13
  misc_feature: MA Experiment 20001558 PARAMETER Experiment Name: At_Drought_Soil_Dry_P Parameter: Treatment Value: Drought vs. No Drought
  misc_feature: MA Experiment ID: 20001559 Result: Up-regulated in Transcription
  misc_feature: MA Experiment 20001559 PARAMETER Experiment Name: At_Drought_Soil_Dry_P Parameter: Age (day) Value: 28
  misc_feature: MA Experiment 20001559 PARAMETER Experiment Name: At_Drought_Soil_Dry_P Parameter: Organism Value: A. thaliana
  misc_feature: MA Experiment 20001559 PARAMETER Experiment Name: At_Drought_Soil_Dry_P Parameter: Plant Line Value: WS
  misc_feature: MA Experiment 20001559 PARAMETER Experiment Name: At_Drought_Soil_Dry_P Parameter: Post Timepoint (hr) Value: 29
  misc_feature: MA Experiment 20001559 PARAMETER Experiment Name: At_Drought_Soil_Dry_P Parameter: Post-Treatment Value: Re-Water vs. No Drought
  misc_feature: MA Experiment 20001559 PARAMETER Experiment Name: At_Drought_Soil_Dry_P Parameter: Timepoint (day) Value: 14
  misc_feature: MA Experiment 20001559 PARAMETER Experiment Name: At_Drought_Soil_Dry_P Parameter: Treatment Value: Drought vs. No Drought
  misc_feature: MA Experiment ID: 20001757 Result: Down-regulated in Transcription
  misc_feature: MA Experiment 20001757 PARAMETER Experiment Name: At_50mM_NH4NO3_L-to-H_P Parameter: Timepoint (hr) Value: 6
  misc_feature: MA Experiment 20001757 PARAMETER Experiment Name: At_50mM_NH4NO3_L-to-H_P Parameter: Tissue Value: Leaf
  misc_feature: MA Experiment 20001757 PARAMETER Experiment Name: At_50mM_NH4NO3_L-to-H_P Parameter: Treatment Value: 50mM NH4NO3 vs 100mM Mannitol
  misc_feature: MA Experiment ID: 20001905 Result: Up-regulated in Transcription
  misc_feature: MA Experiment 20001905 PARAMETER Experiment Name: At_Drought_Reproduction_P Parameter: Age (day) Value: 40
  misc_feature: MA Experiment 20001905 PARAMETER Experiment Name: At_Drought_Reproduction_P Parameter: Organism Value: A. thaliana
  misc_feature: MA Experiment 20001905 PARAMETER Experiment Name: At_Drought_Reproduction_P Parameter: Plant Line Value: WS
  misc_feature: MA Experiment 20001905 PARAMETER Experiment Name: At_Drought_Reproduction_P Parameter: Timepoint (day) Value: 10
  misc_feature: MA Experiment 20001905 PARAMETER Experiment Name: At_Drought_Reproduction_P Parameter: Tissue Value: Rosettes
  misc_feature: MA Experiment 20001905 PARAMETER Experiment Name: At_Drought_Reproduction_P Parameter: Treatment Value: Drought vs. No Drought
  misc_feature: MA Experiment ID: 20001906 Result: Up-regulated in Transcription
  misc_feature: MA Experiment 20001906 PARAMETER Experiment Name: At_Drought_Reproduction_P Parameter: Age (day) Value: 35
  misc_feature: MA Experiment 20001906 PARAMETER Experiment Name: At_Drought_Reproduction_P Parameter: Organism Value: A. thaliana
  misc_feature: MA Experiment 20001906 PARAMETER Experiment Name: At_Drought_Reproduction_P Parameter: Plant Line Value: WS
  misc_feature: MA Experiment 20001906 PARAMETER Experiment Name: At_Drought_Reproduction_P Parameter: Timepoint (day) Value: 5
  misc_feature: MA Experiment 20001906 PARAMETER Experiment Name: At_Drought_Reproduction_P Parameter: Tissue Value: Siliques
  misc_feature: MA Experiment 20001906 PARAMETER Experiment Name: At_Drought_Reproduction_P Parameter: Treatment Value: Drought vs. No Drought
  misc_feature: MA Experiment ID: 20001908 Result: Up-regulated in Transcription
  misc_feature: MA Experiment 20001908 PARAMETER Experiment Name: At_Drought_Reproduction_P Parameter: Age (day) Value: 40
  misc_feature: MA Experiment 20001908 PARAMETER Experiment Name: At_Drought_Reproduction_P Parameter: Organism Value: A. thaliana
  misc_feature: MA Experiment 20001908 PARAMETER Experiment Name: At_Drought_Reproduction_P Parameter: Plant Line Value: WS
  misc_feature: MA Experiment 20001908 PARAMETER Experiment Name: At_Drought_Reproduction_P Parameter: Timepoint (day) Value: 10
  misc_feature: MA Experiment 20001908 PARAMETER Experiment Name: At_Drought_Reproduction_P Parameter: Tissue Value: Siliques
  misc_feature: MA Experiment 20001908 PARAMETER Experiment Name: At_Drought_Reproduction_P Parameter: Treatment Value: Drought vs. No Drought
  misc_feature: MA Experiment ID: 20001910 Result: Up-regulated in Transcription
  misc_feature: MA Experiment 20001910 PARAMETER Experiment Name: At_Drought_Reproduction_P Parameter: Age (day) Value: 37
  misc_feature: MA Experiment 20001910 PARAMETER Experiment Name: At_Drought_Reproduction_P Parameter: Organism Value: A. thaliana
  misc_feature: MA Experiment 20001910 PARAMETER Experiment Name: At_Drought_Reproduction_P Parameter: Plant Line Value: WS
  misc_feature: MA Experiment 20001910 PARAMETER Experiment Name: At_Drought_Reproduction_P Parameter: Timepoint (day) Value: 7
  misc_feature: MA Experiment 20001910 PARAMETER Experiment Name: At_Drought_Reproduction_P Parameter: Tissue Value: Flowers
  misc_feature: MA Experiment 20001910 PARAMETER Experiment Name: At_Drought_Reproduction_P Parameter: Treatment Value: Drought vs. No Drought
  misc_feature: MA Experiment ID: 20001911 Result: Up-regulated in Transcription
  misc_feature: MA Experiment 20001911 PARAMETER Experiment Name: At_Drought_Reproduction_P Parameter: Age (day) Value: 40
  misc_feature: MA Experiment 20001911 PARAMETER Experiment Name: At_Drought_Reproduction_P Parameter: Organism Value: A. thaliana
  misc_feature: MA Experiment 20001911 PARAMETER Experiment Name: At_Drought_Reproduction_P Parameter: Plant Line Value: WS
  misc_feature: MA Experiment 20001911 PARAMETER Experiment Name: At_Drought_Reproduction_P Parameter: Timepoint (day) Value: 10
  misc_feature: MA Experiment 20001911 PARAMETER Experiment Name: At_Drought_Reproduction_P Parameter: Tissue Value: Flowers
  misc_feature: MA Experiment 20001911 PARAMETER Experiment Name: At_Drought_Reproduction_P Parameter: Treatment Value: Drought vs. No Drought
aattcggcacgagccaaacttttgtttcgtccaggaaagaagccgacatggaagcaaaaggggcagcacagtggagctctatcctagttccatccgttcaagagatggttaaggagaagacgatcacgaccgttcctcctaggtacgtccggtctgatcaagacaaaactgaagtcgatgatgattttgatgtgaaaattgagatcccaatcatcgatatgaagcgtttgtgttcttcaaccaccatggattctgaggttgagaaactcgacttcgcttgcaaagagtggggatttttccagcttgtaaaccatggaatagactcaagtttcttggacaaagtaaagtcagagattcaagatttcttcaaccttcccatggaagaaaagaagaagttctggcagcgaccagatgagatagaaggtttcggacaagcttttgtggtttcagaagatcagaaactagattgggcagacttgttcttccataccgtgcaaccagttgaattacgcaagcctcacttgttccccaagctacctcttccctttagagatacactggagatgtattcttctgaagtgcagagcgtagctaagatcttaatagcgaaaatggcaagagccctagagatcaaaccagaggaactggaaaagttgtttgatgatgttgattcggttcaaagtatgaggatgaattactacccaccatgcccacaaccagatcaggttattggtctaaccccgcattctgattcggtcggactcactgtactgatgcaagtgaatgacgttgaaggtctccaaatcaagaaagatgggaaatgggttcctgttaaacccctcccaaatgctttcattgtcaatattggagacgtcttagagatcataactaatgggacataccgaagcatagagcatcgcggagttgtgaattcagagaaagagaggctctctattgcaacgtttcacaatgtgggaatgtataaagaagttggtcctgcaaaaagcctagttgaaagacaaaaggttgcaagattcaaaaggctgaccatgaaagagtataacgatggtttgttctctcgtactctcgacggaaaagcttatctagatgctttgagaatctaaagagagcaatgccttgtcgcccactactctgtttctctgttttcttgatttatgcaataaaacaatctctataatcttatcttcattgtctctctatttgcttcatttcgttaaagacaaaaatctcctgtagagaatgcttctacgtattgctacaataagacaataagtttgttcttagcaaaaaaaaggacaataagtttgttaaagtttcttgacacgttcgttgttgctcaaagatatacctaataatatgatcacatgattcacat

SEQ ID NO: 100766 - protein, 373 aa, Arabidopsis thaliana
  peptide (1)..(373): Ceres Seq. ID no. 13606033
  misc_feature (224)..(324): Pfam Name: 2OG-Fe(II) oxygenase superfamily Pfam Description: 2OG-Fe(II) oxygenase superfamily
  misc_feature (16)..(373): Homolog of NCBI NO: 15219988 NR Description: oxidoreductase, 2OG-Fe(II) oxygenase family
  misc_feature (16)..(373): Homolog of NCBI NO: 15219986 NR Description: oxidoreductase, 2OG-Fe(II) oxygenase family
  misc_feature (16)..(373): Homolog of NCBI NO: 15235014 NR Description: oxidoreductase, 2OG-Fe(II) oxygenase family
  misc_feature (16)..(373): Homolog of NCBI NO: 26451337 NR Description: SRG1 like protein [Arabidopsis thaliana]
  misc_feature (16)..(373): Homolog of NCBI NO: 15235017 NR Description: oxidoreductase, 2OG-Fe(II) oxygenase family
  misc_feature (16)..(373): Homolog of NCBI NO: 25285681 NR Description: SRG1 homolog [imported] - Arabidopsis thaliana
  misc_feature (16)..(373): Homolog of NCBI NO: 15218400 NR Description: oxidoreductase, 2OG-Fe(II) oxygenase family
  misc_feature (26)..(372): Homolog of NCBI NO: 34895204 NR Description: P0463A02.24 [Oryza sativa (japonica
  misc_feature (15)..(373): Homolog of NCBI NO: 40736992 NR Description: putative oxidoreductase [Oryza sativa (japonica
  misc_feature (21)..(373): Homolog of NCBI NO: 15224472 NR Description: oxidoreductase, 2OG-Fe(II) oxygenase family
FGTSQTFVSSRKEADMEAKGAAQWSSILVPSVQEMVKEKTITTVPPRYVRSDQDKTEVDDDFDVKIEIPIIDMKRLCSSTTMDSEVEKLDFACKEWGFFQLVNHGIDSSFLDKVKSEIQDFFNLPMEEKKKFWQRPDEIEGFGQAFVVSEDQKLDWADLFFHTVQPVELRKPHLFPKLPLPFRDTLEMYSSEVQSVAKILIAKMARALEIKPEELEKLFDDVDSVQSMRMNYYPPCPQPDQVIGLTPHSDSVGLTVLMQVNDVEGLQIKKDGKWVPVKPLPNAFIVNIGDVLEIITNGTYRSIEHRGVVNSEKERLSIATFHNVGMYKEVGPAKSLVERQKVARFKRLTMKEYNDGLFSRTLDGKAYLDALRI

SEQ ID NO: 100767 - protein, 358 aa, Arabidopsis thaliana
  peptide (1)..(358): Ceres Seq. ID no. 13606034
  misc_feature (209)..(309): Pfam Name: 2OG-Fe(II) oxygenase superfamily Pfam Description: 2OG-Fe(II) oxygenase superfamily
  misc_feature (1)..(358): Homolog of NCBI NO: 15219988 NR Description: oxidoreductase, 2OG-Fe(II) oxygenase family
  misc_feature (1)..(358): Homolog of NCBI NO: 15219986 NR Description: oxidoreductase, 2OG-Fe(II) oxygenase family
  misc_feature (1)..(358): Homolog of NCBI NO: 15235014 NR Description: oxidoreductase, 2OG-Fe(II) oxygenase family
  misc_feature (1)..(358): Homolog of NCBI NO: 26451337 NR Description: SRG1 like protein [Arabidopsis thaliana]
  misc_feature (1)..(358): Homolog of NCBI NO: 15235017 NR Description: oxidoreductase, 2OG-Fe(II) oxygenase family
  misc_feature (1)..(358): Homolog of NCBI NO: 25285681 NR Description: SRG1 homolog [imported] - Arabidopsis thaliana
  misc_feature (1)..(358): Homolog of NCBI NO: 15218400 NR Description: oxidoreductase, 2OG-Fe(II) oxygenase family
  misc_feature (11)..(357): Homolog of NCBI NO: 34895204 NR Description: P0463A02.24 [Oryza sativa (japonica
  misc_feature (1)..(358): Homolog of NCBI NO: 40736992 NR Description: putative oxidoreductase [Oryza sativa (japonica
  misc_feature (6)..(358): Homolog of NCBI NO: 15224472 NR Description: oxidoreductase, 2OG-Fe(II) oxygenase family
MEAKGAAQWSSILVPSVQEMVKEKTITTVPPRYVRSDQDKTEVDDDFDVKIEIPIIDMKRLCSSTTMDSEVEKLDFACKEWGFFQLVNHGIDSSFLDKVKSEIQDFFNLPMEEKKKFWQRPDEIEGFGQAFVVSEDQKLDWADLFFHTVQPVELRKPHLFPKLPLPFRDTLEMYSSEVQSVAKILIAKMARALEIKPEELEKLFDDVDSVQSMRMNYYPPCPQPDQVIGLTPHSDSVGLTVLMQVNDVEGLQIKKDGKWVPVKPLPNAFIVNIGDVLEIITNGTYRSIEHRGVVNSEKERLSIATFHNVGMYKEVGPAKSLVERQKVARFKRLTMKEYNDGLFSRTLDGKAYLDALRI

SEQ ID NO: 100768 - protein, 339 aa, Arabidopsis thaliana
  peptide (1)..(339): Ceres Seq. ID no. 13606035
  misc_feature (190)..(290): Pfam Name: 2OG-Fe(II) oxygenase superfamily Pfam Description: 2OG-Fe(II) oxygenase superfamily
  misc_feature (1)..(339): Homolog of NCBI NO: 15219988 NR Description: oxidoreductase, 2OG-Fe(II) oxygenase family
  misc_feature (1)..(339): Homolog of NCBI NO: 15219986 NR Description: oxidoreductase, 2OG-Fe(II) oxygenase family
  misc_feature (1)..(339): Homolog of NCBI NO: 15235014 NR Description: oxidoreductase, 2OG-Fe(II) oxygenase family
  misc_feature (1)..(339): Homolog of NCBI NO: 26451337 NR Description: SRG1 like protein [Arabidopsis thaliana]
  misc_feature (1)..(339): Homolog of NCBI NO: 15235017 NR Description: oxidoreductase, 2OG-Fe(II) oxygenase family
  misc_feature (1)..(339): Homolog of NCBI NO: 25285681 NR Description: SRG1 homolog [imported] - Arabidopsis thaliana
  misc_feature (1)..(339): Homolog of NCBI NO: 15218400 NR Description: oxidoreductase, 2OG-Fe(II) oxygenase family
  misc_feature (1)..(338): Homolog of NCBI NO: 34895204 NR Description: P0463A02.24 [Oryza sativa (japonica
  misc_feature (1)..(339): Homolog of NCBI NO: 40736992 NR Description: putative oxidoreductase [Oryza sativa (japonica
  misc_feature (1)..(339): Homolog of NCBI NO: 15224472 NR Description: oxidoreductase, 2OG-Fe(II) oxygenase family
MVKEKTITTVPPRYVRSDQDKTEVDDDFDVKIEIPIIDMKRLCSSTTMDSEVEKLDFACKEWGFFQLVNHGIDSSFLDKVKSEIQDFFNLPMEEKKKFWQRPDEIEGFGQAFVVSEDQKLDWADLFFHTVQPVELRKPHLFPKLPLPFRDTLEMYSSEVQSVAKILIAKMARALEIKPEELEKLFDDVDSVQSMRMNYYPPCPQPDQVIGLTPHSDSVGLTVLMQVNDVEGLQIKKDGKWVPVKPLPNAFIVNIGDVLEIITNGTYRSIEHRGVVNSEKERLSIATFHNVGMYKEVGPAKSLVERQKVARFKRLTMKEYNDGLFSRTLDGKAYLDALRI

SEQ ID NO: 100769 - DNA, 1372 bp, Arabidopsis thaliana
  misc_feature (1)..(1372): Ceres Seq. ID no. 13606036
  misc_feature: MA Experiment ID: 20000173 Result: Up-regulated in Transcription
  misc_feature: MA Experiment 20000173 PARAMETER Experiment Name: At_42deg_Heat_P Parameter: Age (day) Value: 14
  misc_feature: MA Experiment 20000173 PARAMETER Experiment Name: At_42deg_Heat_P Parameter: Organism Value: A. thaliana
  misc_feature: MA Experiment 20000173 PARAMETER Experiment Name: At_42deg_Heat_P Parameter: Plant Line Value: WS
  misc_feature: MA Experiment 20000173 PARAMETER Experiment Name: At_42deg_Heat_P Parameter: Temperature (deg C) Value: 42 vs. 22
  misc_feature: MA Experiment 20000173 PARAMETER Experiment Name: At_42deg_Heat_P Parameter: Timepoint (hr) Value: 6
  misc_feature: MA Experiment 20000173 PARAMETER Experiment Name: At_42deg_Heat_P Parameter: Tissue Value: Aerial
  misc_feature: MA Experiment ID: 20000182 Result: Up-regulated in Transcription
  misc_feature: MA Experiment 20000182 PARAMETER Experiment Name: At_2mM_SA_P Parameter: Age (day) Value: 14
  misc_feature: MA Experiment 20000182 PARAMETER Experiment Name: At_2mM_SA_P Parameter: Organism Value: A. thaliana
  misc_feature: MA Experiment 20000182 PARAMETER Experiment Name: At_2mM_SA_P Parameter: Plant Line Value: WS
  misc_feature: MA Experiment 20000182 PARAMETER Experiment Name: At_2mM_SA_P Parameter: Timepoint (hr) Value: 6
  misc_feature: MA Experiment 20000182 PARAMETER Experiment Name: At_2mM_SA_P Parameter: Tissue Value: Aerial
  misc_feature: MA Experiment 20000182 PARAMETER Experiment Name: At_2mM_SA_P Parameter: Treatment Value: 2mM SA vs. No Treatment
  misc_feature: MA Experiment ID: 20000184 Result: Up-regulated in Transcription
  misc_feature: MA Experiment 20000184 PARAMETER Experiment Name: At_Shoots__P Parameter: Age (day) Value: 7
  misc_feature: MA Experiment 20000184 PARAMETER Experiment Name: At_Shoots__P Parameter: Tissue Value: Shoots vs. Whole Plant
  misc_feature: MA Experiment ID: 20000185 Result: Up-regulated in Transcription
  misc_feature: MA Experiment 20000185 PARAMETER Experiment Name: At_Roots__P Parameter: Age (day) Value: 7 vs. 21
  misc_feature: MA Experiment 20000185 PARAMETER Experiment Name: At_Roots__P Parameter: Organism Value: A. thaliana
  misc_feature: MA Experiment 20000185 PARAMETER Experiment Name: At_Roots__P Parameter: Tissue Value: Roots vs. Whole Plant
  misc_feature: MA Experiment ID: 20000213 Result: Up-regulated in Transcription
  misc_feature: MA Experiment 20000213 PARAMETER Experiment Name: At_4deg_Cold_P Parameter: Timepoint (hr) Value: 2
  misc_feature: MA Experiment ID: 20000438 Result: Up-regulated in Transcription
  misc_feature: MA Experiment 20000438 PARAMETER Experiment Name: At_Shoots__P Parameter: Age (day) Value: 14
  misc_feature: MA Experiment 20000438 PARAMETER Experiment Name: At_Shoots__P Parameter: Tissue Value: Shoots vs. Whole Plant
  misc_feature: MA Experiment ID: 20000439 Result: Up-regulated in Transcription
  misc_feature: MA Experiment 20000439 PARAMETER Experiment Name: At_Roots__P Parameter: Age (day) Value: 14 vs. 21
  misc_feature: MA Experiment 20000439 PARAMETER Experiment Name: At_Roots__P Parameter: Organism Value: A. thaliana
  misc_feature: MA Experiment 20000439 PARAMETER Experiment Name: At_Roots__P Parameter: Tissue Value: Roots vs. Whole Plant
  misc_feature: MA Experiment ID: 20000495 Result: Down-regulated in Transcription
  misc_feature: MA Experiment 20000495 PARAMETER Experiment Name: At_Guard_Cells_P Parameter: Harvest Date Value: 8/2/2002
  misc_feature: MA Experiment 20000495 PARAMETER Experiment Name: At_Guard_Cells_P Parameter: Organism Value: A. thaliana
  misc_feature: MA Experiment 20000495 PARAMETER Experiment Name: At_Guard_Cells_P Parameter: Tissue Value: Guard Cells vs. Leaves
  misc_feature: MA Experiment ID: 20000573 Result: Down-regulated in Transcription
  misc_feature: MA Experiment 20000573 PARAMETER Experiment Name: At_100uM_ABA_Mutants__P Parameter: Organism Value: A. thaliana
  misc_feature: MA Experiment 20000573 PARAMETER Experiment Name: At_100uM_ABA_Mutants__P Parameter: Plant Line Value: CS22 vs. Ler wt
  misc_feature: MA Experiment 20000573 PARAMETER Experiment Name: At_100uM_ABA_Mutants__P Parameter: Timepoint (hr) Value: N/A
  misc_feature: MA Experiment 20000573 PARAMETER Experiment Name: At_100uM_ABA_Mutants__P Parameter: Tissue Value: Whole Plant
  misc_feature: MA Experiment 20000573 PARAMETER Experiment Name: At_100uM_ABA_Mutants__P Parameter: Treatment Value: None
  misc_feature: MA Experiment ID: 20000794 Result: Up-regulated in Transcription
  misc_feature: MA Experiment 20000794 PARAMETER Experiment Name: At_Petals_P Parameter: Age (day) Value: 23-25 days
  misc_feature: MA Experiment 20000794 PARAMETER Experiment Name: At_Petals_P Parameter: Plant Line Value: WS
  misc_feature: MA Experiment 20000794 PARAMETER Experiment Name: At_Petals_P Parameter: Tissue Value: Petals vs. Whole plant
  misc_feature: MA Experiment ID: 20001247 Result: Up-regulated in Transcription
  misc_feature: MA Experiment 20001247 PARAMETER Experiment Name: At_Far-red-induction_P Parameter: Age (day) Value: 7
  misc_feature: MA Experiment 20001247 PARAMETER Experiment Name: At_Far-red-induction_P Parameter: Light Value: Far-red vs. White
  misc_feature: MA Experiment 20001247 PARAMETER Experiment Name: At_Far-red-induction_P Parameter: Organism Value: A. thaliana
  misc_feature: MA Experiment 20001247 PARAMETER Experiment Name: At_Far-red-induction_P Parameter: Plant Line Value: Columbia
  misc_feature: MA Experiment 20001247 PARAMETER Experiment Name: At_Far-red-induction_P Parameter: Timepoint (hr) Value: 1
  misc_feature: MA Experiment 20001247 PARAMETER Experiment Name: At_Far-red-induction_P Parameter: Tissue Value: Whole Plant
  misc_feature: MA Experiment ID: 20001248 Result: Down-regulated in Transcription
  misc_feature: MA Experiment 20001248 PARAMETER Experiment Name: At_Far-red-induction_P Parameter: Age (day) Value: 7
  misc_feature: MA Experiment 20001248 PARAMETER Experiment Name: At_Far-red-induction_P Parameter: Light Value: Far-red vs. White
  misc_feature: MA Experiment 20001248 PARAMETER Experiment Name: At_Far-red-induction_P Parameter: Organism Value: A. thaliana
  misc_feature: MA Experiment 20001248 PARAMETER Experiment Name: At_Far-red-induction_P Parameter: Plant Line Value: Columbia
  misc_feature: MA Experiment 20001248 PARAMETER Experiment Name: At_Far-red-induction_P Parameter: Timepoint (hr) Value: 4
  misc_feature: MA Experiment 20001248 PARAMETER Experiment Name: At_Far-red-induction_P Parameter: Tissue Value: Whole Plant
  misc_feature: MA Experiment ID: 20001450 Result: Down-regulated in Transcription
  misc_feature: MA Experiment 20001450 PARAMETER Experiment Name: At_Far-red-induction_P Parameter: Age (day) Value: 7
  misc_feature: MA Experiment 20001450 PARAMETER Experiment Name: At_Far-red-induction_P Parameter: Light Value: Far-red vs. White
  misc_feature: MA Experiment 20001450 PARAMETER Experiment Name: At_Far-red-induction_P Parameter: Organism Value: A. thaliana
  misc_feature: MA Experiment 20001450 PARAMETER Experiment Name: At_Far-red-induction_P Parameter: Plant Line Value: Columbia
  misc_feature: MA Experiment 20001450 PARAMETER Experiment Name: At_Far-red-induction_P Parameter: Timepoint (hr) Value: 8
  misc_feature: MA Experiment 20001450 PARAMETER Experiment Name: At_Far-red-induction_P Parameter: Tissue Value: Whole Plant
atgatgatgtcatgtcggaatatagacttgggtacgagtgttcttgatcattcttgtagctcttcttcaacaagtcgtcgattcttgtttggcaattcttcgaagaccgtttgtatgattggtggcagaagctgtgttggaaatttggtatttctccggcgagatttggctacttgcagagctgttccggctaaatccaaggagaattctctggtcaacggtattggtcaagatcaaacagtgatgctcaatctgaggcaagagtcacgaaagccaatatctttggaaactctgtttgaggtcgtagctgatgatttgcagaggttgaacgacaatcttttatcgattgttggtgcagaaaatccggttttgatatctgctgctgagcaaatcttcagcgctggtggcaagaggatgagaccgggtttggtattccttgtatcacgagccactgcggaattagcaggcttaaaggaacttacagtagaacatcggcgtttaggtgagatcattgagatgattcacaccgcaagtttgatacacgatgatgtgttagacgaaagtgatatgcgaagaggaagggaaacggttcacgagctattcggaacaagagtagctgtattagctggggatttcatgtttgctcaagcatcatggtacttagcaaatctcgaaaaccttgaagtcattaagctcataagtcaggtgatcaaagattttgcaagcggtgagataaagcaagcatcgagtttattcgattgtgatgtcaagcttgatgactacatgctaaagagttactacaagacagcttcattagtagctgcaagcaccaaaggagcagcaattttcagtaaagtcgaaagcaaggtcgcagagcaaatgtatcagttcgggaagaatctcggtttatcttttcaagtagttgatgacattctggacttcactcagtccacagagcagttaggtaagcctgcagctaatgacctagccaaaggtaacataacggcgccagtgatcttcgcgctagagaatgagccaaggctaagagagatcattgagtctgagttttgtgagcctggatcgcttgaagaagcgattgaaatagttagaaatcgcggtgggatcaagaaagctcaagaattagcaaaggagaaagctgaacttgcgttaaagaatttgaattgtcttcctaggagtggtttcagatcggctcttgaggatatggtaatgtttaatcttgaaaggattgattagtttcaaagggtatttggcagaggaaactgtaacaacactctttacttgttcaaaacttcaaacacagatttttttttttactgtatgtcataatggagtaataaacaaaaattcatgc

SEQ ID NO: 100770 - protein, 417 aa, Arabidopsis thaliana
  peptide (1)..(417): Ceres Seq. ID no. 13606037
  misc_feature (123)..(383): Pfam Name: Polyprenyl synthetase Pfam Description: Polyprenyl synthetase
  misc_feature (1)..(417): Homolog of NCBI NO: 22329620 NR Description: geranyl diphosphate synthase
  misc_feature (39)..(417): Homolog of NCBI NO: 25314280 NR Description: prenyl transferase homolog [imported] - thaliana >gi|5734760|gb|AAD50025.1|AC007651_20 Very similar to
  misc_feature (1)..(417): Homolog of NCBI NO: 30699332 NR Description: geranyl diphosphate synthase putative [Arabidopsis thaliana] >gi|19911233|dbj|BAB86941.1|
  misc_feature (96)..(417): Homolog of NCBI NO: 28393675 NR Description: putative geranyl diphosphate synthase (GPPS)
  misc_feature (74)..(417): Homolog of NCBI NO: 25314331 NR Description: hypothetical protein T30F21.15 [imported] - thaliana >gi|4836881|gb|AAD30584.1|AC007260_15 Very similar to
  misc_feature (94)..(416): Homolog of NCBI NO: 22299300 NR Description: solanesyl diphosphate synthase
  misc_feature (93)..(416): Homolog of NCBI NO: 16329171 NR Description: solanesyl diphosphate synthase [Synechocystis sp.
  misc_feature (97)..(416): Homolog of NCBI NO: 23125555 NR Description: hypothetical protein [Nostoc punctiforme]
  misc_feature (98)..(416): Homolog of NCBI NO: 23041136 NR Description: hypothetical protein [Trichodesmium erythraeum
  misc_feature (97)..(416): Homolog of NCBI NO: 17227592 NR Description: solanesyl diphosphate synthase [Nostoc sp. PCC
MMMSCRNIDLGTSVLDHSCSSSSTSRRFLFGNSSKTVCMIGGRSCVGNLVFLRRDLATCRAVPAKSKENSLVNGIGQDQTVMLNLRQESRKPISLETLFEVVADDLQRLNDNLLSIVGAENPVLISAAEQIFSAGGKRMRPGLVFLVSRATAELAGLKELTVEHRRLGEIIEMIHTASLIHDDVLDESDMRRGRETVHELFGTRVAVLAGDFMFAQASWYLANLENLEVIKLISQVIKDFASGEIKQASSLFDCDVKLDDYMLKSYYKTASLVAASTKGAAIFSKVESKVAEQMYQFGKNLGLSFQVVDDILDFTQSTEQLGKPAANDLAKGNITAPVIFALENEPRLREIIESEFCEPGSLEEAIEIVRNRGGIKKAQELAKEKAELALKNLNCLPRSGFRSALEDMVMFNLERID

SEQ ID NO: 100771 - protein, 416 aa, Arabidopsis thaliana
  peptide (1)..(416): Ceres Seq. ID no. 13606038
  misc_feature (122)..(382): Pfam Name: Polyprenyl synthetase Pfam Description: Polyprenyl synthetase
  misc_feature (1)..(416): Homolog of NCBI NO: 22329620 NR Description: geranyl diphosphate synthase
  misc_feature (38)..(416): Homolog of NCBI NO: 25314280 NR Description: prenyl transferase homolog [imported] - thaliana >gi|5734760|gb|AAD50025.1|AC007651_20 Very similar to
  misc_feature (1)..(416): Homolog of NCBI NO: 30699332 NR Description: geranyl diphosphate synthase putative [Arabidopsis thaliana] >gi|19911233|dbj|BAB86941.1|
  misc_feature (95)..(416): Homolog of NCBI NO: 28393675 NR Description: putative geranyl diphosphate synthase (GPPS)
  misc_feature (73)..(416): Homolog of NCBI NO: 25314331 NR Description: hypothetical protein T30F21.15 [imported] - thaliana >gi|4836881|gb|AAD30584.1|AC007260_15 Very similar to
  misc_feature (93)..(415): Homolog of NCBI NO: 22299300 NR Description: solanesyl diphosphate synthase
  misc_feature (92)..(415): Homolog of NCBI NO: 16329171 NR Description: solanesyl diphosphate synthase [Synechocystis sp.
  misc_feature (96)..(415): Homolog of NCBI NO: 23125555 NR Description: hypothetical protein [Nostoc punctiforme]
  misc_feature (97)..(415): Homolog of NCBI NO: 23041136 NR Description: hypothetical protein [Trichodesmium erythraeum
  misc_feature (96)..(415): Homolog of NCBI NO: 17227592 NR Description: solanesyl diphosphate synthase [Nostoc sp. PCC
MMSCRNIDLGTSVLDHSCSSSSTSRRFLFGNSSKTVCMIGGRSCVGNLVFLRRDLATCRAVPAKSKENSLVNGIGQDQTVMLNLRQESRKPISLETLFEVVADDLQRLNDNLLSIVGAENPVLISAAEQIFSAGGKRMRPGLVFLVSRATAELAGLKELTVEHRRLGEIIEMIHTASLIHDDVLDESDMRRGRETVHELFGTRVAVLAGDFMFAQASWYLANLENLEVIKLISQVIKDFASGEIKQASSLFDCDVKLDDYMLKSYYKTASLVAASTKGAAIFSKVESKVAEQMYQFGKNLGLSFQVVDDILDFTQSTEQLGKPAANDLAKGNITAPVIFALENEPRLREIIESEFCEPGSLEEAIEIVRNRGGIKKAQELAKEKAELALKNLNCLPRSGFRSALEDMVMFNLERID

SEQ ID NO: 100772 - protein, 415 aa, Arabidopsis thaliana
  peptide (1)..(415): Ceres Seq. ID no. 13606039
  misc_feature (121)..(381): Pfam Name: Polyprenyl synthetase Pfam Description: Polyprenyl synthetase
  misc_feature (1)..(415): Homolog of NCBI NO: 22329620 NR Description: geranyl diphosphate synthase
  misc_feature (37)..(415): Homolog of NCBI NO: 25314280 NR Description: prenyl transferase homolog [imported] - thaliana >gi|5734760|gb|AAD50025.1|AC007651_20 Very similar to
  misc_feature (1)..(415): Homolog of NCBI NO: 30699332 NR Description: geranyl diphosphate synthase putative [Arabidopsis thaliana] >gi|19911233|dbj|BAB86941.1|
  misc_feature (94)..(415): Homolog of NCBI NO: 28393675 NR Description: putative geranyl diphosphate synthase (GPPS)
  misc_feature (72)..(415): Homolog of NCBI NO: 25314331 NR Description: hypothetical protein T30F21.15 [imported] - thaliana >gi|4836881|gb|AAD30584.1|AC007260_15 Very similar to
  misc_feature (92)..(414): Homolog of NCBI NO: 22299300 NR Description: solanesyl diphosphate synthase
  misc_feature (91)..(414): Homolog of NCBI NO: 16329171 NR Description: solanesyl diphosphate synthase [Synechocystis sp.
  misc_feature (95)..(414): Homolog of NCBI NO: 23125555 NR Description: hypothetical protein [Nostoc punctiforme]
  misc_feature (96)..(414): Homolog of NCBI NO: 23041136 NR Description: hypothetical protein [Trichodesmium erythraeum
  misc_feature (95)..(414): Homolog of NCBI NO: 17227592 NR Description: solanesyl diphosphate synthase [Nostoc sp. PCC
MSCRNIDLGTSVLDHSCSSSSTSRRFLFGNSSKTVCMIGGRSCVGNLVFLRRDLATCRAVPAKSKENSLVNGIGQDQTVMLNLRQESRKPISLETLFEVVADDLQRLNDNLLSIVGAENPVLISAAEQIFSAGGKRMRPGLVFLVSRATAELAGLKELTVEHRRLGEIIEMIHTASLIHDDVLDESDMRRGRETVHELFGTRVAVLAGDFMFAQASWYLANLENLEVIKLISQVIKDFASGEIKQASSLFDCDVKLDDYMLKSYYKTASLVAASTKGAAIFSKVESKVAEQMYQFGKNLGLSFQVVDDILDFTQSTEQLGKPAANDLAKGNITAPVIFALENEPRLREIIESEFCEPGSLEEAIEIVRNRGGIKKAQELAKEKAELALKNLNCLPRSGFRSALEDMVMFNLERID

SEQ ID NO: 100773 - DNA, 673 bp, Arabidopsis thaliana
  misc_feature (1)..(673): Ceres Seq. ID no. 13606048
  misc_feature: MA Experiment ID: 108434 Result: Down-regulated in Transcription
  misc_feature: MA Experiment 108434 PARAMETER Experiment Name: At_Root_Tips_cDNA_P Parameter: Tissue Value: Root Tips
  misc_feature: MA Experiment ID: 108435 Result: Down-regulated in Transcription
  misc_feature: MA Experiment 108435 PARAMETER Experiment Name: At_stm_Mutants_cDNA_P Parameter: Plant Line Value: wt Landsburg vs stm
  misc_feature: MA Experiment 108435 PARAMETER Experiment Name: At_stm_Mutants_cDNA_P Parameter: Tissue Value: Shoot Apical Meristem Region
  misc_feature: MA Experiment ID: 108462 Result: Up-regulated in Transcription
  misc_feature: MA Experiment 108462 PARAMETER Experiment Name: At_Germinating_Seeds_cDNA_P Parameter: Age (day) Value: 2 vs. 0
  misc_feature: MA Experiment 108462 PARAMETER Experiment Name: At_Germinating_Seeds_cDNA_P Parameter: Tissue Value: Germinating Seeds
  misc_feature: MA Experiment ID: 108463 Result: Up-regulated in Transcription
  misc_feature: MA Experiment 108463 PARAMETER Experiment Name: At_Germinating_Seeds_cDNA_P Parameter: Age (day) Value: 3 vs. 0
  misc_feature: MA Experiment 108463 PARAMETER Experiment Name: At_Germinating_Seeds_cDNA_P Parameter: Tissue Value: Germinating Seeds
  misc_feature: MA Experiment ID: 108464 Result: Up-regulated in Transcription
  misc_feature: MA Experiment 108464 PARAMETER Experiment Name: At_Germinating_Seeds_cDNA_P Parameter: Age (day) Value: 4 vs. 0
  misc_feature: MA Experiment 108464 PARAMETER Experiment Name: At_Germinating_Seeds_cDNA_P Parameter: Tissue Value: Germinating Seeds
  misc_feature: MA Experiment ID: 108577 Result: Up-regulated in Transcription
  misc_feature: MA Experiment 108577 PARAMETER Experiment Name: At_42deg_Heat_cDNA_P Parameter: Temperature (deg C) Value: 42 vs. 22
  misc_feature: MA Experiment 108577 PARAMETER Experiment Name: At_42deg_Heat_cDNA_P Parameter: Timepoint (hr) Value: 6
  misc_feature: MA Experiment 108577 PARAMETER Experiment Name: At_42deg_Heat_cDNA_P Parameter: Tissue Value: Aerial
  misc_feature: MA Experiment ID: 108594 Result: Down-regulated in Transcription
  misc_feature: MA Experiment 108594 PARAMETER Experiment Name: At_Ler-rhl_Root_cDNA_P Parameter: Plant Line Value: null
  misc_feature: MA Experiment ID: 108595 Result: Down-regulated in Transcription
  misc_feature: MA Experiment 108595 PARAMETER Experiment Name: At_Ler-pi_Ovule_cDNA_P Parameter: Plant Line Value: null
  misc_feature: MA Experiment ID: 20000090 Result: Down-regulated in Transcription
  misc_feature: MA Experiment ID: 20000111 Result: Up-regulated in Transcription
  misc_feature: MA Experiment 20000111 PARAMETER Experiment Name: At_42deg_Heat_cDNA_P Parameter: Temperature (deg C) Value: 42 vs. 22
  misc_feature: MA Experiment 20000111 PARAMETER Experiment Name: At_42deg_Heat_cDNA_P Parameter: Timepoint (hr) Value: 6
  misc_feature: MA Experiment 20000111 PARAMETER Experiment Name: At_42deg_Heat_cDNA_P Parameter: Tissue Value: Aerial
  misc_feature: MA Experiment ID: 20000113 Result: Up-regulated in Transcription
  misc_feature: MA Experiment 20000113 PARAMETER Experiment Name: At_42deg_Heat_cDNA_P Parameter: Temperature (deg C) Value: 42 vs. 22
  misc_feature: MA Experiment 20000113 PARAMETER Experiment Name: At_42deg_Heat_cDNA_P Parameter: Timepoint (hr) Value: 8
  misc_feature: MA Experiment 20000113 PARAMETER Experiment Name: At_42deg_Heat_cDNA_P Parameter: Tissue Value: Aerial
ctactagattaactattatacaatcaagcttcgtctccgcaagaacaagactcaattacgtctccaagacaaatcattctgggttcgcttgtcgttctctttcaaaacccagaaacttgagtctctctgtttattctatgggttcttctagttcttctccgaaaccagacaacgtccaagaggctgagaagaatgagtttgcttctctaagtgaaaatgaatggaagaaacggctaacaccagaacagtactacatcactagacagaagggcacagagagagctttcactggggagtattggaactcaaagacccctggagtatataattgtgtatgttgcgacacacctctatttgattcatcaacaaagtttgatagtggaacagggtggccatcttactaccaaccaattggaaacaatgtgaagacaaagctagacctctctatcatcttcatgcctagacaagaagttgtctgtgctgtttgtaacgcccatcttggtcatgtctttgacgacggtccacgcccaaccggaaaacgatattgcctcaacagtgctgctctgaaacttaacgcattggagaaaacaagagattgagagtttctggtacaaggatttgttcatattacataatatactgtatcattatatccactgtatttcctcgtatt

SEQ ID NO: 100774 - protein, 198 aa, Arabidopsis thaliana; identical to SEQ ID NO: 26728
  peptide (1)..(198): Ceres Seq. ID no. 13606049
  misc_feature (71)..(193): Pfam Name: SelR domain Pfam Description: SelR domain
  misc_feature (1)..(198): Homolog of NCBI NO: 30695559 NR Description: transcriptional regulator -related [Arabidopsis
  misc_feature (46)..(198): Homolog of NCBI NO: 21593253 NR Description: transcriptional regulator, putative [Arabidopsis >gi|26449723|dbj|BAC41985.1| putative transcriptional regulator
  misc_feature (70)..(188): Homolog of NCBI NO: 22298757 NR Description: ORF_ID:tlr1214~hypothetical protein
  misc_feature (70)..(189): Homolog of NCBI NO: 37523588 NR Description: hypothetical protein gll4019 [Gloeobacter
  misc_feature (70)..(191): Homolog of NCBI NO: 23040381 NR Description: hypothetical protein [Trichodesmium erythraeum
  misc_feature (70)..(194): Homolog of NCBI NO: 33597872 NR Description: peptide methionine sulfoxide reductase parapertussis] >gi|33602775|ref|NP_890335.1| peptide methionine reductase [Bordetella bronchiseptica]
  misc_feature (70)..(194): Homolog of NCBI NO: 33594433 NR Description: peptide methionine sulfoxide reductase pertussis] >gi|33564508|emb|CAE43823.1| peptide methionine
  misc_feature (31)..(196): Homolog of NCBI NO: 37620216 NR Description: hypothetical protein LOC253827 [Homo sapiens]
  misc_feature (70)..(191): Homolog of NCBI NO: 39997546 NR Description: PilB-related protein [Geobacter sulfurreducens
  misc_feature (62)..(189): Homolog of NCBI NO: 15678738 NR Description: transcriptional regulator [Methanothermobacter

SEQ ID NO: 100775 - protein, 153 aa, Arabidopsis thaliana; identical to SEQ ID NO: 26729
  peptide (1)..(153): Ceres Seq. ID no. 13606050
  misc_feature (26)..(148): Pfam Name: SelR domain Pfam Description: SelR domain
  misc_feature (1)..(153): Homolog of NCBI NO: 30695559 NR Description: transcriptional regulator -related [Arabidopsis
  misc_feature (1)..(153): Homolog of NCBI NO: 21593253 NR Description: transcriptional regulator, putative [Arabidopsis >gi|26449723|dbj|BAC41985.1| putative transcriptional regulator
  misc_feature (25)..(143): Homolog of NCBI NO: 22298757 NR Description: ORF_ID:tlr1214~hypothetical protein
  misc_feature (25)..(144): Homolog of NCBI NO: 37523588 NR Description: hypothetical protein gll4019 [Gloeobacter
  misc_feature (25)..(146): Homolog of NCBI NO: 23040381 NR Description: hypothetical protein [Trichodesmium erythraeum
  misc_feature (25)..(149): Homolog of NCBI NO: 33597872 NR Description: peptide methionine sulfoxide reductase parapertussis] >gi|33602775|ref|NP_890335.1| peptide methionine reductase [Bordetella bronchiseptica]
  misc_feature (25)..(149): Homolog of NCBI NO: 33594433 NR Description: peptide methionine sulfoxide reductase pertussis] >gi|33564508|emb|CAE43823.1| peptide methionine
  misc_feature (1)..(151): Homolog of NCBI NO: 37620216 NR Description: hypothetical protein LOC253827 [Homo sapiens]
  misc_feature (25)..(146): Homolog of NCBI NO: 39997546 NR Description: PilB-related protein [Geobacter sulfurreducens
  misc_feature (17)..(144): Homolog of NCBI NO: 15678738 NR Description: transcriptional regulator [Methanothermobacter

SEQ ID NO: 100776 - DNA, 1646 bp, Arabidopsis thaliana
  misc_feature (1)..(1646): Ceres Seq. ID no. 13606051
  misc_feature: MA Experiment ID: 108595 Result: Down-regulated in Transcription
  misc_feature: MA Experiment 108595 PARAMETER Experiment Name: At_Ler-pi_Ovule_cDNA_P Parameter: Plant Line Value: null
  misc_feature: MA Experiment ID: 20000072 Result: Up-regulated in Transcription
  misc_feature: MA Experiment 20000072 PARAMETER Experiment Name: At_100uM_ABA_Mutants_cDNA_P Parameter: Plant Line Value: CS8105
  misc_feature: MA Experiment 20000072 PARAMETER Experiment Name: At_100uM_ABA_Mutants_cDNA_P Parameter: Timepoint (hr) Value: 6
  misc_feature: MA Experiment 20000072 PARAMETER Experiment Name: At_100uM_ABA_Mutants_cDNA_P Parameter: Tissue Value: Aerial
  misc_feature: MA Experiment 20000072 PARAMETER Experiment Name: At_100uM_ABA_Mutants_cDNA_P Parameter: Treatment Value: 100uM ABA vs. No Treatment
  misc_feature: MA Experiment ID: 20000086 Result: Up-regulated in Transcription
  misc_feature: MA Experiment 20000086 PARAMETER Experiment Name: At_100uM_ABA_Mutants_cDNA_P Parameter: Plant Line Value: CS22
  misc_feature: MA Experiment 20000086 PARAMETER Experiment Name: At_100uM_ABA_Mutants_cDNA_P Parameter: Timepoint (hr) Value: 6
  misc_feature: MA Experiment 20000086 PARAMETER Experiment Name: At_100uM_ABA_Mutants_cDNA_P Parameter: Tissue Value: Aerial
  misc_feature: MA Experiment 20000086 PARAMETER Experiment Name: At_100uM_ABA_Mutants_cDNA_P Parameter: Treatment Value: 100uM ABA vs. No Treatment
  misc_feature: MA Experiment ID: 20000087 Result: Up-regulated in Transcription
  misc_feature: MA Experiment 20000087 PARAMETER Experiment Name: At_100uM_ABA_Mutants_cDNA_P Parameter: Plant Line Value: WS
  misc_feature: MA Experiment 20000087 PARAMETER Experiment Name: At_100uM_ABA_Mutants_cDNA_P Parameter: Timepoint (hr) Value: 6
  misc_feature: MA Experiment 20000087 PARAMETER Experiment Name: At_100uM_ABA_Mutants_cDNA_P Parameter: Tissue Value: Aerial
  misc_feature: MA Experiment 20000087 PARAMETER Experiment Name: At_100uM_ABA_Mutants_cDNA_P Parameter: Treatment Value: 100uM ABA vs. No Treatment
  misc_feature: MA Experiment ID: 20000088 Result: Up-regulated in Transcription
  misc_feature: MA Experiment 20000088 PARAMETER Experiment Name: At_100uM_ABA_Mutants_cDNA_P Parameter: Plant Line Value: Landsberg
  misc_feature: MA Experiment 20000088 PARAMETER Experiment Name: At_100uM_ABA_Mutants_cDNA_P Parameter: Timepoint (hr) Value: 6
  misc_feature: MA Experiment 20000088 PARAMETER Experiment Name: At_100uM_ABA_Mutants_cDNA_P Parameter: Tissue Value: Aerial
  misc_feature: MA Experiment 20000088 PARAMETER Experiment Name: At_100uM_ABA_Mutants_cDNA_P Parameter: Treatment Value: 100uM ABA vs. No Treatment
  misc_feature: MA Experiment ID: 20000090 Result: Up-regulated in Transcription
tatattcaatattcctaacgaaaaaatggccaaagcataaataccttatagcgatatttgagtatttaccataaaaccattcgaatactgtcacggttctaaatttctaatattgttcttttgttattaaaggaaagagtgaagggtgttttcgtcatttaacatatccatcgggtcaataacggagattacctatccggtgaccttatcccctcgccggtgagcgaatctcagatccaaaattttgcaaaatcctcagatcgtcttaccttctccgaatcgatcgatttttcatggaggacgacgacgagattcagtcaattccatctccgggagattcttccctttcaccacaagctcctccttctccgccgattttgccaacaaacgacgtgacggtggccgtcgtgaagaaaccacaaccggggctttcttctcaatctccgtccatgaacgctttagcgttagtggttcatactccttctgtaaccggtggtggtggtagcggaaacagaaacggacgaggaggaggaggaggaagcggtggtggtggaggaggaagagatgattgttggagcgaagaagctacaaaggttctaatcgaagcttggggagatcgattctctgaaccaggtaaaggaactttgaagcaacaacattggaaagaagtagctgagattgtgaacaagagtcgtcaatgcaaataccctaaaactgatattcagtgtaagaacagaattgatacggtgaagaagaagtataagcaagagaaagctaagattgcttctggtgatggacctagtaaatgggttttcttcaagaagcttgagagtttgattggtggtactacaacattcattgcttcttcaaaagcttcagagaaggctcctatgggaggagctcttgggaatagccgttcgagtatgtttaaacggcaaactaaaggtaatcagattgtgcagcaacaacaagagaagagaggctctgattcgatgcggtggcattttaggaaacgtagtgcttctgagactgagtctgagtctgatcctgaacctgaggcttctcctgaggaatctgctgagagtctcccacctttgcaaccgattcaaccgctttcgtttcatatgccaaagcggttgaaggtggataagagtggaggtggagggagtggagttggagatgtggcgagggcgatacttggatttacggaagcttatgagaaggcggaaactgctaagcttaagttaatggcggaactggaaaaggagaggatgaaatttgctaaagagatggagttgcagagaatgcagttcttgaaaactcaattggagataacacagaacaatcaagaagaggaagagaggagcaggcagcgaggagaaaggaggatcgttgatgatgatgatgatcgcaatggcaagaataacggcaatgtaagtagctgacaattgaacacacaaatgttcctatgatatttgctatgataagctggattttaggttttgatgttgttgttgttgttattgttactgccttgtgggatgtgtaaatgtagagaagttatgactctgattatcatcatgttgttgttattgttatccatcttcttgtcttaaacatgggcaaattaaaaagctttgaacttg

SEQ ID NO: 100777 - protein, 383 aa, Arabidopsis thaliana; identical to SEQ ID NO: 40903
  peptide (1)..(383): Ceres Seq. ID no. 13606052
  misc_feature (1)..(383): Homolog of NCBI NO: 18404771 NR Description: expressed protein [Arabidopsis thaliana]
  misc_feature (1)..(217): Homolog of NCBI NO: 15231799 NR Description: expressed protein [Arabidopsis thaliana]
  misc_feature (48)..(349): Homolog of NCBI NO: 38344545 NR Description: OSJNBa0027P08.13 [Oryza sativa (japonica
  misc_feature (90)..(363): Homolog of NCBI NO: 18149189 NR Description: 6b-interacting protein 1 [Nicotiana tabacum]
  misc_feature (89)..(183): Homolog of NCBI NO: 10178132 NR Description: gb|AAF01512.1~gene_id:MOP10.9~similar to unknown
  misc_feature (89)..(183): Homolog of NCBI NO: 30680994 NR Description: expressed protein [Arabidopsis thaliana]
  misc_feature (279)..(367): Homolog of NCBI NO: 30680994 NR Description: expressed protein [Arabidopsis thaliana]
  misc_feature (279)..(364): Homolog of NCBI NO: 10178132 NR Description: gb|AAF01512.1~gene_id:MOP10.9~similar to unknown
  misc_feature (89)..(183): Homolog of NCBI NO: 18414919 NR Description: expressed protein [Arabidopsis thaliana] AT5g05550/MOP10_9 [Arabidopsis thaliana]
  misc_feature (279)..(364): Homolog of NCBI NO: 18414919 NR Description: expressed protein [Arabidopsis thaliana] AT5g05550/MOP10_9 [Arabidopsis thaliana]

SEQ ID NO: 100778 - protein, 331 aa, Arabidopsis thaliana; identical to SEQ ID NO: 40904
  peptide (1)..(331): Ceres Seq. ID no. 13606053
  misc_feature (1)..(331): Homolog of NCBI NO: 18404771 NR Description: expressed protein [Arabidopsis thaliana]
  misc_feature (1)..(165): Homolog of NCBI NO: 15231799 NR Description: expressed protein [Arabidopsis thaliana]
  misc_feature (1)..(297): Homolog of NCBI NO: 38344545 NR Description: OSJNBa0027P08.13 [Oryza sativa (japonica
  misc_feature (38)..(311): Homolog of NCBI NO: 18149189 NR Description: 6b-interacting protein 1 [Nicotiana tabacum]
  misc_feature (37)..(131): Homolog of NCBI NO: 10178132 NR Description: gb|AAF01512.1~gene_id:MOP10.9~similar to unknown
  misc_feature (37)..(131): Homolog of NCBI NO: 30680994 NR Description: expressed protein [Arabidopsis thaliana]
  misc_feature (227)..(315): Homolog of NCBI NO: 30680994 NR Description: expressed protein [Arabidopsis thaliana]
  misc_feature (227)..(312): Homolog of NCBI NO: 10178132 NR Description: gb|AAF01512.1~gene_id:MOP10.9~similar to unknown
  misc_feature (37)..(131): Homolog of NCBI NO: 18414919 NR Description: expressed protein [Arabidopsis thaliana] AT5g05550/MOP10_9 [Arabidopsis thaliana]
  misc_feature (227)..(312): Homolog of NCBI NO: 18414919 NR Description: expressed protein [Arabidopsis thaliana] AT5g05550/MOP10_9 [Arabidopsis thaliana]

SEQ ID NO: 100779 - DNA, 1427 bp, Arabidopsis thaliana
  misc_feature (1)..(1427): Ceres Seq. ID no. 13606054
  misc_feature: MA Experiment ID: 108434 Result: Down-regulated in Transcription
  misc_feature: MA Experiment 108434 PARAMETER Experiment Name: At_Root_Tips_cDNA_P Parameter: Tissue Value: Root Tips
  misc_feature: MA Experiment ID: 108461 Result: Up-regulated in Transcription
  misc_feature: MA Experiment 108461 PARAMETER Experiment Name: At_Germinating_Seeds_cDNA_P Parameter: Age (day) Value: 1 vs. 0
  misc_feature: MA Experiment 108461 PARAMETER Experiment Name: At_Germinating_Seeds_cDNA_P Parameter: Tissue Value: Germinating Seeds
  misc_feature: MA Experiment ID: 108501 Result: Up-regulated in Transcription
  misc_feature: MA Experiment 108501 PARAMETER Experiment Name: At_ap2_floral_buds_cDNA_P Parameter: Plant Line Value: ap2 (Ler.)
  misc_feature: MA Experiment 108501 PARAMETER Experiment Name: At_ap2_floral_buds_cDNA_P Parameter: Tissue Value: Closed Flower
  misc_feature: MA Experiment ID: 108569 Result: Up-regulated in Transcription
  misc_feature: MA Experiment 108569 PARAMETER Experiment Name: At_0.001%_MeJA__cDNA_P Parameter: Timepoint (hr) Value: 6
  misc_feature: MA Experiment 108569 PARAMETER Experiment Name: At_0.001%_MeJA__cDNA_P Parameter: Tissue Value: Aerial
  misc_feature: MA Experiment 108569 PARAMETER Experiment Name: At_0.001%_MeJA__cDNA_P Parameter: Treatment Value: 0.001% MeJA vs. No Treatment
  misc_feature: MA Experiment ID: 108594 Result: Down-regulated in Transcription
  misc_feature: MA Experiment 108594 PARAMETER Experiment Name: At_Ler-rhl_Root_cDNA_P Parameter: Plant Line Value: null
  misc_feature: MA Experiment ID: 20000068 Result: Up-regulated in Transcription
  misc_feature: MA Experiment ID: 20000112 Result: Down-regulated in Transcription
  misc_feature: MA Experiment 20000112 PARAMETER Experiment Name: At_42deg_Heat_cDNA_P Parameter: Temperature (deg C) Value: 42 vs. 22
  misc_feature: MA Experiment 20000112 PARAMETER Experiment Name: At_42deg_Heat_cDNA_P Parameter: Timepoint (hr) Value: 2
  misc_feature: MA Experiment 20000112 PARAMETER Experiment Name: At_42deg_Heat_cDNA_P Parameter: Tissue Value: Aerial
  misc_feature: MA Experiment ID: 20000171 Result: Down-regulated in Transcription
  misc_feature: MA Experiment 20000171 PARAMETER Experiment Name: At_42deg_Heat_P Parameter: Age (day) Value: 14
  misc_feature: MA Experiment 20000171 PARAMETER Experiment Name: At_42deg_Heat_P Parameter: Organism Value: A. thaliana
  misc_feature: MA Experiment 20000171 PARAMETER Experiment Name: At_42deg_Heat_P Parameter: Plant Line Value: WS
  misc_feature: MA Experiment 20000171 PARAMETER Experiment Name: At_42deg_Heat_P Parameter: Temperature (deg C) Value: 42 vs. 22
  misc_feature: MA Experiment 20000171 PARAMETER Experiment Name: At_42deg_Heat_P Parameter: Timepoint (hr) Value: 1
  misc_feature: MA Experiment 20000171 PARAMETER Experiment Name: At_42deg_Heat_P Parameter: Tissue Value: Aerial
  misc_feature: MA Experiment ID: 20000173 Result: Down-regulated in Transcription
  misc_feature: MA Experiment 20000173 PARAMETER Experiment Name: At_42deg_Heat_P Parameter: Age (day) Value: 14
  misc_feature: MA Experiment 20000173 PARAMETER Experiment Name: At_42deg_Heat_P Parameter: Organism Value: A. thaliana
  misc_feature: MA Experiment 20000173 PARAMETER Experiment Name: At_42deg_Heat_P Parameter: Plant Line Value: WS
  misc_feature: MA Experiment 20000173 PARAMETER Experiment Name: At_42deg_Heat_P Parameter: Temperature (deg C) Value: 42 vs. 22
  misc_feature: MA Experiment 20000173 PARAMETER Experiment Name: At_42deg_Heat_P Parameter: Timepoint (hr) Value: 6
  misc_feature: MA Experiment 20000173 PARAMETER Experiment Name: At_42deg_Heat_P Parameter: Tissue Value: Aerial
  misc_feature: MA Experiment ID: 20000185 Result: Up-regulated in Transcription
  misc_feature: MA Experiment 20000185 PARAMETER Experiment Name: At_Roots__P Parameter: Age (day) Value: 7 vs. 21
  misc_feature: MA Experiment 20000185 PARAMETER Experiment Name: At_Roots__P Parameter: Organism Value: A. thaliana
  misc_feature: MA Experiment 20000185 PARAMETER Experiment Name: At_Roots__P Parameter: Tissue Value: Roots vs. Whole Plant
  misc_feature: MA Experiment ID: 20000224 Result: Up-regulated in Transcription
  misc_feature: MA Experiment ID: 20000234 Result: Up-regulated in Transcription
  misc_feature: MA Experiment 20000234 PARAMETER Experiment Name: At_Siliques_P Parameter: Age (day) Value: 21
  misc_feature: MA Experiment 20000234 PARAMETER Experiment Name: At_Siliques_P Parameter: Organism Value: A. thaliana
  misc_feature: MA Experiment 20000234 PARAMETER Experiment Name: At_Siliques_P Parameter: Plant Line Value: WS
  misc_feature: MA Experiment 20000234 PARAMETER Experiment Name: At_Siliques_P Parameter: Tissue Value: Less Than 5mm Siliques vs. Whole Plant
  misc_feature: MA Experiment ID: 20000439 Result: Up-regulated in Transcription
  misc_feature: MA Experiment 20000439 PARAMETER Experiment Name: At_Roots__P Parameter: Age (day) Value: 14 vs. 21
  misc_feature: MA Experiment 20000439 PARAMETER Experiment Name: At_Roots__P Parameter: Organism Value: A. thaliana
  misc_feature: MA Experiment 20000439 PARAMETER Experiment Name: At_Roots__P Parameter: Tissue Value: Roots vs. Whole Plant
gtaataatattcttttaaaaaaatagaaacgttggtcacgaggcctcatcaatgcttttgataccttccttcaccgcaaattctaacgaaccaccaccgtcgaagctttctctttccgatctttcaatggcgattctcaaatctcacttcttcttactcttccctcttcttcttctccactttcacactgtctcctttgctcagacgctctttgtgttcggagatggtctttacgacgccggaaacaaacagtttctctctcagaaccgagttgacgcaagctttcctccttatggagtcactgtaggacaagccaccggacggtggtccgatggttctatcgttcctgattatcttgctaaattcatgggaattcctaaaatctctccgattctcctaaccacggcggatttttctcacggagctaatttcgccatcgccgacgctaccgttcttggctctcctccggagacgatgactttgtcacaacaagtgaagaaattctcggaaaacaagaataagtggacaaatcaaacacgttctgaagctatctacttgatctacattggttctgatgattacttgagctatgctaagagtaatccaagtccatcagatactcagaaacaagcttttgttgatcaagtcatcactaccataaaagcagaaataaaggtggtttacgggtctggcggaaggaaattcgcattccagaacttggcaccgttaggttgcttaccggccgtgaaacaagcaagcggaaatgttcaagaatgtgtgaaattgccttcggaaatggctgctttgcataacaagaaacttttgcagctcttggttgaactatcaagagaactaaatggtttccagtactcgttttacgacttctttagctcgatccaaaacagagttatcaagtctaagacttatacattcgagacaggaaacgctgcttgttgtggaactggctctatcaacgggagtaattgctcagctaaaaatgtatgcgccaagcctgaagagtatatcttctttgatggtaagcatttgacgcaagaagccaaccttcaggtcgggcatttgatgtggggagcagatccggaagtgattggaccgaacaatatcagggagcttatggtccttcctctagacattacagtcatcttagctggtatacaagaagctatggctgccatgagaccgagacagagcaacattgagagtctctatgatatcaagaagatggagtcagagatggataatcattggctttatcaagttgacaaagctatctcctttatgatataagattgtggttacagtttgatttaagcgagagagtttaagagctagtgtaacaaagaactagcaagaaaactgaaacatccatttttcttgtttagtaataaaacaatcaaccttattaagtc

SEQ ID NO: 100780 - protein, 417 aa, Arabidopsis thaliana; identical to SEQ ID NO: 25250
  peptide (1)..(417): Ceres Seq. ID no. 13606055
  misc_feature (53)..(344): Pfam Name: GDSL-like Lipase/Acylhydrolase Pfam Description: GDSL-like Lipase/Acylhydrolase
  misc_feature (1)..(417): Homolog of NCBI NO: 25405684 NR Description: hypothetical protein F15I1.11 [imported] - thaliana >gi|4587544|gb|AAD25775.1|AC006577_11 Belongs to the
  misc_feature (1)..(417): Homolog of NCBI NO: 15221023 NR Description: myrosinase-associated protein - related
  misc_feature (26)..(417): Homolog of NCBI NO: 21593567 NR Description: myrosinase-associated protein, putative
  misc_feature (53)..(369): Homolog of NCBI NO: 15231805 NR Description: myrosinase-associated protein, putative
  misc_feature (53)..(369): Homolog of NCBI NO: 15450435 NR Description: AT3g14210/MAG2_18 [Arabidopsis thaliana]
  misc_feature (53)..(386): Homolog of NCBI NO: 18404748 NR Description: myrosinase-associated protein, putative thaliana] >gi|17064952|gb|AAL32630.1| Unknown protein thaliana] >gi|20259964|gb|AAM13329.1| unknown protein
  misc_feature (53)..(386): Homolog of NCBI NO: 21618218 NR Description: myrosinase-associated protein, putative
  misc_feature (53)..(366): Homolog of NCBI NO: 21592973 NR Description: myrosinase-associated protein, putative
  misc_feature (53)..(389): Homolog of NCBI NO: 25336315 NR Description: hypothetical protein F15I1.9 [imported] - thaliana >gi|4587542|gb|AAD25773.1|AC006577_9 Belongs to the
  misc_feature (53)..(366): Homolog of NCBI NO: 15221019 NR Description: myrosinase-associated protein, putative

SEQ ID NO: 100781 - protein, 392 aa, Arabidopsis thaliana; identical to SEQ ID NO: 25251
  peptide (1)..(392): Ceres Seq. ID no. 13606056
  misc_feature (28)..(319): Pfam Name: GDSL-like Lipase/Acylhydrolase Pfam Description: GDSL-like Lipase/Acylhydrolase
  misc_feature (1)..(392): Homolog of NCBI NO: 25405684 NR Description: hypothetical protein F15I1.11 [imported] - thaliana >gi|4587544|gb|AAD25775.1|AC006577_11 Belongs to the
  misc_feature (1)..(392): Homolog of NCBI NO: 15221023 NR Description: myrosinase-associated protein - related
  misc_feature (1)..(392): Homolog of NCBI NO: 21593567 NR Description: myrosinase-associated protein, putative
  misc_feature (28)..(344): Homolog of NCBI NO: 15231805 NR Description: myrosinase-associated protein, putative
  misc_feature (28)..(344): Homolog of NCBI NO: 15450435 NR Description: AT3g14210/MAG2_18 [Arabidopsis thaliana]
  misc_feature (28)..(361): Homolog of NCBI NO: 18404748 NR Description: myrosinase-associated protein, putative thaliana] >gi|17064952|gb|AAL32630.1| Unknown protein thaliana] >gi|20259964|gb|AAM13329.1| unknown protein
  misc_feature (28)..(361): Homolog of NCBI NO: 21618218 NR Description: myrosinase-associated protein, putative
  misc_feature (28)..(341): Homolog of NCBI NO: 21592973 NR Description: myrosinase-associated protein, putative
  misc_feature (28)..(364): Homolog of NCBI NO: 25336315 NR Description: hypothetical protein F15I1.9 [imported] - thaliana >gi|4587542|gb|AAD25773.1|AC006577_9 Belongs to the
  misc_feature (28)..(341): Homolog of NCBI NO: 15221019 NR Description: myrosinase-associated protein, putative

SEQ ID NO: 100782 - protein, 312 aa, Arabidopsis thaliana; identical to SEQ ID NO: 25252
  peptide (1)..(312): Ceres Seq. ID no. 13606057
  misc_feature (1)..(239): Pfam Name: GDSL-like Lipase/Acylhydrolase Pfam Description: GDSL-like Lipase/Acylhydrolase
  misc_feature (1)..(312): Homolog of NCBI NO: 25405684 NR Description: hypothetical protein F15I1.11 [imported] - thaliana >gi|4587544|gb|AAD25775.1|AC006577_11 Belongs to the
  misc_feature (1)..(312): Homolog of NCBI NO: 15221023 NR Description: myrosinase-associated protein - related
  misc_feature (1)..(312): Homolog of NCBI NO: 21593567 NR Description: myrosinase-associated protein, putative
  misc_feature (1)..(264): Homolog of NCBI NO: 15231805 NR Description: myrosinase-associated protein, putative
  misc_feature (1)..(264): Homolog of NCBI NO: 15450435 NR Description: AT3g14210/MAG2_18 [Arabidopsis thaliana]
  misc_feature (1)..(281): Homolog of NCBI NO: 18404748 NR Description: myrosinase-associated protein, putative thaliana] >gi|17064952|gb|AAL32630.1| Unknown protein thaliana] >gi|20259964|gb|AAM13329.1| unknown protein
  misc_feature (1)..(281): Homolog of NCBI NO: 21618218 NR Description: myrosinase-associated protein, putative
  misc_feature (1)..(261): Homolog of NCBI NO: 21592973 NR Description: myrosinase-associated protein, putative
  misc_feature (1)..(284): Homolog of NCBI NO: 25336315 NR Description: hypothetical protein F15I1.9 [imported] - thaliana >gi|4587542|gb|AAD25773.1|AC006577_9 Belongs to the
  misc_feature (1)..(261): Homolog of NCBI NO: 15221019 NR Description: myrosinase-associated protein, putative

SEQ ID NO: 100783 - DNA, 1635 bp, Arabidopsis thaliana
  misc_feature (1)..(1635): Ceres Seq. ID no. 13606058
  misc_feature: MA Experiment ID: 20000173 Result: Down-regulated in Transcription
  misc_feature: MA Experiment 20000173 PARAMETER Experiment Name: At_42deg_Heat_P Parameter: Age (day) Value: 14
  misc_feature: MA Experiment 20000173 PARAMETER Experiment Name: At_42deg_Heat_P Parameter: Organism Value: A. thaliana
  misc_feature: MA Experiment 20000173 PARAMETER Experiment Name: At_42deg_Heat_P Parameter: Plant Line Value: WS
  misc_feature: MA Experiment 20000173 PARAMETER Experiment Name: At_42deg_Heat_P Parameter: Temperature (deg C) Value: 42 vs. 22
  misc_feature: MA Experiment 20000173 PARAMETER Experiment Name: At_42deg_Heat_P Parameter: Timepoint (hr) Value: 6
  misc_feature: MA Experiment 20000173 PARAMETER Experiment Name: At_42deg_Heat_P Parameter: Tissue Value: Aerial
  misc_feature: MA Experiment ID: 20000179 Result: Down-regulated in Transcription
  misc_feature: MA Experiment 20000179 PARAMETER Experiment Name: At_Germinating_Seeds_P Parameter: Age (hr) Value: 6 vs. 0
  misc_feature: MA Experiment 20000179 PARAMETER Experiment Name: At_Germinating_Seeds_P Parameter: Tissue Value: Germinating Seeds
  misc_feature: MA Experiment ID: 20000184 Result: Down-regulated in Transcription
  misc_feature: MA Experiment 20000184 PARAMETER Experiment Name: At_Shoots__P Parameter: Age (day) Value: 7
  misc_feature: MA Experiment 20000184 PARAMETER Experiment Name: At_Shoots__P Parameter: Tissue Value: Shoots vs. Whole Plant
  misc_feature: MA Experiment ID: 20000227 Result: Up-regulated in Transcription
  misc_feature: MA Experiment 20000227 PARAMETER Experiment Name: At_Root-Tips-vs-Tops_P Parameter: Tissue Value: Root Tips vs. Root Tops
gtttacatttactgttgttaaggccgagagatagatagaaaaaaacatctgtgcgattttgccgcctctccctaaaatctttggagctccttcgtagttagccggaggtgaagtacaataaaagaaagaagaaagtccaagtgtctcttctcatctcttttctccagtagataatggaggggagattggctaatatgtggaggttgactgttaacgaaagtaaattcgtggaaactgcgttgcaatctgagctcagagtagatggtcgtggcctttatgattatcgcaagcttactattaagtttggcaaagaatatggtagctcggaagttcaacttggtcagactcatgtaatgggtttcgtgactgctcagttggtacaaccttacaaagacagacctaatgaagggtctctctcgatcttcacggaattttctccaatggctgatccgtcttttgagcctggtcgtcctggcgaatctgcagtggagttgggacgcattatcgatcgtggtctaagagaaagccgtgcagtagatacagagtcactctgcgttctagctggaaagatggtttggtctgttcgcattgaccttcatatcttggacaatggagggaacttagttgatgctgcaaatattgctgctttagcagctctcatgacatttaggagacccgactgcactgtaggaggagagaatggtcaagaagtgatcatacatccactagaggaaagggaaccacttccattgataatacatcatctcccaatagccttcacgtttggattttttaataaaggcaacattgtggtgatggacccaacttatgttgaagaagcagttatgtgtgggagaatgactgtgacagttaatgccaatggcgatatatgcgcaatccaaaaaccgggggaagaaggcgtgaaccagagtgtaatccttcattgcctgcgtcttgcttcttcaagagctgctgcaacaacaaagatcattagagaagaagttgaagcatataactgtgagagaagcttacagaaggtgaagcgacatcccactttggctaaatctgaagtttctggacctactgtagctgtgaaggaggaacataggaagtcctcagatcaggaaagagctgcagagatatctcgagaacatgttgaaagactaaagctctctacggaggaagtaagaagcagtaaggaagaagaagctgccaatttcaaaggcggtccctcaaattgggacccttactcagaagctatggatgttgattcactgaaagtttctcttgcttcaagaggggatcccgttactaagtcatcgagcacgaagaaaatgaacggctctggaaatgcgcagaaggttggtgttgagatttcagttgaggaagtaaccggagaattagggaagaaggatacaaaacacaaggatggagaaatgacacttaaagatgctgtcaaacctaaaaagaagcggaaaaacaaaagctgagttaaagcattttcccgatcactcgtacttttcttcttcccttgaaactcaagactatagacggtttatggtcaattgtatctgaaaaaagtcaaaagttttgttaaattttgtttcataagatgaggcccatgattaaaaaccc

SEQ ID NO: 100784 - protein, 438 aa, Arabidopsis thaliana
  peptide (1)..(438): Ceres Seq. ID no. 13606059
  misc_feature (36)..(168): Pfam Name: 3' exoribonuclease family, domain 1 Pfam Description: 3' exoribonuclease family, domain 1
  misc_feature (1)..(438): Homolog of NCBI NO: 15232342 NR Description: nucleolar autoantigen - like protein [Arabidopsis
  misc_feature (1)..(307): Homolog of NCBI NO: 18399822 NR Description: expressed protein [Arabidopsis thaliana]
  misc_feature (1)..(307): Homolog of NCBI NO: 21536581 NR Description: nucleolar autoantigen-like protein [Arabidopsis
  misc_feature (15)..(326): Homolog of NCBI NO: 9506981 NR Description: polymyositis/scleroderma autoantigen 1 [Mus >gi|14285679|sp|Q9JHI7|RR45_MOUSE Exosome complex exonuclease (Polymyositis/scleroderma autoantigen 1) (Autoantigen PM/Scl 1)
  misc_feature (15)..(326): Homolog of NCBI NO: 12847890 NR Description: unnamed protein product [Mus musculus]
  misc_feature (12)..(278): Homolog of NCBI NO: 19075183 NR Description: putative exosome 3'-5' exoribonuclease complex;
  misc_feature (15)..(326): Homolog of NCBI NO: 34856829 NR Description: similar to polymyositis scleroderma overlap
  misc_feature (15)..(326): Homolog of NCBI NO: 28172864 NR Description: polymyositis/scleroderma autoantigen 1 [Homo
  misc_feature (15)..(326): Homolog of NCBI NO: 28172868 NR Description: polymyositis/scleroderma autoantigen 1 [Homo
  misc_feature (28)..(326): Homolog of NCBI NO: 14285675 NR Description: Exosome complex exonuclease RRP45 autoantigen 1) (Autoantigen PM/Scl 1) (Polymyositis/scleroderma
MEGRLANMWRLTVNESKFVETALQSELRVDGRGLYDYRKLTIKFGKEYGSSEVQLGQTHVMGFVTAQLVQPYKDRPNEGSLSIFTEFSPMADPSFEPGRPGESAVELGRIIDRGLRESRAVDTESLCVLAGKMVWSVRIDLHILDNGGNLVDAANIAALAALMTFRRPDCTVGGENGQEVIIHPLEEREPLPLIIHHLPIAFTFGFFNKGNIVVMDPTYVEEAVMCGRMTVTVNANGDICAIQKPGEEGVNQSVILHCLRLASSRAAATTKIIREEVEAYNCERSLQKVKRHPTLAKSEVSGPTVAVKEEHRKSSDQERAAEISREHVERLKLSTEEVRSSKEEEAANFKGGPSNWDPYSEAMDVDSLKVSLASRGDPVTKSSSTKKMNGSGNAQKVGVEISVEEVTGELGKKDTKHKDGEMTLKDAVKPKKKRKNKS

SEQ ID NO: 100785 - protein, 431 aa, Arabidopsis thaliana
  peptide (1)..(431): Ceres Seq. ID no. 13606060
  misc_feature (29)..(161): Pfam Name: 3' exoribonuclease family, domain 1 Pfam Description: 3' exoribonuclease family, domain 1
  misc_feature (1)..(431): Homolog of NCBI NO: 15232342 NR Description: nucleolar autoantigen - like protein [Arabidopsis
  misc_feature (1)..(300): Homolog of NCBI NO: 18399822 NR Description: expressed protein [Arabidopsis thaliana]
  misc_feature (1)..(300): Homolog of NCBI NO: 21536581 NR Description: nucleolar autoantigen-like protein [Arabidopsis
  misc_feature (8)..(319): Homolog of NCBI NO: 9506981 NR Description: polymyositis/scleroderma autoantigen 1 [Mus >gi|14285679|sp|Q9JHI7|RR45_MOUSE Exosome complex exonuclease (Polymyositis/scleroderma autoantigen 1) (Autoantigen PM/Scl 1)
  misc_feature (8)..(319): Homolog of NCBI NO: 12847890 NR Description: unnamed protein product [Mus musculus]
  misc_feature (5)..(271): Homolog of NCBI NO: 19075183 NR Description: putative exosome 3'-5' exoribonuclease complex;
  misc_feature (8)..(319): Homolog of NCBI NO: 34856829 NR Description: similar to polymyositis scleroderma overlap
  misc_feature (8)..(319): Homolog of NCBI NO: 28172864 NR Description: polymyositis/scleroderma autoantigen 1 [Homo
  misc_feature (8)..(319): Homolog of NCBI NO: 28172868 NR Description: polymyositis/scleroderma autoantigen 1 [Homo
  misc_feature (21)..(319): Homolog of NCBI NO: 14285675 NR Description: Exosome complex exonuclease RRP45 autoantigen 1) (Autoantigen PM/Scl 1) (Polymyositis/scleroderma
MWRLTVNESKFVETALQSELRVDGRGLYDYRKLTIKFGKEYGSSEVQLGQTHVMGFVTAQLVQPYKDRPNEGSLSIFTEFSPMADPSFEPGRPGESAVELGRIIDRGLRESRAVDTESLCVLAGKMVWSVRIDLHILDNGGNLVDAANIAALAALMTFRRPDCTVGGENGQEVIIHPLEEREPLPLIIHHLPIAFTFGFFNKGNIVVMDPTYVEEAVMCGRMTVTVNANGDICAIQKPGEEGVNQSVILHCLRLASSRAAATTKIIREEVEAYNCERSLQKVKRHPTLAKSEVSGPTVAVKEEHRKSSDQERAAEISREHVERLKLSTEEVRSSKEEEAANFKGGPSNWDPYSEAMDVDSLKVSLASRGDPVTKSSSTKKMNGSGNAQKVGVEISVEEVTGELGKKDTKHKDGEMTLKDAVKPKKKRKNKS

SEQ ID NO: 100786 - protein, 378 aa, Arabidopsis thaliana
  peptide (1)..(378): Ceres Seq. ID no. 13606061
  misc_feature (1)..(108): Pfam Name: 3' exoribonuclease family, domain 1 Pfam Description: 3' exoribonuclease family, domain 1
  misc_feature (1)..(378): Homolog of NCBI NO: 15232342 NR Description: nucleolar autoantigen - like protein [Arabidopsis
  misc_feature (1)..(247): Homolog of NCBI NO: 18399822 NR Description: expressed protein [Arabidopsis thaliana]
  misc_feature (1)..(247): Homolog of NCBI NO: 21536581 NR Description: nucleolar autoantigen-like protein [Arabidopsis
  misc_feature (1)..(266): Homolog of NCBI NO: 9506981 NR Description: polymyositis/scleroderma autoantigen 1 [Mus >gi|14285679|sp|Q9JHI7|RR45_MOUSE Exosome complex exonuclease (Polymyositis/scleroderma autoantigen 1) (Autoantigen PM/Scl 1)
  misc_feature (1)..(266): Homolog of NCBI NO: 12847890 NR Description: unnamed protein product [Mus musculus]
  misc_feature (1)..(218): Homolog of NCBI NO: 19075183 NR Description: putative exosome 3'-5' exoribonuclease complex;
  misc_feature (1)..(266): Homolog of NCBI NO: 34856829 NR Description: similar to polymyositis scleroderma overlap
  misc_feature (1)..(266): Homolog of NCBI NO: 28172864 NR Description: polymyositis/scleroderma autoantigen 1 [Homo
  misc_feature (1)..(266): Homolog of NCBI NO: 28172868 NR Description: polymyositis/scleroderma autoantigen 1 [Homo
  misc_feature (1)..(266): Homolog of NCBI NO: 14285675 NR Description: Exosome complex exonuclease RRP45 autoantigen 1) (Autoantigen PM/Scl 1) (Polymyositis/scleroderma
MGFVTAQLVQPYKDRPNEGSLSIFTEFSPMADPSFEPGRPGESAVELGRIIDRGLRESRAVDTESLCVLAGKMVWSVRIDLHILDNGGNLVDAANIAALAALMTFRRPDCTVGGENGQEVIIHPLEEREPLPLIIHHLPIAFTFGFFNKGNIVVMDPTYVEEAVMCGRMTVTVNANGDICAIQKPGEEGVNQSVILHCLRLASSRAAATTKIIREEVEAYNCERSLQKVKRHPTLAKSEVSGPTVAVKEEHRKSSDQERAAEISREHVERLKLSTEEVRSSKEEEAANFKGGPSNWDPYSEAMDVDSLKVSLASRGDPVTKSSSTKKMNGSGNAQKVGVEISVEEVTGELGKKDTKHKDGEMTLKDAVKPKKKRKNKS

SEQ ID NO: 100787 - DNA, 2002 bp, Arabidopsis thaliana
  misc_feature (1)..(2002): Ceres Seq. ID no. 13606070
  misc_feature: MA Experiment ID: 20000171 Result: Down-regulated in Transcription
  misc_feature: MA Experiment 20000171 PARAMETER Experiment Name: At_42deg_Heat_P Parameter: Age (day) Value: 14
  misc_feature: MA Experiment 20000171 PARAMETER Experiment Name: At_42deg_Heat_P Parameter: Organism Value: A. thaliana
  misc_feature: MA Experiment 20000171 PARAMETER Experiment Name: At_42deg_Heat_P Parameter: Plant Line Value: WS
  misc_feature: MA Experiment 20000171 PARAMETER Experiment Name: At_42deg_Heat_P Parameter: Temperature (deg C) Value: 42 vs. 22
  misc_feature: MA Experiment 20000171 PARAMETER Experiment Name: At_42deg_Heat_P Parameter: Timepoint (hr) Value: 1
  misc_feature: MA Experiment 20000171 PARAMETER Experiment Name: At_42deg_Heat_P Parameter: Tissue Value: Aerial
gtgtgcattcgtttcttccaaatgcatccaaagcaaagcaccattaaaatccttcaaagcaaaaaccttctctcaagtttttttgactgttattaactcttaggttggtcaatcagaatcaagtctttttcgtttcccaattcgatttggattttgttttcttcttcttcttcttcttcttctcgagattgcgtattttgagcgatgcgggaagtggaaacaacggcaatcacagcagctcctccacaattctctcaaatgtttcagaaattagccatggccgtcaagaccaagacctacgagttcttcaccgaagacgataatgagagaaccgatgctgagggtttctctcttctcgattcctccgaggattttatcaccgatcagaaagtcgtcgttcttaaacccgataagcctcttcttagtgcttcttctccgggatctcctattgaatctccggtgaacgatgttcagacgaagaatttgggtgtggtaagtgttgttaaacctaatcaaaagaagctttctcaggttaggaaattggatacacagatgggattgagtttgatttcttctgttttcgctactgcttcgtcttttgaagcttcgtatcttcaattgcaagctgctcacgcgccgtttgttgaggaaaatgtcaaggctgctgatagagctctcgtatctaacctccagaaattgtctgatttgaagcagttttataggaattatcgccaaagtttggattttgagtctgatttagctattgggtcttgcttagaatctcgtgttcaggagaatcagagcaagcttagagctttggaaaccgtctcaaatcgtttacaagctgagatggatgcaaaggatttgcaggtttggagtctgaggaacaaattaggtgagattcagaaatctacttccaagttgtctaagagattgtcttcaaattcatcgttggatgttctgttatcggttagggtttttgagtctctgttgtatgatgcctttaaagctactcagaaattcactaagattctgattgagttgatggaaaaagctgggtgggatttggatttagtggctaagtctgttcatcctgaggtagattatgctaaggagagacataaccggtatgcattgttgtcgtatgtttgcttggggatgtttcgtggttttgatggagaaggatttgatctaaatgagaatgattatgaagagtctgagagaagttctgtagattcttccttgagggaattgatgcaacatgtatcgagtaatccgatggagcttcttgatagagataaagattgtgcattctctagattttgcgataagaagtatcacgagctgattcatccgaacatggcatcttcgatattcagtaacatggatgaaaacgaagctgtgttgagttcttggagatctttgagcacattctatgaatcgtttgtcacgatggctagctcgatttggacccttcacaagttagccttgtcctttgatcctgcagttgagattttccaagttgaaagcggagtggaattttcgattgttttcatggagaatgtcttaaaaagaaaacaagataagaagttttcgatgagtcctactcgagccaaagtaggattcacagtggttcccgggtttaaaatcgggtgcaccgtgattcagtgtcaagtttaccttaccggcggctccaaaatgtaaatgaaagagaccgatggttaagccggcgctcaagtttcttttcacaaagctgcttcaagaacttggcagctcacgaagactatatgagttataacttttttaccttcttccttttctgtgattaattgtgttcctttaagtctgatttgagttcttgatttcgttttaaagtgtacagaaggttctaaagctatggtgatttttttctttgtttgaattgcaatgaattcaattgtttctctttatcgtagtaagatgtaacagattgattatcaaaatatagtcagtttttcacaat

SEQ ID NO: 100788 - protein, 499 aa, Arabidopsis thaliana
  peptide (1)..(499): Ceres Seq. ID no. 13606071
  misc_feature (104)..(244): Pfam Name: Plant protein of unknown function (DUF641) Pfam Description: Plant protein of unknown function (DUF641)
  misc_feature (1)..(499): Homolog of NCBI NO: 15232398 NR Description: expressed protein [Arabidopsis thaliana]
  misc_feature (122)..(498): Homolog of NCBI NO: 37535904 NR Description: hypothetical protein [Oryza sativa (japonica group)] >gi|22267584|gb|AAM94919.1| hypothetical protein [Oryza
  misc_feature (120)..(495): Homolog of NCBI NO: 15225441 NR Description: expressed protein [Arabidopsis thaliana]
  misc_feature (95)..(494): Homolog of NCBI NO: 15219282 NR Description: expressed protein [Arabidopsis thaliana]
  misc_feature (120)..(494): Homolog of NCBI NO: 8777470 NR Description: gb|AAB82637.1~gene_id:K15M2.1~similar to unknown
  misc_feature (120)..(494): Homolog of NCBI NO: 15231944 NR Description: expressed protein [Arabidopsis thaliana] unknown protein [Arabidopsis thaliana]
  misc_feature (120)..(365): Homolog of NCBI NO: 15235221 NR Description: expressed protein [Arabidopsis thaliana]
  misc_feature (394)..(456): Homolog of NCBI NO: 15235221 NR Description: expressed protein [Arabidopsis thaliana]
  misc_feature (109)..(494): Homolog of NCBI NO: 22329840 NR Description: expressed protein [Arabidopsis thaliana]
  misc_feature (109)..(494): Homolog of NCBI NO: 20466324 NR Description: unknown protein [Arabidopsis thaliana]
MREVETTAITAAPPQFSQMFQKLAMAVKTKTYEFFTEDDNERTDAEGFSLLDSSEDFITDQKVVVLKPDKPLLSASSPGSPIESPVNDVQTKNLGVVSVVKPNQKKLSQVRKLDTQMGLSLISSVFATASSFEASYLQLQAAHAPFVEENVKAADRALVSNLQKLSDLKQFYRNYRQSLDFESDLAIGSCLESRVQENQSKLRALETVSNRLQAEMDAKDLQVWSLRNKLGEIQKSTSKLSKRLSSNSSLDVLLSVRVFESLLYDAFKATQKFTKILIELMEKAGWDLDLVAKSVHPEVDYAKERHNRYALLSYVCLGMFRGFDGEGFDLNENDYEESERSSVDSSLRELMQHVSSNPMELLDRDKDCAFSRFCDKKYHELIHPNMASSIFSNMDENEAVLSSWRSLSTFYESFVTMASSIWTLHKLALSFDPAVEIFQVESGVEFSIVFMENVLKRKQDKKFSMSPTRAKVGFTVVPGFKIGCTVIQCQVYLTGGSKM

SEQ ID NO: 100789 - protein, 481 aa, Arabidopsis thaliana
  peptide (1)..(481): Ceres Seq. ID no. 13606072
  misc_feature (86)..(226): Pfam Name: Plant protein of unknown function (DUF641) Pfam Description: Plant protein of unknown function (DUF641)
  misc_feature (1)..(481): Homolog of NCBI NO: 15232398 NR Description: expressed protein [Arabidopsis thaliana]
  misc_feature (104)..(480): Homolog of NCBI NO: 37535904 NR Description: hypothetical protein [Oryza sativa (japonica group)] >gi|22267584|gb|AAM94919.1| hypothetical protein [Oryza
  misc_feature (102)..(477): Homolog of NCBI NO: 15225441 NR Description: expressed protein [Arabidopsis thaliana]
  misc_feature (77)..(476): Homolog of NCBI NO: 15219282 NR Description: expressed protein [Arabidopsis thaliana]
  misc_feature (102)..(476): Homolog of NCBI NO: 8777470 NR Description: gb|AAB82637.1~gene_id:K15M2.1~similar to unknown
  misc_feature (102)..(476): Homolog of NCBI NO: 15231944 NR Description: expressed protein [Arabidopsis thaliana] unknown protein [Arabidopsis thaliana]
  misc_feature (102)..(347): Homolog of NCBI NO: 15235221 NR Description: expressed protein [Arabidopsis thaliana]
  misc_feature (376)..(438): Homolog of NCBI NO: 15235221 NR Description: expressed protein [Arabidopsis thaliana]
  misc_feature (91)..(476): Homolog of NCBI NO: 22329840 NR Description: expressed protein [Arabidopsis thaliana]
  misc_feature (91)..(476): Homolog of NCBI NO: 20466324 NR Description: unknown protein [Arabidopsis thaliana]
MFQKLAMAVKTKTYEFFTEDDNERTDAEGFSLLDSSEDFITDQKVVVLKPDKPLLSASSPGSPIESPVNDVQTKNLGVVSVVKPNQKKLSQVRKLDTQMGLSLISSVFATASSFEASYLQLQAAHAPFVEENVKAADRALVSNLQKLSDLKQFYRNYRQSLDFESDLAIGSCLESRVQENQSKLRALETVSNRLQAEMDAKDLQVWSLRNKLGEIQKSTSKLSKRLSSNSSLDVLLSVRVFESLLYDAFKATQKFTKILIELMEKAGWDLDLVAKSVHPEVDYAKERHNRYALLSYVCLGMFRGFDGEGFDLNENDYEESERSSVDSSLRELMQHVSSNPMELLDRDKDCAFSRFCDKKYHELIHPNMASSIFSNMDENEAVLSSWRSLSTFYESFVTMASSIWTLHKLALSFDPAVEIFQVESGVEFSIVFMENVLKRKQDKKFSMSPTRAKVGFTVVPGFKIGCTVIQCQVYLTGGSKM

SEQ ID NO: 100790 - protein, 475 aa, Arabidopsis thaliana
  peptide (1)..(475): Ceres Seq. ID no. 13606073
  misc_feature (80)..(220): Pfam Name: Plant protein of unknown function (DUF641) Pfam Description: Plant protein of unknown function (DUF641)
  misc_feature (1)..(475): Homolog of NCBI NO: 15232398 NR Description: expressed protein [Arabidopsis thaliana]
  misc_feature (98)..(474): Homolog of NCBI NO: 37535904 NR Description: hypothetical protein [Oryza sativa (japonica group)] >gi|22267584|gb|AAM94919.1| hypothetical protein [Oryza
  misc_feature (96)..(471): Homolog of NCBI NO: 15225441 NR Description: expressed protein [Arabidopsis thaliana]
  misc_feature (71)..(470): Homolog of NCBI NO: 15219282 NR Description: expressed protein [Arabidopsis thaliana]
  misc_feature (96)..(470): Homolog of NCBI NO: 8777470 NR Description: gb|AAB82637.1~gene_id:K15M2.1~similar to unknown
  misc_feature (96)..(470): Homolog of NCBI NO: 15231944 NR Description: expressed protein [Arabidopsis thaliana] unknown protein [Arabidopsis thaliana]
  misc_feature (96)..(341): Homolog of NCBI NO: 15235221 NR Description: expressed protein [Arabidopsis thaliana]
  misc_feature (370)..(432): Homolog of NCBI NO: 15235221 NR Description: expressed protein [Arabidopsis thaliana]
  misc_feature (85)..(470): Homolog of NCBI NO: 22329840 NR Description: expressed protein [Arabidopsis thaliana]
  misc_feature (85)..(470): Homolog of NCBI NO: 20466324 NR Description: unknown protein [Arabidopsis thaliana]
MAVKTKTYEFFTEDDNERTDAEGFSLLDSSEDFITDQKVVVLKPDKPLLSASSPGSPIESPVNDVQTKNLGVVSVVKPNQKKLSQVRKLDTQMGLSLISSVFATASSFEASYLQLQAAHAPFVEENVKAADRALVSNLQKLSDLKQFYRNYRQSLDFESDLAIGSCLESRVQENQSKLRALETVSNRLQAEMDAKDLQVWSLRNKLGEIQKSTSKLSKRLSSNSSLDVLLSVRVFESLLYDAFKATQKFTKILIELMEKAGWDLDLVAKSVHPEVDYAKERHNRYALLSYVCLGMFRGFDGEGFDLNENDYEESERSSVDSSLRELMQHVSSNPMELLDRDKDCAFSRFCDKKYHELIHPNMASSIFSNMDENEAVLSSWRSLSTFYESFVTMASSIWTLHKLALSFDPAVEIFQVESGVEFSIVFMENVLKRKQDKKFSMSPTRAKVGFTVVPGFKIGCTVIQCQVYLTGGSKM

SEQ ID NO: 100791 - DNA, 1468 bp, Arabidopsis thaliana
  misc_feature (1)..(1468): Ceres Seq. ID no. 13606078
  misc_feature: MA Experiment ID: 108434 Result: Up-regulated in Transcription
  misc_feature: MA Experiment 108434 PARAMETER Experiment Name: At_Root_Tips_cDNA_P Parameter: Tissue Value: Root Tips
  misc_feature: MA Experiment ID: 108462 Result: Down-regulated in Transcription
  misc_feature: MA Experiment 108462 PARAMETER Experiment Name: At_Germinating_Seeds_cDNA_P Parameter: Age (day) Value: 2 vs. 0
  misc_feature: MA Experiment 108462 PARAMETER Experiment Name: At_Germinating_Seeds_cDNA_P Parameter: Tissue Value: Germinating Seeds
  misc_feature: MA Experiment ID: 108463 Result: Down-regulated in Transcription
  misc_feature: MA Experiment 108463 PARAMETER Experiment Name: At_Germinating_Seeds_cDNA_P Parameter: Age (day) Value: 3 vs. 0
  misc_feature: MA Experiment 108463 PARAMETER Experiment Name: At_Germinating_Seeds_cDNA_P Parameter: Tissue Value: Germinating Seeds
atctttacaaaaccgattacttttgtcggaatctgacgtcagcatacctgctaccacttccagagttcaatcgatcttcgcctcgttgaaacgttttccctcttcgattatcaacagtgtctccactcgtatcatcaccgcctccaactaattttgccatctctctcgttgttccaatttgattctactagtgagctccgatttaatttagggttttgaaagatgtcagctttgaaaaattacggcttgatctccattgattctgccctccattttcctcgatcaaatcaattgcagagctataagaggaatgcaaaatgggtctctccaatagcagctgttgtacctaacttccatcttcctatgcgcagtctcgaggataaaaacaggacaaacacagacgacataaggtcccttagagtgatcacagccattaagacaccgtatttacctgatggaagattcgacctccaagcatacgatgacttagtcaacacgcagatagaaaacggtgctgaaggtgtgattgttggtggtacaactggtgaaggccaattgatgagctgggatgagcacataatgcttatcggccatactgtaaattgttttgggggaaggatcaaagtcattggaaacactggaagtaactcgactagggaagctattcatgccactgagcaaggattcgccatgggaatgcacggggcactgcacattaacccttactatggaaaaacatccattgaaggcatgaatgcgcattttcaaaccgttcttcatatgggaccgactattatatacaacgtgccaggtcgaacgtgccaggatatacctccccaggttatctttaaactctctcagaaccctaatatggctggggttaaggaatgcgttggtaataaccgagttgaagagtatactgagaagggaattgtcgtttggagtggaaatgatgatcagtgccatgattctagatgggatcacggtgccactggagtgatatcggttactagcaatttagttccgggtttgatgaggaagttgatgtttgaaggtagaaactcagcgttgaacgcaaagcttcttcctttaatggattggctattccaagaaccgaatcccattggtgtaaacactgctttggctcagttaggagttgcgaggccggtttttcggttaccttatgtgccattgcctctgtccaaaaggattgagttcgttaaactggtgaaggaaatcggaagggagcattttgtaggagacagagatgttcaggtacttgatgatgatgacttcatcttaatcggtcgatattagagtctcttccctgaagattggttgtgtttatactttcttcgttcagttgttagttatttagctgatgagaaactcacagatggatcaagacttctacttgttgtaatgtttggtctgttacttttggtgatgaatctaatggcttttgctt

SEQ ID NO: 100792 - protein, 364 aa, Arabidopsis thaliana
  peptide (1)..(364): Ceres Seq. ID no. 13606079
  misc_feature (63)..(340): Pfam Name: Dihydrodipicolinate synthetase family Pfam Description: Dihydrodipicolinate synthetase family
  misc_feature (1)..(364): Homolog of NCBI NO: 15232971 NR Description: dihydrodipicolinate synthase precursor thaliana] >gi|14547977|sp|Q9LZX6|DAP1_ARATH Dihydrodipicolinate
  misc_feature (1)..(364): Homolog of NCBI NO: 1076317 NR Description: dihydrodipicolinate synthase (EC 4.2.1.52)
  misc_feature (1)..(364): Homolog of NCBI NO: 30695296 NR Description: dihydrodipicolinate synthase precursor thaliana] >gi|17380974|gb|AAL36299.1| putative synthase precursor [Arabidopsis thaliana]
  misc_feature (1)..(364): Homolog of NCBI NO: 15225477 NR Description: dihydrodipicolinate synthase -related thaliana] >gi|14547964|sp|Q9FVC8|DAP2_ARATH Dihydrodipicolinate
  misc_feature (1)..(364): Homolog of NCBI NO: 11066382 NR Description: dihydrodipicolinate synthase 2 [Arabidopsis
  misc_feature (1)..(363): Homolog of NCBI NO: 8648949 NR Description: dihydrodipicolinate synthase [Populus balsamifera
  misc_feature (1)..(363): Homolog of NCBI NO: 1076280 NR Description: dihydrodipicolinate synthase (EC 4.2.1.52)
  misc_feature (28)..(364): Homolog of NCBI NO: 6014908 NR Description: Dihydrodipicolinate synthase, chloroplast (DHDPS) >gi|7436660|pir||T03214 dihydrodipicolinate synthase (EC
  misc_feature (38)..(364): Homolog of NCBI NO: 6014907 NR Description: Dihydrodipicolinate synthase, chloroplast
  misc_feature (39)..(364): Homolog of NCBI NO: 1084359 NR Description: dihydrodipicolinate synthase (EC 4.2.1.52)
MSALKNYGLISIDSALHFPRSNQLQSYKRNAKWVSPIAAVVPNFHLPMRSLEDKNRTNTDDIRSLRVITAIKTPYLPDGRFDLQAYDDLVNTQIENGAEGVIVGGTTGEGQLMSWDEHIMLIGHTVNCFGGRIKVIGNTGSNSTREAIHATEQGFAMGMHGALHINPYYGKTSIEGMNAHFQTVLHMGPTIIYNVPGRTCQDIPPQVIFKLSQNPNMAGVKECVGNNRVEEYTEKGIVVWSGNDDQCHDSRWDHGATGVISVTSNLVPGLMRKLMFEGRNSALNAKLLPLMDWLFQEPNPIGVNTALAQLGVARPVFRLPYVPLPLSKRIEFVKLVKEIGREHFVGDRDVQVLDDDDFILIGRY

SEQ ID NO: 100793 - protein, 317 aa, Arabidopsis thaliana; identical to SEQ ID NO: 24236
  peptide (1)..(317): Ceres Seq. ID no. 13606080
  misc_feature (16)..(293): Pfam Name: Dihydrodipicolinate synthetase family Pfam Description: Dihydrodipicolinate synthetase family
  misc_feature (1)..(317): Homolog of NCBI NO: 15232971 NR Description: dihydrodipicolinate synthase precursor thaliana] >gi|14547977|sp|Q9LZX6|DAP1_ARATH Dihydrodipicolinate
  misc_feature (1)..(317): Homolog of NCBI NO: 1076317 NR Description: dihydrodipicolinate synthase (EC 4.2.1.52)
  misc_feature (1)..(317): Homolog of NCBI NO: 30695296 NR Description: dihydrodipicolinate synthase precursor thaliana] >gi|17380974|gb|AAL36299.1| putative synthase precursor [Arabidopsis thaliana]
  misc_feature (1)..(317): Homolog of NCBI NO: 15225477 NR Description: dihydrodipicolinate synthase -related thaliana] >gi|14547964|sp|Q9FVC8|DAP2_ARATH Dihydrodipicolinate
  misc_feature (1)..(317): Homolog of NCBI NO: 11066382 NR Description: dihydrodipicolinate synthase 2 [Arabidopsis
  misc_feature (1)..(316): Homolog of NCBI NO: 8648949 NR Description: dihydrodipicolinate synthase [Populus balsamifera
  misc_feature (1)..(316): Homolog of NCBI NO: 1076280 NR Description: dihydrodipicolinate synthase (EC 4.2.1.52)
  misc_feature (1)..(317): Homolog of NCBI NO: 6014908 NR Description: Dihydrodipicolinate synthase, chloroplast (DHDPS) >gi|7436660|pir||T03214 dihydrodipicolinate synthase (EC
  misc_feature (1)..(317): Homolog of NCBI NO: 6014907 NR Description: Dihydrodipicolinate synthase, chloroplast
  misc_feature (1)..(317): Homolog of NCBI NO: 1084359 NR Description: dihydrodipicolinate synthase (EC 4.2.1.52)

SEQ ID NO: 100794 - protein, 252 aa, Arabidopsis thaliana; identical to SEQ ID NO: 24237
  peptide (1)..(252): Ceres Seq. ID no. 13606081
  misc_feature (1)..(228): Pfam Name: Dihydrodipicolinate synthetase family Pfam Description: Dihydrodipicolinate synthetase family
  misc_feature (1)..(252): Homolog of NCBI NO: 15232971 NR Description: dihydrodipicolinate synthase precursor thaliana] >gi|14547977|sp|Q9LZX6|DAP1_ARATH Dihydrodipicolinate
  misc_feature (1)..(252): Homolog of NCBI NO: 1076317 NR Description: dihydrodipicolinate synthase (EC 4.2.1.52)
  misc_feature (1)..(252): Homolog of NCBI NO: 30695296 NR Description: dihydrodipicolinate synthase precursor thaliana] >gi|17380974|gb|AAL36299.1| putative synthase precursor [Arabidopsis thaliana]
  misc_feature (1)..(252): Homolog of NCBI NO: 15225477 NR Description: dihydrodipicolinate synthase -related thaliana] >gi|14547964|sp|Q9FVC8|DAP2_ARATH Dihydrodipicolinate
  misc_feature (1)..(252): Homolog of NCBI NO: 11066382 NR Description: dihydrodipicolinate synthase 2 [Arabidopsis
  misc_feature (1)..(251): Homolog of NCBI NO: 8648949 NR Description: dihydrodipicolinate synthase [Populus balsamifera
  misc_feature (1)..(251): Homolog of NCBI NO: 1076280 NR Description: dihydrodipicolinate synthase (EC 4.2.1.52)
  misc_feature (1)..(252): Homolog of NCBI NO: 6014908 NR Description: Dihydrodipicolinate synthase, chloroplast (DHDPS) >gi|7436660|pir||T03214 dihydrodipicolinate synthase (EC
  misc_feature (1)..(252): Homolog of NCBI NO: 6014907 NR Description: Dihydrodipicolinate synthase, chloroplast
  misc_feature (1)..(252): Homolog of NCBI NO: 1084359 NR Description: dihydrodipicolinate synthase (EC 4.2.1.52)

SEQ ID NO: 100795 - DNA, 1784 bp, Arabidopsis thaliana
  misc_feature (1)..(1784): Ceres Seq. ID no. 13606082
  misc_feature: MA Experiment ID: 20000439 Result: Up-regulated in Transcription
  misc_feature: MA Experiment 20000439 PARAMETER Experiment Name: At_Roots__P Parameter: Age (day) Value: 14 vs. 21
  misc_feature: MA Experiment 20000439 PARAMETER Experiment Name: At_Roots__P Parameter: Organism Value: A. thaliana
  misc_feature: MA Experiment 20000439 PARAMETER Experiment Name: At_Roots__P Parameter: Tissue Value: Roots vs. Whole Plant
  misc_feature: MA Experiment ID: 20000496 Result: Up-regulated in Transcription
  misc_feature: MA Experiment 20000496 PARAMETER Experiment Name: At_Guard_Cells_P Parameter: Harvest Date Value: 7/19/2002
  misc_feature: MA Experiment 20000496 PARAMETER Experiment Name: At_Guard_Cells_P Parameter: Organism Value: Canola
  misc_feature: MA Experiment 20000496 PARAMETER Experiment Name: At_Guard_Cells_P Parameter: Tissue Value: Guard Cells vs. Leaves
  misc_feature: MA Experiment ID: 20000527 Result: Down-regulated in Transcription
  misc_feature: MA Experiment 20000527 PARAMETER Experiment Name: At_10percent_PEG_P Parameter: Age (day) Value: 20
  misc_feature: MA Experiment 20000527 PARAMETER Experiment Name: At_10percent_PEG_P Parameter: Organism Value: A. thaliana
  misc_feature: MA Experiment 20000527 PARAMETER Experiment Name: At_10percent_PEG_P Parameter: Plant Line Value: WS
  misc_feature: MA Experiment 20000527 PARAMETER Experiment Name: At_10percent_PEG_P Parameter: Timepoint (day) Value: 20
  misc_feature: MA Experiment 20000527 PARAMETER Experiment Name: At_10percent_PEG_P Parameter: Tissue Value: Whole Plant
  misc_feature: MA Experiment 20000527 PARAMETER Experiment Name: At_10percent_PEG_P Parameter: Treatment Value: 10percent PEG vs. No Treatment
gttatcttcatacttttgtgttgcgtttctgttgattctccttttatgtatcctctcggctctctcgttaatcttttattacataaactcgtgcatcaacataaacacaaaacagaagcatgaagatgaataacaacgacggccaacataataaaacggtgacatttcctcgaaaaagcatcgtgaaggctactgttttcatcgtcgttctattcatttcagctgctatcttagacttactgggctatctcgatttcaatgcttttgcaggtttaaagctaacaacaaagacaaaagaaccaaatccttacggatgcgacttcgtacagaaccaatcaagtcaaactcctatctcacaaaaccgcaaatcgagattaaaccccaacaacagttcaaaatcatccacgtgtccttcttatttccgttggatccatgaagatctacggccatggaaacaaacggggataactagagggatgatcgaagaagcgagtagaacggcgcattttagattggtgatccgtaacgggaaggcgtacgttaagagatataagaagtcaatacaaacaagagatgaatttactctgtggggaatcttacagttgttacggtggtaccctggtaaattacctgatctcgagctaatgttcgacgctgatgatcgtcccgtcgtccgatcagttgactttattggtcaacagaaggaaccacctccagttttccgttactgttcagatgacgcaagcttggacattgtcttccctgattggtccttttggggctgggctgaagtgaacgtaaaaccatgggggaaatcgttggaggcaataaaagaagggaacagtatgacgcaatggaaggaccgcgtggcgtacgcttattggagaggtaatccttatgttgatcctggaagaggagatcttctcaagtgtaatgctacagaacatgaagagtggaatactcgtctctatattcaggattgggataaagaaacaaaagaaggattcaagaactcaaatctagagaaccagtgcactcatagatacaagatatatatagaaggatgggcatggtcggttagcgagaaatacataatggcatgtgactcaatgacattatatgtaaaaccaagattctacgatttctacatacgaggaatgatgccattacaacattattggccaatcagagacgattccaagtgtacttctctcaaattcgccgtacattggggcaatacacacgaggacaaggctcgtgagataggagaggtaggaagtagatttataagagaggaggtgaatatgcagtatgtgtatgactatatgtttcatttactcaaagagtatgcaacactcttgaaatttaagccggagattccgttagatgcagaggagatcacgccggatagtatggggtgtcccgcgacggaaaggtggagagattttaaggcggagtcaatgattatatctcctagtgaagagtctccttgtgagatgcttcctccttatgatcctctagctttaaaagaggttcttgagagaaaagctaatttaactcgtcaggttgagttgtgggaaaaccaatactttcaaaatcttaccaacaaaccttaaattgttttgttttttccttcttcgttgacgagatcaaccgcaaccaaatagttcagtcgtgggaggatcaatactctcttgatttgacttataaaccttgattttttttttctatcatcattaaccatttgtcgaatatacttttcaaagtatactttgtttatggcc

SEQ ID NO: 100796 - protein, 498 aa, Arabidopsis thaliana
  peptide (1)..(498): Ceres Seq. ID no. 13606083
  misc_feature (92)..(492): Pfam Name: Arabidopsis thaliana protein of unknown function Pfam Description: Arabidopsis thaliana protein of unknown
  misc_feature (1)..(498): Homolog of NCBI NO: 15233070 NR Description: expressed protein [Arabidopsis thaliana]
  misc_feature (1)..(498): Homolog of NCBI NO: 7486461 NR Description: hypothetical protein At2g45830 [imported] - thaliana >gi|3386611|gb|AAC28541.1| unknown protein [Arabidopsis
  misc_feature (120)..(498): Homolog of NCBI NO: 30690136 NR Description: expressed protein [Arabidopsis thaliana]
  misc_feature (77)..(495): Homolog of NCBI NO: 15229061 NR Description: expressed protein [Arabidopsis thaliana]
  misc_feature (90)..(495): Homolog of NCBI NO: 15237842 NR Description: expressed protein [Arabidopsis thaliana] contains similarity to unknown
  misc_feature (56)..(494): Homolog of NCBI NO: 15222413 NR Description: expressed protein [Arabidopsis thaliana]
  misc_feature (56)..(286): Homolog of NCBI NO: 25404907 NR Description: protein F2K11.20 [imported] - Arabidopsis >gi|6633846|gb|AAF19705.1|AC008047_12 F2K11.20 [Arabidopsis
  misc_feature (283)..(494): Homolog of NCBI NO: 25404907 NR Description: protein F2K11.20 [imported] - Arabidopsis >gi|6633846|gb|AAF19705.1|AC008047_12 F2K11.20 [Arabidopsis
  misc_feature (91)..(489): Homolog of NCBI NO: 38346998 NR Description: OSJNBb0039L24.21 [Oryza sativa (japonica
  misc_feature (55)..(495): Homolog of NCBI NO: 15233074 NR Description: hypothetical protein [Arabidopsis thaliana]
MKMNNNDGQHNKTVTFPRKSIVKATVFIVVLFISAAILDLLGYLDFNAFAGLKLTTKTKEPNPYGCDFVQNQSSQTPISQNRKSRLNPNNSSKSSTCPSYFRWIHEDLRPWKQTGITRGMIEEASRTAHFRLVIRNGKAYVKRYKKSIQTRDEFTLWGILQLLRWYPGKLPDLELMFDADDRPVVRSVDFIGQQKEPPPVFRYCSDDASLDIVFPDWSFWGWAEVNVKPWGKSLEAIKEGNSMTQWKDRVAYAYWRGNPYVDPGRGDLLKCNATEHEEWNTRLYIQDWDKETKEGFKNSNLENQCTHRYKIYIEGWAWSVSEKYIMACDSMTLYVKPRFYDFYIRGMMPLQHYWPIRDDSKCTSLKFAVHWGNTHEDKAREIGEVGSRFIREEVNMQYVYDYMFHLLKEYATLLKFKPEIPLDAEEITPDSMGCPATERWRDFKAESMIISPSEESPCEMLPPYDPLALKEVLERKANLTRQVELWENQYFQNLTNKP

SEQ ID NO: 100797 - protein, 496 aa, Arabidopsis thaliana
  peptide (1)..(496): Ceres Seq. ID no. 13606084
  misc_feature (90)..(490): Pfam Name: Arabidopsis thaliana protein of unknown function Pfam Description: Arabidopsis thaliana protein of unknown
  misc_feature (1)..(496): Homolog of NCBI NO: 15233070 NR Description: expressed protein [Arabidopsis thaliana]
  misc_feature (1)..(496): Homolog of NCBI NO: 7486461 NR Description: hypothetical protein At2g45830 [imported] - thaliana >gi|3386611|gb|AAC28541.1| unknown protein [Arabidopsis
  misc_feature (118)..(496): Homolog of NCBI NO: 30690136 NR Description: expressed protein [Arabidopsis thaliana]
  misc_feature (75)..(493): Homolog of NCBI NO: 15229061 NR Description: expressed protein [Arabidopsis thaliana]
  misc_feature (88)..(493): Homolog of NCBI NO: 15237842 NR Description: expressed protein [Arabidopsis thaliana] contains similarity to unknown
  misc_feature (54)..(492): Homolog of NCBI NO: 15222413 NR Description: expressed protein [Arabidopsis thaliana]
  misc_feature (54)..(284): Homolog of NCBI NO: 25404907 NR Description: protein F2K11.20 [imported] - Arabidopsis >gi|6633846|gb|AAF19705.1|AC008047_12 F2K11.20 [Arabidopsis
  misc_feature (281)..(492): Homolog of NCBI NO: 25404907 NR Description: protein F2K11.20 [imported] - Arabidopsis >gi|6633846|gb|AAF19705.1|AC008047_12 F2K11.20 [Arabidopsis
  misc_feature (89)..(487): Homolog of NCBI NO: 38346998 NR Description: OSJNBb0039L24.21 [Oryza sativa (japonica
  misc_feature (53)..(493): Homolog of NCBI NO: 15233074 NR Description: hypothetical protein [Arabidopsis thaliana]
MNNNDGQHNKTVTFPRKSIVKATVFIVVLFISAAILDLLGYLDFNAFAGLKLTTKTKEPNPYGCDFVQNQSSQTPISQNRKSRLNPNNSSKSSTCPSYFRWIHEDLRPWKQTGITRGMIEEASRTAHFRLVIRNGKAYVKRYKKSIQTRDEFTLWGILQLLRWYPGKLPDLELMFDADDRPVVRSVDFIGQQKEPPPVFRYCSDDASLDIVFPDWSFWGWAEVNVKPWGKSLEAIKEGNSMTQWKDRVAYAYWRGNPYVDPGRGDLLKCNATEHEEWNTRLYIQDWDKETKEGFKNSNLENQCTHRYKIYIEGWAWSVSEKYIMACDSMTLYVKPRFYDFYIRGMMPLQHYWPIRDDSKCTSLKFAVHWGNTHEDKAREIGEVGSRFIREEVNMQYVYDYMFHLLKEYATLLKFKPEIPLDAEEITPDSMGCPATERWRDFKAESMIISPSEESPCEMLPPYDPLALKEVLERKANLTRQVELWENQYFQNLTNKP

SEQ ID NO: 100798 - protein, 379 aa, Arabidopsis thaliana
  peptide (1)..(379): Ceres Seq. ID no. 13606085
  misc_feature (1)..(373): Pfam Name: Arabidopsis thaliana protein of unknown function Pfam Description: Arabidopsis thaliana protein of unknown
  misc_feature (1)..(379): Homolog of NCBI NO: 15233070 NR Description: expressed protein [Arabidopsis thaliana]
  misc_feature (1)..(379): Homolog of NCBI NO: 7486461 NR Description: hypothetical protein At2g45830 [imported] - thaliana >gi|3386611|gb|AAC28541.1| unknown protein [Arabidopsis
  misc_feature (1)..(379): Homolog of NCBI NO: 30690136 NR Description: expressed protein [Arabidopsis thaliana]
  misc_feature (1)..(376): Homolog of NCBI NO: 15229061 NR Description: expressed protein [Arabidopsis thaliana]
  misc_feature (1)..(376): Homolog of NCBI NO: 15237842 NR Description: expressed protein [Arabidopsis thaliana] contains similarity to unknown
  misc_feature (1)..(375): Homolog of NCBI NO: 15222413 NR Description: expressed protein [Arabidopsis thaliana]
  misc_feature (1)..(167): Homolog of NCBI NO: 25404907 NR Description: protein F2K11.20 [imported] - Arabidopsis >gi|6633846|gb|AAF19705.1|AC008047_12 F2K11.20 [Arabidopsis
  misc_feature (164)..(375): Homolog of NCBI NO: 25404907 NR Description: protein F2K11.20 [imported] - Arabidopsis >gi|6633846|gb|AAF19705.1|AC008047_12 F2K11.20 [Arabidopsis
  misc_feature (1)..(370): Homolog of NCBI NO: 38346998 NR Description: OSJNBb0039L24.21 [Oryza sativa (japonica
  misc_feature (1)..(376): Homolog of NCBI NO: 15233074 NR Description: hypothetical protein [Arabidopsis thaliana]
MIEEASRTAHFRLVIRNGKAYVKRYKKSIQTRDEFTLWGILQLLRWYPGKLPDLELMFDADDRPVVRSVDFIGQQKEPPPVFRYCSDDASLDIVFPDWSFWGWAEVNVKPWGKSLEAIKEGNSMTQWKDRVAYAYWRGNPYVDPGRGDLLKCNATEHEEWNTRLYIQDWDKETKEGFKNSNLENQCTHRYKIYIEGWAWSVSEKYIMACDSMTLYVKPRFYDFYIRGMMPLQHYWPIRDDSKCTSLKFAVHWGNTHEDKAREIGEVGSRFIREEVNMQYVYDYMFHLLKEYATLLKFKPEIPLDAEEITPDSMGCPATERWRDFKAESMIISPSEESPCEMLPPYDPLALKEVLERKANLTRQVELWENQYFQNLTNKP

SEQ ID NO: 100799 - DNA, 1278 bp, Arabidopsis thaliana
  misc_feature (1)..(1278): Ceres Seq. ID no. 13606090
  misc_feature: MA Experiment ID: 20000171 Result: Up-regulated in Transcription
  misc_feature: MA Experiment 20000171 PARAMETER Experiment Name: At_42deg_Heat_P Parameter: Age (day) Value: 14
  misc_feature: MA Experiment 20000171 PARAMETER Experiment Name: At_42deg_Heat_P Parameter: Organism Value: A. thaliana
  misc_feature: MA Experiment 20000171 PARAMETER Experiment Name: At_42deg_Heat_P Parameter: Plant Line Value: WS
  misc_feature: MA Experiment 20000171 PARAMETER Experiment Name: At_42deg_Heat_P Parameter: Temperature (deg C) Value: 42 vs. 22
  misc_feature: MA Experiment 20000171 PARAMETER Experiment Name: At_42deg_Heat_P Parameter: Timepoint (hr) Value: 1
  misc_feature: MA Experiment 20000171 PARAMETER Experiment Name: At_42deg_Heat_P Parameter: Tissue Value: Aerial
  misc_feature: MA Experiment ID: 20000264 Result: Down-regulated in Transcription
  misc_feature: MA Experiment 20000264 PARAMETER Experiment Name: At_Open_Flower_P Parameter: Age (day) Value: 21
  misc_feature: MA Experiment 20000264 PARAMETER Experiment Name: At_Open_Flower_P Parameter: Plant Line Value: WS
  misc_feature: MA Experiment 20000264 PARAMETER Experiment Name: At_Open_Flower_P Parameter: Tissue Value: Open Flower vs. Whole Plant
gattgtcttcttcttcgccgggaagctcacaaacggaatatactctactgttccttgcgacgtgccctgaaggattttgtagaatcaattcacaatggcgtgtatagtagaggatccacaacgtgcaggtcaatcaaatgagacacaaattgcacttataagcggagttcctgatgatatctcaaaatcctgcttagctagagttccaagagaatatcacatggcaatgaaatgtgtttcaaggagatggagagattttgtgtgcagtgatgaaatgtgcgactatcgaaacgagtttaacttggctgaatcttggatttacgcgttgtgccgcgacatatctggcggtgtcttcttacacatgctgaatccgttctcgtccagaaggtcatggaaaagaatcaatgattatccatatatcccaatgagagaaggcatgggttttgcagtattgggtaagagactgtttgtgttgggtggatgtggttggttagaagatgctactgatgagatttattgctatgatgctgctatgaacacttggtttgacgtagtacctcctctttcaactaaaagatgctactttgcttgtgaaacgctggatggaaaaattattgcaattggtgggttaggattgaatccaaacgctaaacgaacttgggacatctatgatcctttgaccagaacctgcaaatcttgttctgatgtgaatattgtccctgaaatggaagattcatttgtaatggatggaaggatttatattcggggtggtgttggaggatcttccactgcagtctatagtgcatctagcgggatttgggaacgtatggatgatgatatggcatcaggatggcgaggtccagcagttgttgtggcaggtgatctctatgttttggatcagacttttggagctaagctaacaatgtggtgcaaggatacgagaatgtggattcatatcgggaagctatctcaattggtgatgaagcagccttgtcggcttgtatctattgggaatagtatctttgtgattggtaaggattgctctactgtggtaattgatgttgagaatgtgaggaagaataagatgaatggagtaatggtgtgttcttctataccaaagacttgggatgatgatatagatgttattagctgtaaatctgtagccatataatgtctagctctctctacttttctcttggctcaaaattcttcgtccttgtaaacaacatatgctgtttctgttgttcatgtaaattcacaagcttgtctgaatcacac

SEQ ID NO: 100800 - protein, 358 aa, Arabidopsis thaliana
  peptide (1)..(358): Ceres Seq. ID no. 13606091
  misc_feature (160)..(206): Pfam Name: Kelch motif Pfam Description: Kelch motif
  misc_feature (1)..(358): Homolog of NCBI NO: 18411974 NR Description: SKP1 interacting partner 4 (SKIP4), putative
  misc_feature (1)..(358): Homolog of NCBI NO: 26453288 NR Description: putative SKP1 interacting partner 4 SKIP4
  misc_feature (43)..(358): Homolog of NCBI NO: 10716953 NR Description: SKP1 interacting partner 4 [Arabidopsis thaliana]
  misc_feature (17)..(325): Homolog of NCBI NO: 19071626 NR Description: putative Kelch motif containing protein [Oryza
  misc_feature (13)..(325): Homolog of NCBI NO: 37534254 NR Description: unknown protein [Oryza sativa (japonica
  misc_feature (18)..(329): Homolog of NCBI NO: 18405298 NR Description: Kelch repeat containing F-box protein family thaliana] >gi|13877751|gb|AAK43953.1|AF370138_1 unknown protein thaliana] >gi|15293271|gb|AAK93746.1| unknown protein
  misc_feature (18)..(329): Homolog of NCBI NO: 25405811 NR Description: unknown protein, 58496-60308 [imported] -
  misc_feature (21)..(312): Homolog of NCBI NO: 18400571 NR Description: Kelch repeat containing F-box protein family
  misc_feature (21)..(312): Homolog of NCBI NO: 21593163 NR Description: unknown [Arabidopsis thaliana]
  misc_feature (21)..(320): Homolog of NCBI NO: 18397351 NR Description: Kelch repeat containing F-box protein family
MACIVEDPQRAGQSNETQIALISGVPDDISKSCLARVPREYHMAMKCVSRRWRDFVCSDEMCDYRNEFNLAESWIYALCRDISGGVFLHMLNPFSSRRSWKRINDYPYIPMREGMGFAVLGKRLFVLGGCGWLEDATDEIYCYDAAMNTWFDVVPPLSTKRCYFACETLDGKIIAIGGLGLNPNAKRTWDIYDPLTRTCKSCSDVNIVPEMEDSFVMDGRIYIRGGVGGSSTAVYSASSGIWERMDDDMASGWRGPAVVVAGDLYVLDQTFGAKLTMWCKDTRMWIHIGKLSQLVMKQPCRLVSIGNSIFVIGKDCSTVVIDVENVRKNKMNGVMVCSSIPKTWDDDIDVISCKSVAI

SEQ ID NO: 100801 - protein, 316 aa, Arabidopsis thaliana
  peptide (1)..(316): Ceres Seq. ID no. 13606092
  misc_feature (118)..(164): Pfam Name: Kelch motif Pfam Description: Kelch motif
  misc_feature (1)..(316): Homolog of NCBI NO: 18411974 NR Description: SKP1 interacting partner 4 (SKIP4), putative
  misc_feature (1)..(316): Homolog of NCBI NO: 26453288 NR Description: putative SKP1 interacting partner 4 SKIP4
  misc_feature (1)..(316): Homolog of NCBI NO: 10716953 NR Description: SKP1 interacting partner 4 [Arabidopsis thaliana]
  misc_feature (1)..(283): Homolog of NCBI NO: 19071626 NR Description: putative Kelch motif containing protein [Oryza
  misc_feature (1)..(283): Homolog of NCBI NO: 37534254 NR Description: unknown protein [Oryza sativa (japonica
  misc_feature (1)..(287): Homolog of NCBI NO: 18405298 NR Description: Kelch repeat containing F-box protein family thaliana] >gi|13877751|gb|AAK43953.1|AF370138_1 unknown protein thaliana] >gi|15293271|gb|AAK93746.1| unknown protein
  misc_feature (1)..(287): Homolog of NCBI NO: 25405811 NR Description: unknown protein, 58496-60308 [imported] -
  misc_feature (1)..(270): Homolog of NCBI NO: 18400571 NR Description: Kelch repeat containing F-box protein family
  misc_feature (1)..(270): Homolog of NCBI NO: 21593163 NR Description: unknown [Arabidopsis thaliana]
  misc_feature (1)..(278): Homolog of NCBI NO: 18397351 NR Description: Kelch repeat containing F-box protein family
MAMKCVSRRWRDFVCSDEMCDYRNEFNLAESWIYALCRDISGGVFLHMLNPFSSRRSWKRINDYPYIPMREGMGFAVLGKRLFVLGGCGWLEDATDEIYCYDAAMNTWFDVVPPLSTKRCYFACETLDGKIIAIGGLGLNPNAKRTWDIYDPLTRTCKSCSDVNIVPEMEDSFVMDGRIYIRGGVGGSSTAVYSASSGIWERMDDDMASGWRGPAVVVAGDLYVLDQTFGAKLTMWCKDTRMWIHIGKLSQLVMKQPCRLVSIGNSIFVIGKDCSTVVIDVENVRKNKMNGVMVCSSIPKTWDDDIDVISCKSVAI

SEQ ID NO: 100802 - protein, 314 aa, Arabidopsis thaliana
  peptide (1)..(314): Ceres Seq. ID no. 13606093
  misc_feature (116)..(162): Pfam Name: Kelch motif Pfam Description: Kelch motif
  misc_feature (1)..(314): Homolog of NCBI NO: 18411974 NR Description: SKP1 interacting partner 4 (SKIP4), putative
  misc_feature (1)..(314): Homolog of NCBI NO: 26453288 NR Description: putative SKP1 interacting partner 4 SKIP4
  misc_feature (1)..(314): Homolog of NCBI NO: 10716953 NR Description: SKP1 interacting partner 4 [Arabidopsis thaliana]
  misc_feature (1)..(281): Homolog of NCBI NO: 19071626 NR Description: putative Kelch motif containing protein [Oryza
  misc_feature (1)..(281): Homolog of NCBI NO: 37534254 NR Description: unknown protein [Oryza sativa (japonica
  misc_feature (1)..(285): Homolog of NCBI NO: 18405298 NR Description: Kelch repeat containing F-box protein family thaliana] >gi|13877751|gb|AAK43953.1|AF370138_1 unknown protein thaliana] >gi|15293271|gb|AAK93746.1| unknown protein
  misc_feature (1)..(285): Homolog of NCBI NO: 25405811 NR Description: unknown protein, 58496-60308 [imported] -
  misc_feature (1)..(268): Homolog of NCBI NO: 18400571 NR Description: Kelch repeat containing F-box protein family
  misc_feature (1)..(268): Homolog of NCBI NO: 21593163 NR Description: unknown [Arabidopsis thaliana]
  misc_feature (1)..(276): Homolog of NCBI NO: 18397351 NR Description: Kelch repeat containing F-box protein family
MKCVSRRWRDFVCSDEMCDYRNEFNLAESWIYALCRDISGGVFLHMLNPFSSRRSWKRINDYPYIPMREGMGFAVLGKRLFVLGGCGWLEDATDEIYCYDAAMNTWFDVVPPLSTKRCYFACETLDGKIIAIGGLGLNPNAKRTWDIYDPLTRTCKSCSDVNIVPEMEDSFVMDGRIYIRGGVGGSSTAVYSASSGIWERMDDDMASGWRGPAVVVAGDLYVLDQTFGAKLTMWCKDTRMWIHIGKLSQLVMKQPCRLVSIGNSIFVIGKDCSTVVIDVENVRKNKMNGVMVCSSIPKTWDDDIDVISCKSVAI

SEQ ID NO: 100803 - DNA, 2870 bp, Arabidopsis thaliana
  misc_feature (1)..(2870): Ceres Seq. ID no. 13606098
  misc_feature: MA Experiment ID: 20000173 Result: Down-regulated in Transcription
  misc_feature: MA Experiment 20000173 PARAMETER Experiment Name: At_42deg_Heat_P Parameter: Age (day) Value: 14
  misc_feature: MA Experiment 20000173 PARAMETER Experiment Name: At_42deg_Heat_P Parameter: Organism Value: A. thaliana
  misc_feature: MA Experiment 20000173 PARAMETER Experiment Name: At_42deg_Heat_P Parameter: Plant Line Value: WS
  misc_feature: MA Experiment 20000173 PARAMETER Experiment Name: At_42deg_Heat_P Parameter: Temperature (deg C) Value: 42 vs. 22
  misc_feature: MA Experiment 20000173 PARAMETER Experiment Name: At_42deg_Heat_P Parameter: Timepoint (hr) Value: 6
  misc_feature: MA Experiment 20000173 PARAMETER Experiment Name: At_42deg_Heat_P Parameter: Tissue Value: Aerial
  misc_feature: MA Experiment ID: 20000184 Result: Down-regulated in Transcription
  misc_feature: MA Experiment 20000184 PARAMETER Experiment Name: At_Shoots__P Parameter: Age (day) Value: 7
  misc_feature: MA Experiment 20000184 PARAMETER Experiment Name: At_Shoots__P Parameter: Tissue Value: Shoots vs. Whole Plant
  misc_feature: MA Experiment ID: 20000265 Result: Down-regulated in Transcription
  misc_feature: MA Experiment 20000265 PARAMETER Experiment Name: At_Open_Flower_P Parameter: Age (day) Value: 21
  misc_feature: MA Experiment 20000265 PARAMETER Experiment Name: At_Open_Flower_P Parameter: Plant Line Value: WS
  misc_feature: MA Experiment 20000265 PARAMETER Experiment Name: At_Open_Flower_P Parameter: Tissue Value: Closed Flower vs. Whole Plant
  misc_feature: MA Experiment ID: 20000286 Result: Down-regulated in Transcription
  misc_feature: MA Experiment 20000286 PARAMETER Experiment Name: At_Open_Flower_P Parameter: Age (day) Value: 21
  misc_feature: MA Experiment 20000286 PARAMETER Experiment Name: At_Open_Flower_P Parameter: Plant Line Value: WS
  misc_feature: MA Experiment 20000286 PARAMETER Experiment Name: At_Open_Flower_P Parameter: Tissue Value: Half Open vs. Whole Plant
  misc_feature: MA Experiment ID: 20000438 Result: Down-regulated in Transcription
  misc_feature: MA Experiment 20000438 PARAMETER Experiment Name: At_Shoots__P Parameter: Age (day) Value: 14
  misc_feature: MA Experiment 20000438 PARAMETER Experiment Name: At_Shoots__P Parameter: Tissue Value: Shoots vs. Whole Plant
  misc_feature: MA Experiment ID: 20000496 Result: Down-regulated in Transcription
  misc_feature: MA Experiment 20000496 PARAMETER Experiment Name: At_Guard_Cells_P Parameter: Harvest Date Value: 7/19/2002
  misc_feature: MA Experiment 20000496 PARAMETER Experiment Name: At_Guard_Cells_P Parameter: Organism Value: Canola
  misc_feature: MA Experiment 20000496 PARAMETER Experiment Name: At_Guard_Cells_P Parameter: Tissue Value: Guard Cells vs. Leaves
  misc_feature: MA Experiment ID: 20000527 Result: Down-regulated in Transcription
  misc_feature: MA Experiment 20000527 PARAMETER Experiment Name: At_10percent_PEG_P Parameter: Age (day) Value: 20
  misc_feature: MA Experiment 20000527 PARAMETER Experiment Name: At_10percent_PEG_P Parameter: Organism Value: A. thaliana
  misc_feature: MA Experiment 20000527 PARAMETER Experiment Name: At_10percent_PEG_P Parameter: Plant Line Value: WS
  misc_feature: MA Experiment 20000527 PARAMETER Experiment Name: At_10percent_PEG_P Parameter: Timepoint (day) Value: 20
  misc_feature: MA Experiment 20000527 PARAMETER Experiment Name: At_10percent_PEG_P Parameter: Tissue Value: Whole Plant
  misc_feature: MA Experiment 20000527 PARAMETER Experiment Name: At_10percent_PEG_P Parameter: Treatment Value: 10percent PEG vs. No Treatment
  misc_feature: MA Experiment ID: 20001451 Result: Down-regulated in Transcription
  misc_feature: MA Experiment 20001451 PARAMETER Experiment Name: At_Far-red-induction_P Parameter: Age (day) Value: 7
  misc_feature: MA Experiment 20001451 PARAMETER Experiment Name: At_Far-red-induction_P Parameter: Light Value: Far-red vs. White
  misc_feature: MA Experiment 20001451 PARAMETER Experiment Name: At_Far-red-induction_P Parameter: Organism Value: A. thaliana
  misc_feature: MA Experiment 20001451 PARAMETER Experiment Name: At_Far-red-induction_P Parameter: Plant Line Value: Columbia
  misc_feature: MA Experiment 20001451 PARAMETER Experiment Name: At_Far-red-induction_P Parameter: Timepoint (hr) Value: 24
  misc_feature: MA Experiment 20001451 PARAMETER Experiment Name: At_Far-red-induction_P Parameter: Tissue Value: Whole Plant
  misc_feature: MA Experiment ID: 20001757 Result: Down-regulated in Transcription
  misc_feature: MA Experiment 20001757 PARAMETER Experiment Name: At_50mM_NH4NO3_L-to-H_P Parameter: Timepoint (hr) Value: 6
  misc_feature: MA Experiment 20001757 PARAMETER Experiment Name: At_50mM_NH4NO3_L-to-H_P Parameter: Tissue Value: Leaf
  misc_feature: MA Experiment 20001757 PARAMETER Experiment Name: At_50mM_NH4NO3_L-to-H_P Parameter: Treatment Value: 50mM NH4NO3 vs 100mM Mannitol
aaaaaaaaaaattctctcttgtcttcctcttaagatgaaagaatcataaaaggaacccaaagaaaagcaaaaacataaccatggctgctccaagatcaagaagatgctctctttctctcttaactcttttctccatcactcttattcttatttctgtttcactctttgtctccacaaaaccagctaataagcctttcctcgattacagaaaccagttttctatttccatctctatctcttctcctcttgaacaaaacacaacaaacactagttttgtctcagcctctcctcctttgtcccctcttggtcagagcaacacaacaaacactattcttgcttcttcttcttcttcttcctctttttctgatcaccaaaaccaaaataagtctccaagtcctacaagtaaaaaaattgttatcaggaaaagaagtgggttagacaaaatagaatcagatttagcaaaagcaagagcagcaattaagaaggcagcttctacacaaaattatgtcagctctctctataaaaatccagccgcctttcatcagttgagttttgcaattcttcttcttcttctttttttaaccatttgaggtaaaaaaaaagatttcttcttttattaaacagtaatttaatactagtacagtatttgacagttcctagatttttagtcaaatatgatagcgctgacaatttttcacatggattttgctgttttttcaaactatttgacatcgatttcatcaaagaattcagcatttaattacggttacaataaagacaaattaaacaaatacgcaacgtacacatagagttttaacggctcctgtgagatgcctctttctaagcaaaagtttactcttctttttgtttgtttattttcatatccgagattttgcagtacataatattggaattgagcttttgaggtttcaattgaactaaaaagaagttttaatgtattcaactacttttctactaaaagagtttgtttattctcatggcttcttttttataacataattagtttaaaagctaagattaaaaaaggttttaatcattaactatgtgttggaaaacaaaattaaagaaagcttttgaactttttgctaatcatatttaatttatttttttaatcaaaattatcaaattaggattttttttaatagtccttcttctcctttttaattgattttttagaaaacaaaacacacagattaagaaaacatattaaaactgattataaatgtattaatttttaggatttacattttactataattttaaattaatgatatttaattatttgttttgaagtttaaaatttatcaataaataactaataaatagtaaatagtaaatctaaaaaatcaattgtttgaaacaaattgttttctaaaaaattaattaataaggaacagagagaatatacaaataaaatattgagatgtttcttttttgtttaaagtattgagatgtttgttcattagaatagaagactattcgattctttcaaaacaagtaaacaagtaggagatagaatgaatatttaaactccaatacgaacgtggcgtagctcacctcagtgatattattacttgctttgtaataaataaaacattgatgtcatactcgtgtatgcacaaaatatcaggagtcacacggagatgatgaatcgttttaaggtgtggacatacacagagggagaggtcccattgttccatgacggccctgtgaatgacatttacggcatagaaggacaattcatggacgaaatgtgcgtggacggaccgaagagtagaagccgttttcgggcagatcgacccgagaatgctcatgttttcttcataccatttagcgtcgccaaggtcatccacttcgtctacaagcccatcacctctgtcgaagggttttcgcgggctcgcctacaccgccttatagaggattatgttgatgtagttgctactaagcatccatattggaaccgaagccaaggaggcgaccatttcatggtatcatgccatgactgggcaccagacgtgattgatgggaatccaaagttgtttgaaaaattcattaggggactttgcaatgctaacacctcggaaggtttccgacctaacgtggacgtatccattccggagatctaccttcctaaaggtaaattgggtccgtcttttctcgggaaatcaccgcgagttcgatctatactcgcatttttcgctggaagaagtcacggtgaaatccgaaaaatcttatttcaacattggaaagaaatggacaatgaagtccaagtctatgatcgtcttccgccaggaaaagactatacaaaaactatgggaatgagtaagttttgtctgtgtccgagtggttgggaggtcgctagcccgagggaggtcgaggcgatatatgctggttgtgtaccagtgatcatatcggataattattcattaccattcagtgatgtgctgaattgggattccttctccatacaaatccctgtttctaggataaaagagatcaaaaccattctacaaagtgtctctctcgtaagatacttgaagatgtataagagagttttagaagtgaagcagcatttcgtgttgaatcgtccagctaaaccctacgatgtgatgcatatgatgcttcattcgatctggttaagacgacttaatcttaggcttggtacatagtatacaattttttgttatgttgcaaataaatattaagtgtctaagttcatatgagttactagctttgtattctttccataaatttgcatagttctctcttgtaaaaaaatatacaacaacaaacacaatatcaaagatttccttattaataagagaaacaaagcatttgttatttttgtt

SEQ ID NO: 100804 - protein, 341 aa, Arabidopsis thaliana
  peptide (1)..(341): Ceres Seq. ID no. 13606099
  misc_feature (7)..(304): Pfam Name: Exostosin family Pfam Description: Exostosin family
  misc_feature (2)..(341): Homolog of NCBI NO: 15242798 NR Description: Exostosin family [Arabidopsis thaliana]
  misc_feature (1)..(341): Homolog of NCBI NO: 15146187 NR Description: AT5g33290/F19N2_10 [Arabidopsis thaliana]
  misc_feature (1)..(339): Homolog of NCBI NO: 30690502 NR Description: Exostosin family [Arabidopsis thaliana]
  misc_feature (2)..(339): Homolog of NCBI NO: 11358246 NR Description: hypothetical protein T27B3.50 - Arabidopsis >gi|6735291|emb|CAB68119.1| putative protein [Arabidopsis
  misc_feature (1)..(339): Homolog of NCBI NO: 15238967 NR Description: Exostosin family [Arabidopsis thaliana]
  misc_feature (1)..(339): Homolog of NCBI NO: 15241301 NR Description: Exostosin family [Arabidopsis thaliana]
  misc_feature (1)..(339): Homolog of NCBI NO: 9758008 NR Description: contains similarity to limonene
  misc_feature (1)..(339): Homolog of NCBI NO: 15237526 NR Description: expressed protein [Arabidopsis thaliana]
  misc_feature (1)..(339): Homolog of NCBI NO: 15231488 NR Description: Exostosin family [Arabidopsis thaliana]
  misc_feature (1)..(339): Homolog of NCBI NO: 34394611 NR Description: putative pectin-glucuronyltransferase [Oryza
MMNRFKVWTYTEGEVPLFHDGPVNDIYGIEGQFMDEMCVDGPKSRSRFRADRPENAHVFFIPFSVAKVIHFVYKPITSVEGFSRARLHRLIEDYVDVVATKHPYWNRSQGGDHFMVSCHDWAPDVIDGNPKLFEKFIRGLCNANTSEGFRPNVDVSIPEIYLPKGKLGPSFLGKSPRVRSILAFFAGRSHGEIRKILFQHWKEMDNEVQVYDRLPPGKDYTKTMGMSKFCLCPSGWEVASPREVEAIYAGCVPVIISDNYSLPFSDVLNWDSFSIQIPVSRIKEIKTILQSVSLVRYLKMYKRVLEVKQHFVLNRPAKPYDVMHMMLHSIWLRRLNLRLGT

SEQ ID NO: 100805 - protein, 340 aa, Arabidopsis thaliana
  peptide (1)..(340): Ceres Seq. ID no. 13606100
  misc_feature (6)..(303): Pfam Name: Exostosin family Pfam Description: Exostosin family
  misc_feature (1)..(340): Homolog of NCBI NO: 15242798 NR Description: Exostosin family [Arabidopsis thaliana]
  misc_feature (1)..(340): Homolog of NCBI NO: 15146187 NR Description: AT5g33290/F19N2_10 [Arabidopsis thaliana]
  misc_feature (1)..(338): Homolog of NCBI NO: 30690502 NR Description: Exostosin family [Arabidopsis thaliana]
  misc_feature (1)..(338): Homolog of NCBI NO: 11358246 NR Description: hypothetical protein T27B3.50 - Arabidopsis >gi|6735291|emb|CAB68119.1| putative protein [Arabidopsis
  misc_feature (1)..(338): Homolog of NCBI NO: 15238967 NR Description: Exostosin family [Arabidopsis thaliana]
  misc_feature (1)..(338): Homolog of NCBI NO: 15241301 NR Description: Exostosin family [Arabidopsis thaliana]
  misc_feature (1)..(338): Homolog of NCBI NO: 9758008 NR Description: contains similarity to limonene
  misc_feature (1)..(338): Homolog of NCBI NO: 15237526 NR Description: expressed protein [Arabidopsis thaliana]
  misc_feature (1)..(338): Homolog of NCBI NO: 15231488 NR Description: Exostosin family [Arabidopsis thaliana]
  misc_feature (1)..(338): Homolog of NCBI NO: 34394611 NR Description: putative pectin-glucuronyltransferase [Oryza
MNRFKVWTYTEGEVPLFHDGPVNDIYGIEGQFMDEMCVDGPKSRSRFRADRPENAHVFFIPFSVAKVIHFVYKPITSVEGFSRARLHRLIEDYVDVVATKHPYWNRSQGGDHFMVSCHDWAPDVIDGNPKLFEKFIRGLCNANTSEGFRPNVDVSIPEIYLPKGKLGPSFLGKSPRVRSILAFFAGRSHGEIRKILFQHWKEMDNEVQVYDRLPPGKDYTKTMGMSKFCLCPSGWEVASPREVEAIYAGCVPVIISDNYSLPFSDVLNWDSFSIQIPVSRIKEIKTILQSVSLVRYLKMYKRVLEVKQHFVLNRPAKPYDVMHMMLHSIWLRRLNLRLGT

SEQ ID NO: 100806 - protein, 308 aa, Arabidopsis thaliana
  peptide (1)..(308): Ceres Seq. ID no. 13606101
  misc_feature (1)..(271): Pfam Name: Exostosin family Pfam Description: Exostosin family
  misc_feature (1)..(308): Homolog of NCBI NO: 15242798 NR Description: Exostosin family [Arabidopsis thaliana]
  misc_feature (1)..(308): Homolog of NCBI NO: 15146187 NR Description: AT5g33290/F19N2_10 [Arabidopsis thaliana]
  misc_feature (1)..(306): Homolog of NCBI NO: 30690502 NR Description: Exostosin family [Arabidopsis thaliana]
  misc_feature (1)..(306): Homolog of NCBI NO: 11358246 NR Description: hypothetical protein T27B3.50 - Arabidopsis >gi|6735291|emb|CAB68119.1| putative protein [Arabidopsis
  misc_feature (1)..(306): Homolog of NCBI NO: 15238967 NR Description: Exostosin family [Arabidopsis thaliana]
  misc_feature (1)..(306): Homolog of NCBI NO: 15241301 NR Description: Exostosin family [Arabidopsis thaliana]
  misc_feature (1)..(306): Homolog of NCBI NO: 9758008 NR Description: contains similarity to limonene
  misc_feature (1)..(306): Homolog of NCBI NO: 15237526 NR Description: expressed protein [Arabidopsis thaliana]
  misc_feature (1)..(306): Homolog of NCBI NO: 15231488 NR Description: Exostosin family [Arabidopsis thaliana]
  misc_feature (1)..(306): Homolog of NCBI NO: 34394611 NR Description: putative pectin-glucuronyltransferase [Oryza
MDEMCVDGPKSRSRFRADRPENAHVFFIPFSVAKVIHFVYKPITSVEGFSRARLHRLIEDYVDVVATKHPYWNRSQGGDHFMVSCHDWAPDVIDGNPKLFEKFIRGLCNANTSEGFRPNVDVSIPEIYLPKGKLGPSFLGKSPRVRSILAFFAGRSHGEIRKILFQHWKEMDNEVQVYDRLPPGKDYTKTMGMSKFCLCPSGWEVASPREVEAIYAGCVPVIISDNYSLPFSDVLNWDSFSIQIPVSRIKEIKTILQSVSLVRYLKMYKRVLEVKQHFVLNRPAKPYDVMHMMLHSIWLRRLNLRLGT

SEQ ID NO: 100807 - DNA, 1373 bp, Arabidopsis thaliana
  misc_feature (1)..(1373): Ceres Seq. ID no. 13606112
  misc_feature: MA Experiment ID: 20000173 Result: Up-regulated in Transcription
  misc_feature: MA Experiment 20000173 PARAMETER Experiment Name: At_42deg_Heat_P Parameter: Age (day) Value: 14
  misc_feature: MA Experiment 20000173 PARAMETER Experiment Name: At_42deg_Heat_P Parameter: Organism Value: A. thaliana
  misc_feature: MA Experiment 20000173 PARAMETER Experiment Name: At_42deg_Heat_P Parameter: Plant Line Value: WS
  misc_feature: MA Experiment 20000173 PARAMETER Experiment Name: At_42deg_Heat_P Parameter: Temperature (deg C) Value: 42 vs. 22
  misc_feature: MA Experiment 20000173 PARAMETER Experiment Name: At_42deg_Heat_P Parameter: Timepoint (hr) Value: 6
  misc_feature: MA Experiment 20000173 PARAMETER Experiment Name: At_42deg_Heat_P Parameter: Tissue Value: Aerial
  misc_feature: MA Experiment ID: 20001450 Result: Up-regulated in Transcription
  misc_feature: MA Experiment 20001450 PARAMETER Experiment Name: At_Far-red-induction_P Parameter: Age (day) Value: 7
  misc_feature: MA Experiment 20001450 PARAMETER Experiment Name: At_Far-red-induction_P Parameter: Light Value: Far-red vs. White
  misc_feature: MA Experiment 20001450 PARAMETER Experiment Name: At_Far-red-induction_P Parameter: Organism Value: A. thaliana
  misc_feature: MA Experiment 20001450 PARAMETER Experiment Name: At_Far-red-induction_P Parameter: Plant Line Value: Columbia
  misc_feature: MA Experiment 20001450 PARAMETER Experiment Name: At_Far-red-induction_P Parameter: Timepoint (hr) Value: 8
  misc_feature: MA Experiment 20001450 PARAMETER Experiment Name: At_Far-red-induction_P Parameter: Tissue Value: Whole Plant
  misc_feature: MA Experiment ID: 20001906 Result: Up-regulated in Transcription
  misc_feature: MA Experiment 20001906 PARAMETER Experiment Name: At_Drought_Reproduction_P Parameter: Age (day) Value: 35
  misc_feature: MA Experiment 20001906 PARAMETER Experiment Name: At_Drought_Reproduction_P Parameter: Organism Value: A. thaliana
  misc_feature: MA Experiment 20001906 PARAMETER Experiment Name: At_Drought_Reproduction_P Parameter: Plant Line Value: WS
  misc_feature: MA Experiment 20001906 PARAMETER Experiment Name: At_Drought_Reproduction_P Parameter: Timepoint (day) Value: 5
  misc_feature: MA Experiment 20001906 PARAMETER Experiment Name: At_Drought_Reproduction_P Parameter: Tissue Value: Siliques
  misc_feature: MA Experiment 20001906 PARAMETER Experiment Name: At_Drought_Reproduction_P Parameter: Treatment Value: Drought vs. No Drought
atagcctcactaaacatctcttgttattttcgaaagtgaagagaaaaatggtggatctattgaactcggtgatgaacctggtggcgcctccagcgaccatggtggtgatggcctttgcatggccattactgtctttcattagcttctccgaacgggcttacaactcttatttcgccaccgaaaatatggaagataaagtagttgtcatcaccggagcttcatcggccattggagagcaaatagcatatgaatatgcaaaaagaggagcgaatttggtgttggtggcgaggagagagcagagactgagagttgtgagtaataaggctaaacagattggagccaaccatgtgatcatcatcgctgctgatgtcatcaaagaagatgactgccgccgttttatcacccaagccgtcaactattacggccgcgtggatcatctagtgaatacagcgagtcttggacacactttttactttgaggaagtgagtgacacgactgtgtttccacatttgctggacataaacttctgggggaatgtttatccgacatacgtagcgttgccataccttcaccagacgaatggccgaatagtcgtgaatgcatcggttgaaaactggttgcctctaccacggatgagtctttattctgctgcaaaagcagcattagtcaacttctatgagacgctgcgtttcgagctaaatggagacgttggtataactatcgcgactcacgggtggattggcagtgagatgagtggaggaaagttcatgctagaagaaggtgctgagatgcaatggaaggaagagagagaagtacctgcaaatggtggaccgctagaggaatttgcaaagatgattgtggcaggagcttgtaggggagatgcatatgtgaagtttccaaactggtacgatgtctttctcctctatcgagtcttcacaccgaatgtactgagatggacattcaagttgttactgtctactgagggtacacgtagaagctcccttgttggggtcgggtcaggtatgcctgtggatgaatcctcttcacaaatgaaacttatgcttgaaggaggaccacctcgagttcctgcaagcccacctaggtataccgcaagcccacctcattataccgcaagcccaccacggtatcctgcaagcccacctcggtatcctgcgagcccacctcggttttcacagtttaatatccaagagttgtaataaaaactggatggaggaacaagaggtgaggtcggtttggtgtgtagagtgtagagtgaacttgagctttagaactttctctgaccaagtgaaccacaaaaaaagaaaagcaatgtaaaggacatcgagtcaagaataataccggatgatacagcc

SEQ ID NO: 100808 - protein, 404 aa, Arabidopsis thaliana
  peptide (1)..(404): Ceres Seq. ID no. 13606113
  misc_feature (16)..(404): Homolog of NCBI NO: 15234888 NR Description: short-chain dehydrogenase/reductase family protein
  misc_feature (17)..(372): Homolog of NCBI NO: 21311775 NR Description: steroleosin-B [Sesamum indicum]
  misc_feature (17)..(332): Homolog of NCBI NO: 18423187 NR Description: short-chain dehydrogenase/reductase family protein
  misc_feature (17)..(336): Homolog of NCBI NO: 15824408 NR Description: steroleosin [Sesamum indicum]
  misc_feature (18)..(364): Homolog of NCBI NO: 21742781 NR Description: OSJNBa0055C08.3 [Oryza sativa (japonica
  misc_feature (17)..(324): Homolog of NCBI NO: 15241261 NR Description: short-chain dehydrogenase/reductase family [Arabidopsis thaliana] >gi|8777400|dbj|BAA96990.1| contains
  misc_feature (17)..(316): Homolog of NCBI NO: 15232777 NR Description: short-chain dehydrogenase/reductase family protein
  misc_feature (17)..(316): Homolog of NCBI NO: 8777392 NR Description: 11-beta-hydroxysteroid dehydrogenase-like
  misc_feature (17)..(316): Homolog of NCBI NO: 15241203 NR Description: short-chain dehydrogenase/reductase family protein
  misc_feature (17)..(323): Homolog of NCBI NO: 15232779 NR Description: short-chain dehydrogenase/reductase family protein
SLTKHLLLFSKVKRKMVDLLNSVMNLVAPPATMVVMAFAWPLLSFISFSERAYNSYFATENMEDKVVVITGASSAIGEQIAYEYAKRGANLVLVARREQRLRVVSNKAKQIGANHVIIIAADVIKEDDCRRFITQAVNYYGRVDHLVNTASLGHTFYFEEVSDTTVFPHLLDINFWGNVYPTYVALPYLHQTNGRIVVNASVENWLPLPRMSLYSAAKAALVNFYETLRFELNGDVGITIATHGWIGSEMSGGKFMLEEGAEMQWKEEREVPANGGPLEEFAKMIVAGACRGDAYVKFPNWYDVFLLYRVFTPNVLRWTFKLLLSTEGTRRSSLVGVGSGMPVDESSSQMKLMLEGGPPRVPASPPRYTASPPHYTASPPRYPASPPRYPASPPRFSQFNIQEL

SEQ ID NO: 100809 - protein, 389 aa, Arabidopsis thaliana
  peptide (1)..(389): Ceres Seq. ID no. 13606114
  misc_feature (1)..(389): Homolog of NCBI NO: 15234888 NR Description: short-chain dehydrogenase/reductase family protein
  misc_feature (2)..(357): Homolog of NCBI NO: 21311775 NR Description: steroleosin-B [Sesamum indicum]
  misc_feature (2)..(317): Homolog of NCBI NO: 18423187 NR Description: short-chain dehydrogenase/reductase family protein
  misc_feature (2)..(321): Homolog of NCBI NO: 15824408 NR Description: steroleosin [Sesamum indicum]
  misc_feature (3)..(349): Homolog of NCBI NO: 21742781 NR Description: OSJNBa0055C08.3 [Oryza sativa (japonica
  misc_feature (2)..(309): Homolog of NCBI NO: 15241261 NR Description: short-chain dehydrogenase/reductase family [Arabidopsis thaliana] >gi|8777400|dbj|BAA96990.1| contains
  misc_feature (2)..(301): Homolog of NCBI NO: 15232777 NR Description: short-chain dehydrogenase/reductase family protein
  misc_feature (2)..(301): Homolog of NCBI NO: 8777392 NR Description: 11-beta-hydroxysteroid dehydrogenase-like
  misc_feature (2)..(301): Homolog of NCBI NO: 15241203 NR Description: short-chain dehydrogenase/reductase family protein
  misc_feature (2)..(308): Homolog of NCBI NO: 15232779 NR Description: short-chain dehydrogenase/reductase family protein
MVDLLNSVMNLVAPPATMVVMAFAWPLLSFISFSERAYNSYFATENMEDKVVVITGASSAIGEQIAYEYAKRGANLVLVARREQRLRVVSNKAKQIGANHVIIIAADVIKEDDCRRFITQAVNYYGRVDHLVNTASLGHTFYFEEVSDTTVFPHLLDINFWGNVYPTYVALPYLHQTNGRIVVNASVENWLPLPRMSLYSAAKAALVNFYETLRFELNGDVGITIATHGWIGSEMSGGKFMLEEGAEMQWKEEREVPANGGPLEEFAKMIVAGACRGDAYVKFPNWYDVFLLYRVFTPNVLRWTFKLLLSTEGTRRSSLVGVGSGMPVDESSSQMKLMLEGGPPRVPASPPRYTASPPHYTASPPRYPASPPRYPASPPRFSQFNIQEL

SEQ ID NO: 100810 - protein, 381 aa, Arabidopsis thaliana
  peptide (1)..(381): Ceres Seq. ID no. 13606115
  misc_feature (1)..(381): Homolog of NCBI NO: 15234888 NR Description: short-chain dehydrogenase/reductase family protein
  misc_feature (1)..(349): Homolog of NCBI NO: 21311775 NR Description: steroleosin-B [Sesamum indicum]
  misc_feature (1)..(309): Homolog of NCBI NO: 18423187 NR Description: short-chain dehydrogenase/reductase family protein
  misc_feature (1)..(313): Homolog of NCBI NO: 15824408 NR Description: steroleosin [Sesamum indicum]
  misc_feature (1)..(341): Homolog of NCBI NO: 21742781 NR Description: OSJNBa0055C08.3 [Oryza sativa (japonica
  misc_feature (1)..(301): Homolog of NCBI NO: 15241261 NR Description: short-chain dehydrogenase/reductase family [Arabidopsis thaliana] >gi|8777400|dbj|BAA96990.1| contains
  misc_feature (1)..(293): Homolog of NCBI NO: 15232777 NR Description: short-chain dehydrogenase/reductase family protein
  misc_feature (1)..(293): Homolog of NCBI NO: 8777392 NR Description: 11-beta-hydroxysteroid dehydrogenase-like
  misc_feature (1)..(293): Homolog of NCBI NO: 15241203 NR Description: short-chain dehydrogenase/reductase family protein
  misc_feature (1)..(300): Homolog of NCBI NO: 15232779 NR Description: short-chain dehydrogenase/reductase family protein
MNLVAPPATMVVMAFAWPLLSFISFSERAYNSYFATENMEDKVVVITGASSAIGEQIAYEYAKRGANLVLVARREQRLRVVSNKAKQIGANHVIIIAADVIKEDDCRRFITQAVNYYGRVDHLVNTASLGHTFYFEEVSDTTVFPHLLDINFWGNVYPTYVALPYLHQTNGRIVVNASVENWLPLPRMSLYSAAKAALVNFYETLRFELNGDVGITIATHGWIGSEMSGGKFMLEEGAEMQWKEEREVPANGGPLEEFAKMIVAGACRGDAYVKFPNWYDVFLLYRVFTPNVLRWTFKLLLSTEGTRRSSLVGVGSGMPVDESSSQMKLMLEGGPPRVPASPPRYTASPPHYTASPPRYPASPPRYPASPPRFSQFNIQEL

SEQ ID NO: 100811 - DNA, 1259 bp, Arabidopsis thaliana
  misc_feature (1)..(1259): Ceres Seq. ID no. 13606118
attatcgctctcacttcagattttaaaccaatcatggcagcatcaaaactcctcgtatccgacatcgcctctgtcgttgatcacgtcccttcaaactacgtcagaccagtctctgaccgtccaaaaatgtccgaggttcaaacttccggcgactctattcctctaatcgatctccacgacctccatggacctaatcgagctgacattatcaatcagtttgctcatgcatgctcttcttgtggcttcttccagatcaagaaccatggagtaccagaagaaacgatcaaaaaaatgatgaatgcggcaagagagtttttccggcaatcagagagcgaaagagtgaagcattactcagcagataccaaaaagacaacgagactctccacaagtttcaacgtttccaaagagaaagtctctaactggagagacttccttcgactccattgctaccctatcgaagatttcatcaatgaatggccctcaacaccgatctctttcagagaagtcacagccgaatacgctacaagcgttagagccttggttctgacacttcttgaggcaatctcagagagcttaggtcttgcgaaagaccgtgtaagcaatacaataggcaaacatggtcaacacatggctattaactactatccccggtgtcctcaaccagagctaacttacggacttccggggcataaagatgcaaacttgatcactgttcttcttcaagatgaagtctctggtttacaggtgtttaaagatggtaaatggatcgctgttaatcctgttcccaacactttcatagtcaaccttggtgaccaaatgcaggttataagcaatgaaaaatacaagagtgttcttcacagagcggttgtgaacagcgacatggagcggatatcgataccgacattctactgtccttctgaagatgctgtgattagtccagcacaagagctgatcaatgaggaagaagactctcctgctatttacagaaactttacatatgctgaatattttgaaaagttttgggacacagcatttgatactgagagctgtattgactcgttcaaagcatccaccgcctaagatagtgtactatcgaatcaatcatccgtcatgactaggccggtccttagttcttgattggaactcaaatacccatttgtgttgccatttcaagatcagtatagttttctttaatgaacaaatctgcctgagaagtaaaacaaactgttcttgcaacattttgaaatcattatgttttt

SEQ ID NO: 100812 - protein, 359 aa, Arabidopsis thaliana
  peptide (1)..(359): Ceres Seq. ID no. 13606119
  misc_feature (206)..(305): Pfam Name: 2OG-Fe(II) oxygenase superfamily Pfam Description: 2OG-Fe(II) oxygenase superfamily
  misc_feature (12)..(359): Homolog of NCBI NO: 15235124 NR Description: oxidoreductase, 2OG-Fe(II) oxygenase family
  misc_feature (13)..(358): Homolog of NCBI NO: 15235126 NR Description: oxidoreductase, 2OG-Fe(II) oxygenase family
  misc_feature (13)..(355): Homolog of NCBI NO: 38345873 NR Description: OSJNBa0064M23.15 [Oryza sativa (japonica
  misc_feature (14)..(354): Homolog of NCBI NO: 15238567 NR Description: oxidoreductase, 2OG-Fe(II) oxygenase family
  misc_feature (14)..(354): Homolog of NCBI NO: 21553527 NR Description: flavanone 3-hydroxylase-like protein [Arabidopsis
  misc_feature (17)..(355): Homolog of NCBI NO: 38345872 NR Description: OSJNBa0064M23.14 [Oryza sativa (japonica
  misc_feature (24)..(355): Homolog of NCBI NO: 37536444 NR Description: unknown protein [Oryza sativa (japonica
  misc_feature (24)..(359): Homolog of NCBI NO: 7433240 NR Description: probable flavonol synthase [imported] - thaliana >gi|20197022|gb|AAM14878.1| putative flavonol synthase
  misc_feature (24)..(359): Homolog of NCBI NO: 30689834 NR Description: flavonol synthase family [Arabidopsis thaliana]
  misc_feature (17)..(340): Homolog of NCBI NO: 21327037 NR Description: putative flavanone 3-hydroxylase [Saussurea
IIALTSDFKPIMAASKLLVSDIASVVDHVPSNYVRPVSDRPKMSEVQTSGDSIPLIDLHDLHGPNRADIINQFAHACSSCGFFQIKNHGVPEETIKKMMNAAREFFRQSESERVKHYSADTKKTTRLSTSFNVSKEKVSNWRDFLRLHCYPIEDFINEWPSTPISFREVTAEYATSVRALVLTLLEAISESLGLAKDRVSNTIGKHGQHMAINYYPRCPQPELTYGLPGHKDANLITVLLQDEVSGLQVFKDGKWIAVNPVPNTFIVNLGDQMQVISNEKYKSVLHRAVVNSDMERISIPTFYCPSEDAVISPAQELINEEEDSPAIYRNFTYAEYFEKFWDTAFDTESCIDSFKASTA

SEQ ID NO: 100813 - protein, 348 aa, Arabidopsis thaliana
  peptide (1)..(348): Ceres Seq. ID no. 13606120
  misc_feature (195)..(294): Pfam Name: 2OG-Fe(II) oxygenase superfamily Pfam Description: 2OG-Fe(II) oxygenase superfamily
  misc_feature (1)..(348): Homolog of NCBI NO: 15235124 NR Description: oxidoreductase, 2OG-Fe(II) oxygenase family
  misc_feature (2)..(347): Homolog of NCBI NO: 15235126 NR Description: oxidoreductase, 2OG-Fe(II) oxygenase family
  misc_feature (2)..(344): Homolog of NCBI NO: 38345873 NR Description: OSJNBa0064M23.15 [Oryza sativa (japonica
  misc_feature (3)..(343): Homolog of NCBI NO: 15238567 NR Description: oxidoreductase, 2OG-Fe(II) oxygenase family
  misc_feature (3)..(343): Homolog of NCBI NO: 21553527 NR Description: flavanone 3-hydroxylase-like protein [Arabidopsis
  misc_feature (6)..(344): Homolog of NCBI NO: 38345872 NR Description: OSJNBa0064M23.14 [Oryza sativa (japonica
  misc_feature (13)..(344): Homolog of NCBI NO: 37536444 NR Description: unknown protein [Oryza sativa (japonica
  misc_feature (13)..(348): Homolog of NCBI NO: 7433240 NR Description: probable flavonol synthase [imported] - thaliana >gi|20197022|gb|AAM14878.1| putative flavonol synthase
  misc_feature (13)..(348): Homolog of NCBI NO: 30689834 NR Description: flavonol synthase family [Arabidopsis thaliana]
  misc_feature (6)..(329): Homolog of NCBI NO: 21327037 NR Description: putative flavanone 3-hydroxylase [Saussurea
MAASKLLVSDIASVVDHVPSNYVRPVSDRPKMSEVQTSGDSIPLIDLHDLHGPNRADIINQFAHACSSCGFFQIKNHGVPEETIKKMMNAAREFFRQSESERVKHYSADTKKTTRLSTSFNVSKEKVSNWRDFLRLHCYPIEDFINEWPSTPISFREVTAEYATSVRALVLTLLEAISESLGLAKDRVSNTIGKHGQHMAINYYPRCPQPELTYGLPGHKDANLITVLLQDEVSGLQVFKDGKWIAVNPVPNTFIVNLGDQMQVISNEKYKSVLHRAVVNSDMERISIPTFYCPSEDAVISPAQELINEEEDSPAIYRNFTYAEYFEKFWDTAFDTESCIDSFKASTA

SEQ ID NO: 100814 - protein, 317 aa, Arabidopsis thaliana
  peptide (1)..(317): Ceres Seq. ID no. 13606121
  misc_feature (164)..(263): Pfam Name: 2OG-Fe(II) oxygenase superfamily Pfam Description: 2OG-Fe(II) oxygenase superfamily
  misc_feature (1)..(317): Homolog of NCBI NO: 15235124 NR Description: oxidoreductase, 2OG-Fe(II) oxygenase family
  misc_feature (1)..(316): Homolog of NCBI NO: 15235126 NR Description: oxidoreductase, 2OG-Fe(II) oxygenase family
  misc_feature (1)..(313): Homolog of NCBI NO: 38345873 NR Description: OSJNBa0064M23.15 [Oryza sativa (japonica
  misc_feature (1)..(312): Homolog of NCBI NO: 15238567 NR Description: oxidoreductase, 2OG-Fe(II) oxygenase family
  misc_feature (1)..(312): Homolog of NCBI NO: 21553527 NR Description: flavanone 3-hydroxylase-like protein [Arabidopsis
  misc_feature (1)..(313): Homolog of NCBI NO: 38345872 NR Description: OSJNBa0064M23.14 [Oryza sativa (japonica
  misc_feature (1)..(313): Homolog of NCBI NO: 37536444 NR Description: unknown protein [Oryza sativa (japonica
  misc_feature (1)..(317): Homolog of NCBI NO: 7433240 NR Description: probable flavonol synthase [imported] - thaliana >gi|20197022|gb|AAM14878.1| putative flavonol synthase
  misc_feature (1)..(317): Homolog of NCBI NO: 30689834 NR Description: flavonol synthase family [Arabidopsis thaliana]
  misc_feature (1)..(298): Homolog of NCBI NO: 21327037 NR Description: putative flavanone 3-hydroxylase [Saussurea
MSEVQTSGDSIPLIDLHDLHGPNRADIINQFAHACSSCGFFQIKNHGVPEETIKKMMNAAREFFRQSESERVKHYSADTKKTTRLSTSFNVSKEKVSNWRDFLRLHCYPIEDFINEWPSTPISFREVTAEYATSVRALVLTLLEAISESLGLAKDRVSNTIGKHGQHMAINYYPRCPQPELTYGLPGHKDANLITVLLQDEVSGLQVFKDGKWIAVNPVPNTFIVNLGDQMQVISNEKYKSVLHRAVVNSDMERISIPTFYCPSEDAVISPAQELINEEEDSPAIYRNFTYAEYFEKFWDTAFDTESCIDSFKASTA

SEQ ID NO: 100815 - DNA, 1355 bp, Arabidopsis thaliana
  misc_feature (1)..(1355): Ceres Seq. ID no. 13606133
  misc_feature: MA Experiment ID: 108434 Result: Down-regulated in Transcription
  misc_feature: MA Experiment 108434 PARAMETER Experiment Name: At_Root_Tips_cDNA_P Parameter: Tissue Value: Root Tips
  misc_feature: MA Experiment ID: 108572 Result: Up-regulated in Transcription
  misc_feature: MA Experiment 108572 PARAMETER Experiment Name: At_Drought_cDNA_P Parameter: Timepoint (hr) Value: 1
  misc_feature: MA Experiment 108572 PARAMETER Experiment Name: At_Drought_cDNA_P Parameter: Tissue Value: Aerial
  misc_feature: MA Experiment 108572 PARAMETER Experiment Name: At_Drought_cDNA_P Parameter: Treatment Value: Drought vs. No Drought
  misc_feature: MA Experiment ID: 108573 Result: Up-regulated in Transcription
  misc_feature: MA Experiment 108573 PARAMETER Experiment Name: At_Drought_cDNA_P Parameter: Timepoint (hr) Value: 6
  misc_feature: MA Experiment 108573 PARAMETER Experiment Name: At_Drought_cDNA_P Parameter: Tissue Value: Aerial
  misc_feature: MA Experiment 108573 PARAMETER Experiment Name: At_Drought_cDNA_P Parameter: Treatment Value: Drought vs. No Drought
  misc_feature: MA Experiment ID: 108579 Result: Up-regulated in Transcription
  misc_feature: MA Experiment 108579 PARAMETER Experiment Name: At_4deg_Cold_cDNA_P Parameter: Temperature (deg C) Value: 4 vs. 22
  misc_feature: MA Experiment 108579 PARAMETER Experiment Name: At_4deg_Cold_cDNA_P Parameter: Timepoint (hr) Value: 6
  misc_feature: MA Experiment 108579 PARAMETER Experiment Name: At_4deg_Cold_cDNA_P Parameter: Tissue Value: Aerial
  misc_feature: MA Experiment ID: 20000093 Result: Up-regulated in Transcription
  misc_feature: MA Experiment 20000093 PARAMETER Experiment Name: At_42deg_Heat_cDNA_P Parameter: Temperature (deg C) Value: 42 vs. 22
  misc_feature: MA Experiment 20000093 PARAMETER Experiment Name: At_42deg_Heat_cDNA_P Parameter: Timepoint (hr) Value: 0.5
  misc_feature: MA Experiment 20000093 PARAMETER Experiment Name: At_42deg_Heat_cDNA_P Parameter: Tissue Value: Aerial
  misc_feature: MA Experiment ID: 20000111 Result: Up-regulated in Transcription
  misc_feature: MA Experiment 20000111 PARAMETER Experiment Name: At_42deg_Heat_cDNA_P Parameter: Temperature (deg C) Value: 42 vs. 22
  misc_feature: MA Experiment 20000111 PARAMETER Experiment Name: At_42deg_Heat_cDNA_P Parameter: Timepoint (hr) Value: 6
  misc_feature: MA Experiment 20000111 PARAMETER Experiment Name: At_42deg_Heat_cDNA_P Parameter: Tissue Value: Aerial
  misc_feature: MA Experiment ID: 20000144 Result: Up-regulated in Transcription
  misc_feature: MA Experiment 20000144 PARAMETER Experiment Name: At_42deg_Heat_cDNA_P Parameter: Temperature (deg C) Value: 42 vs. 22
  misc_feature: MA Experiment 20000144 PARAMETER Experiment Name: At_42deg_Heat_cDNA_P Parameter: Timepoint (hr) Value: 1
  misc_feature: MA Experiment 20000144 PARAMETER Experiment Name: At_42deg_Heat_cDNA_P Parameter: Tissue Value: Aerial
  misc_feature: MA Experiment ID: 20000327 Result: Up-regulated in Transcription
  misc_feature: MA Experiment 20000327 PARAMETER Experiment Name: At_42deg_Heat_Sub_P Parameter: Age (day) Value: 14
  misc_feature: MA Experiment 20000327 PARAMETER Experiment Name: At_42deg_Heat_Sub_P Parameter: Organism Value: A. thaliana
  misc_feature: MA Experiment 20000327 PARAMETER Experiment Name: At_42deg_Heat_Sub_P Parameter: Plant Line Value: WS
  misc_feature: MA Experiment 20000327 PARAMETER Experiment Name: At_42deg_Heat_Sub_P Parameter: Temperature (deg C) Value: 42 vs. 22
  misc_feature: MA Experiment 20000327 PARAMETER Experiment Name: At_42deg_Heat_Sub_P Parameter: Timepoint (hr) Value: 1
  misc_feature: MA Experiment 20000327 PARAMETER Experiment Name: At_42deg_Heat_Sub_P Parameter: Tissue Value: Aerial
  misc_feature: MA Experiment ID: 20000328 Result: Up-regulated in Transcription
  misc_feature: MA Experiment 20000328 PARAMETER Experiment Name: At_42deg_Heat_Sub_P Parameter: Age (day) Value: 14
  misc_feature: MA Experiment 20000328 PARAMETER Experiment Name: At_42deg_Heat_Sub_P Parameter: Organism Value: A. thaliana
  misc_feature: MA Experiment 20000328 PARAMETER Experiment Name: At_42deg_Heat_Sub_P Parameter: Plant Line Value: WS
  misc_feature: MA Experiment 20000328 PARAMETER Experiment Name: At_42deg_Heat_Sub_P Parameter: Temperature (deg C) Value: 42 vs. 22
  misc_feature: MA Experiment 20000328 PARAMETER Experiment Name: At_42deg_Heat_Sub_P Parameter: Timepoint (hr) Value: 6
  misc_feature: MA Experiment 20000328 PARAMETER Experiment Name: At_42deg_Heat_Sub_P Parameter: Tissue Value: Aerial
  misc_feature: MA Experiment ID: 20000440 Result: Down-regulated in Transcription
  misc_feature: MA Experiment 20000440 PARAMETER Experiment Name: At_Closed-Flower__Sub_P Parameter: Tissue Value: Closed Flower vs. Whole Plant
  misc_feature: MA Experiment ID: 20001807 Result: Down-regulated in Transcription
  misc_feature: MA Experiment 20001807 PARAMETER Experiment Name: At_50mM_NH4NO3_L-to-H_Sub_P Parameter: Timepoint (hr) Value: 6
  misc_feature: MA Experiment 20001807 PARAMETER Experiment Name: At_50mM_NH4NO3_L-to-H_Sub_P Parameter: Tissue Value: Leaf
  misc_feature: MA Experiment 20001807 PARAMETER Experiment Name: At_50mM_NH4NO3_L-to-H_Sub_P Parameter: Treatment Value: 50mM NH4NO3 vs 100mM Mannitol
acaattcagatttcaatttctcaaaatcttaaaaactttctctcaattctctctaccgtgatcaagatgcagatctttgttaagactctcaccggaaagacaatcaccctcgaggtggaaagctccgacaccatcgacaacgttaaggccaagatccaggataaggagggcattcctccggatcagcagaggcttattttcgccggcaagcagctagaggatggccgtacgttggctgattacaatatccagaaggaatccaccctccacttggtcctcaggctccgtggtggtatgcagattttcgttaaaaccctaacgggaaagacgattactcttgaggtggagagttctgacaccatcgacaacgtcaaggccaagatccaagacaaagagggtattcctccggaccagcagaggctgatcttcgccggaaagcagttggaggatggcagaactcttgctgactacaatatccagaaggagtccacccttcatcttgttctcaggctccgtggtggtatgcagattttcgttaagacgttgactgggaaaactatcactttggaggtggagagttctgacaccattgataacgtgaaagccaagatccaggacaaagagggtatcccaccggaccagcagagattgatcttcgccggaaagcaacttgaagatggaagaactttggctgactacaacattcagaaggagtccacacttcacttggtcttgcgtctgcgtggaggtatgcagatcttcgtgaagactctcaccggaaagactatcactttggaggtagagagctctgacaccattgacaacgtgaaggccaagatccaggataaggaaggaatccctccggaccagcagaggttgatctttgccggaaaacaattggaggatggtcgtactttggcggattacaacatccagaaggagtcgacccttcacttggtgttgcgtctgcgtggaggtatgcagatcttcgtcaagactttgaccggaaagaccatcacccttgaagtggaaagctccgacaccattgacaacgtcaaggccaagatccaggacaaggaggtattcctccggaccagcagcgtctcatcttcgctggaaagcagcttgaggatggacgtactttggccgactacaacatccagaaggagtctactcttcacttggtcctgcgtcttcgtggtggtttctaaatctcgtctctgttatgcttaagaagttcaatgtttcgtttcatgtaaaactttggtggtttgtgttttggggccttgtataatccctgatgaataagtgttctactatgtttccgttcctgttatctctttctttctaatgac

SEQ ID NO: 100816 - protein, 410 aa, Arabidopsis thaliana
  peptide (1)..(410): Ceres Seq. ID no. 13606134
  misc_feature (23)..(410): Homolog of NCBI NO: 18412930 NR Description: polyubiquitin UBQ10/SEN3 [Arabidopsis thaliana]
  misc_feature (23)..(410): Homolog of NCBI NO: 30680052 NR Description: polyubiquitin UBQ10/SEN3 [Arabidopsis thaliana] polyubiquitin UBQ10/SEN3 [Arabidopsis thaliana]
  misc_feature (23)..(410): Homolog of NCBI NO: 23397122 NR Description: putative polyubiquitin (UBQ10) [Arabidopsis
  misc_feature (23)..(360): Homolog of NCBI NO: 70644 NR Description: ubiquitin precursor - common sunflower (fragment)
  misc_feature (23)..(360): Homolog of NCBI NO: 70645 NR Description: polyubiquitin 5 - garden pea
  misc_feature (23)..(360): Homolog of NCBI NO: 170352 NR Description: hexameric polyubiquitin >gi|870792|gb|AAA68878.1| >gi|4115333|gb|AAD03341.1| ubiquitin [Pisum sativum] ubiquitin [Pisum sativum] >gi|22655101|gb|AAM98141.1|
  misc_feature (23)..(360): Homolog of NCBI NO: 170352 NR Description: hexameric polyubiquitin >gi|870792|gb|AAA68878.1| >gi|4115333|gb|AAD03341.1| ubiquitin [Pisum sativum] ubiquitin [Pisum sativum] >gi|22655101|gb|AAM98141.1|
  misc_feature (23)..(360): Homolog of NCBI NO: 902586 NR Description: ubiquitin
  misc_feature (23)..(360): Homolog of NCBI NO: 100934 NR Description: polyubiquitin - maize >gi|248337|gb|AAB21993.1|
  misc_feature (23)..(360): Homolog of NCBI NO: 902584 NR Description: polyubiquitin containing 7 ubiquitin monomers
TIQISISQNLKNFLSILSTVIKMQIFVKTLTGKTITLEVESSDTIDNVKAKIQDKEGIPPDQQRLIFAGKQLEDGRTLADYNIQKESTLHLVLRLRGGMQIFVKTLTGKTITLEVESSDTIDNVKAKIQDKEGIPPDQQRLIFAGKQLEDGRTLADYNIQKESTLHLVLRLRGGMQIFVKTLTGKTITLEVESSDTIDNVKAKIQDKEGIPPDQQRLIFAGKQLEDGRTLADYNIQKESTLHLVLRLRGGMQIFVKTLTGKTITLEVESSDTIDNVKAKIQDKEGIPPDQQRLIFAGKQLEDGRTLADYNIQKESTLHLVLRLRGGMQIFVKTLTGKTITLEVESSDTIDNVKAKIQDKEVFLRTSSVSSSLESSLRMDVLWPTTTSRRSLLFTWSCVFVVVSKSRLCYA

SEQ ID NO: 100817 - protein, 388 aa, Arabidopsis thaliana
  peptide (1)..(388): Ceres Seq. ID no. 13606135
  misc_feature (1)..(388): Homolog of NCBI NO: 18412930 NR Description: polyubiquitin UBQ10/SEN3 [Arabidopsis thaliana]
  misc_feature (1)..(388): Homolog of NCBI NO: 30680052 NR Description: polyubiquitin UBQ10/SEN3 [Arabidopsis thaliana] polyubiquitin UBQ10/SEN3 [Arabidopsis thaliana]
  misc_feature (1)..(388): Homolog of NCBI NO: 23397122 NR Description: putative polyubiquitin (UBQ10) [Arabidopsis
  misc_feature (1)..(338): Homolog of NCBI NO: 70644 NR Description: ubiquitin precursor - common sunflower (fragment)
  misc_feature (1)..(338): Homolog of NCBI NO: 70645 NR Description: polyubiquitin 5 - garden pea
  misc_feature (1)..(338): Homolog of NCBI NO: 170352 NR Description: hexameric polyubiquitin >gi|870792|gb|AAA68878.1| >gi|4115333|gb|AAD03341.1| ubiquitin [Pisum sativum] ubiquitin [Pisum sativum] >gi|22655101|gb|AAM98141.1|
  misc_feature (1)..(338): Homolog of NCBI NO: 170352 NR Description: hexameric polyubiquitin >gi|870792|gb|AAA68878.1| >gi|4115333|gb|AAD03341.1| ubiquitin [Pisum sativum] ubiquitin [Pisum sativum] >gi|22655101|gb|AAM98141.1|
  misc_feature (1)..(338): Homolog of NCBI NO: 902586 NR Description: ubiquitin
  misc_feature (1)..(338): Homolog of NCBI NO: 100934 NR Description: polyubiquitin - maize >gi|248337|gb|AAB21993.1|
  misc_feature (1)..(338): Homolog of NCBI NO: 902584 NR Description: polyubiquitin containing 7 ubiquitin monomers
MQIFVKTLTGKTITLEVESSDTIDNVKAKIQDKEGIPPDQQRLIFAGKQLEDGRTLADYNIQKESTLHLVLRLRGGMQIFVKTLTGKTITLEVESSDTIDNVKAKIQDKEGIPPDQQRLIFAGKQLEDGRTLADYNIQKESTLHLVLRLRGGMQIFVKTLTGKTITLEVESSDTIDNVKAKIQDKEGIPPDQQRLIFAGKQLEDGRTLADYNIQKESTLHLVLRLRGGMQIFVKTLTGKTITLEVESSDTIDNVKAKIQDKEGIPPDQQRLIFAGKQLEDGRTLADYNIQKESTLHLVLRLRGGMQIFVKTLTGKTITLEVESSDTIDNVKAKIQDKEVFLRTSSVSSSLESSLRMDVLWPTTTSRRSLLFTWSCVFVVVSKSRLCYA

SEQ ID NO: 100818 - protein, 312 aa, Arabidopsis thaliana
  peptide (1)..(312): Ceres Seq. ID no. 13606136
  misc_feature (1)..(312): Homolog of NCBI NO: 18412930 NR Description: polyubiquitin UBQ10/SEN3 [Arabidopsis thaliana]
  misc_feature (1)..(312): Homolog of NCBI NO: 30680052 NR Description: polyubiquitin UBQ10/SEN3 [Arabidopsis thaliana] polyubiquitin UBQ10/SEN3 [Arabidopsis thaliana]
  misc_feature (1)..(312): Homolog of NCBI NO: 23397122 NR Description: putative polyubiquitin (UBQ10) [Arabidopsis
  misc_feature (1)..(262): Homolog of NCBI NO: 70644 NR Description: ubiquitin precursor - common sunflower (fragment)
  misc_feature (1)..(262): Homolog of NCBI NO: 70645 NR Description: polyubiquitin 5 - garden pea
  misc_feature (1)..(262): Homolog of NCBI NO: 170352 NR Description: hexameric polyubiquitin >gi|870792|gb|AAA68878.1| >gi|4115333|gb|AAD03341.1| ubiquitin [Pisum sativum] ubiquitin [Pisum sativum] >gi|22655101|gb|AAM98141.1|
  misc_feature (1)..(262): Homolog of NCBI NO: 170352 NR Description: hexameric polyubiquitin >gi|870792|gb|AAA68878.1| >gi|4115333|gb|AAD03341.1| ubiquitin [Pisum sativum] ubiquitin [Pisum sativum] >gi|22655101|gb|AAM98141.1|
  misc_feature (1)..(262): Homolog of NCBI NO: 902586 NR Description: ubiquitin
  misc_feature (1)..(262): Homolog of NCBI NO: 100934 NR Description: polyubiquitin - maize >gi|248337|gb|AAB21993.1|
  misc_feature (1)..(262): Homolog of NCBI NO: 100934 NR Description: polyubiquitin - maize >gi|248337|gb|AAB21993.1|
MQIFVKTLTGKTITLEVESSDTIDNVKAKIQDKEGIPPDQQRLIFAGKQLEDGRTLADYNIQKESTLHLVLRLRGGMQIFVKTLTGKTITLEVESSDTIDNVKAKIQDKEGIPPDQQRLIFAGKQLEDGRTLADYNIQKESTLHLVLRLRGGMQIFVKTLTGKTITLEVESSDTIDNVKAKIQDKEGIPPDQQRLIFAGKQLEDGRTLADYNIQKESTLHLVLRLRGGMQIFVKTLTGKTITLEVESSDTIDNVKAKIQDKEVFLRTSSVSSSLESSLRMDVLWPTTTSRRSLLFTWSCVFVVVSKSRLCYA

SEQ ID NO: 100819 - DNA, 3027 bp, Arabidopsis thaliana
  misc_feature (1)..(3027): Ceres Seq. ID no. 13606137
  misc_feature: MA Experiment ID: 20000307 Result: Up-regulated in Transcription
  misc_feature: MA Experiment 20000307 PARAMETER Experiment Name: At_Germinating_Seeds_Sub_P Parameter: Age (hr) Value: 24 vs. 0
  misc_feature: MA Experiment 20000307 PARAMETER Experiment Name: At_Germinating_Seeds_Sub_P Parameter: Organism Value: A. thaliana
  misc_feature: MA Experiment 20000307 PARAMETER Experiment Name: At_Germinating_Seeds_Sub_P Parameter: Plant Line Value: WS
  misc_feature: MA Experiment 20000307 PARAMETER Experiment Name: At_Germinating_Seeds_Sub_P Parameter: Tissue Value: Germinating Seeds
  misc_feature: MA Experiment ID: 20000315 Result: Down-regulated in Transcription
  misc_feature: MA Experiment 20000315 PARAMETER Experiment Name: At_14day_Shoots-Roots_Sub_P Parameter: Age (day) Value: 14
  misc_feature: MA Experiment 20000315 PARAMETER Experiment Name: At_14day_Shoots-Roots_Sub_P Parameter: Organism Value: A. thaliana
  misc_feature: MA Experiment 20000315 PARAMETER Experiment Name: At_14day_Shoots-Roots_Sub_P Parameter: Plant Line Value: WS
  misc_feature: MA Experiment 20000315 PARAMETER Experiment Name: At_14day_Shoots-Roots_Sub_P Parameter: Tissue Value: Shoots vs. Whole Plant
atggcttctgttttgcttccattgccacaagtatttgttttgtttgattatcgcaggagccgtaaagagtcaagctttccccgcgccgtctacaattccaattccatttcttctaattcaaccaatgccaatcatttccttcgccggatttctaacttctgtgaaaccggagacctcgacaagtcctttcgaactgtccaagaattcgttggcgatgacgagagctcgtccgatgcgtttcttcttgtccgagaagctcttgggcttctcttacaagcttctgggaagagaaaagacattgaaatgggaagaaagatccaccagctggtttctgggtcgacccggttaaggaatgatgacgttctctgtactcgtattatcaccatgtacgctatgtgtggctctcctgatgattctcggtttgtgtttgatgccttgcggagtaagaatctcttccagtggaatgctgttatcagctcttactcaagaaacgagctttacgatgaagtattagagacgtttatcgagatgatctcaacgactgatcttttaccggatcatttcacttatccatgtgtgattaaggcttgtgctgggatgtctgatgttgggatcgggcttgcggttcatgggttggtggtgaagaccggattggtggaagatgtttttgtgggtaatgcattggtgtctttctatggaactcatggttttgttactgatgccttgcaactgttcgatataatgcctgagagaaatttggtttcctggaactccatgattcgagtgttctcggataatggtttctcagaagaaagcttcttgcttcttggagaaatgatggaggaaaatggtgatggtgcgtttatgccggatgttgctacacttgttactgtgttgccggtttgtgcaagagaaagagaaatagggttgggaaaaggtgttcatgggtgggcggtgaaattgaggttggacaaggaactagtccttaacaatgccttaatggacatgtactccaaatgcggttgcattactaatgcacaaatgatctttaagatgaacaataacaagaatgtggtttcttggaacacaatggtaggaggtttttcagcagagggtgatacacatgggacgtttgatgttctgagacagatgctggcaggaggcgaagatgtcaaagcggacgaggtaaccattctaaatgcagtgcctgtttgtttccatgaatcattcttaccgagtttaaaggaacttcattgttactccttaaaacaagagtttgtatacaatgagttagtagccaatgcctttgtggcttcttatgcaaagtgtggctcactgagttatgcccagcgtgtgtttcatggtataaggagtaaaacagtgaactcttggaatgctttgattggcggccatgctcagagcaatgatccgagattgtccttggatgctcatttgcagatgaaaatttctggattgctacctgatagttttactgtctgtagtcttctttcagcttgttctaaactaaaatccctgcggttgggaaaggaagtgcatgggtttataatccgaaattggttagaaagagatttgtttgtttatttatcagtactctcattatacattcattgtggggagctatgcactgtacaagcattatttgatgcaatggaagataaaagcttagtatcttggaatactgtaatcaccggttaccttcagaatggatttcctgatagagctttgggcgtctttagacaaatggttttgtatggaatccagctttgtgggatttctatgatgcctgtgtttggtgcgtgttcgctgctaccttctcttcgactggggagagaagcgcatgcttatgctttgaagcacctcctggaggacgatgcgtttattgcatgttctttaattgatatgtatgccaagaatggttctataacacaatcatctaaggttttcaatggcttgaaggagaaaagcacggcatcttggaatgccatgataatgggatatggaatacatggcctagcaaaagaggctataaaactctttgaagagatgcaaagaacaggtcataaccctgatgacctaactttcttaggtgttctaacggcttgcaaccatagtggtctgatccatgaagggctgagatatctggatcaaatgaagtcttcttttgggctaaagccaaatttaaagcattatgcttgtgtcattgacatgttaggccgagctgggcaactagacaaggctctaagggttgttgcagaagagatgtctgaggaagctgacgttggaatttggaagtctctgctcagctcatgcagaatccatcaaaatctggaaatgggagagaaagttgctgctaagttattcgaattagaaccagaaaagcctgagaattatgttctgctttccaacttatatgcaggattggggaaatgggaagacgtgagaaaagtgagacagagaatgaacgagatgagtttacgaaaggatgctggatgctcttggatcgaactaaacaggaaggtatttagctttgttgtcggtgaaagattcttagatggttttgaggaaatcaaaagtctttggagtatattggagatgaagatatcgaagatgggatacagaccagacacaatgtcagtacaacatgatctaagtgaagaggagaagattgaacagttaaggggacacagcgagaagcttgcccttacctacgggttgattaaaacttcagaaggaacaactattagagtttacaagaacctaaggatctgtgtggactgtcacaatgcagcaaagttgatctccaaggtcatggaaagggaaatagttgtgagggacaacaaaaggtttcatcatttcaagaatggggtttgttcttgtggagattactggtaagtaggactgtaataaaattggtgaaaacagatgcattagtaatagtagctcttagtaaattcagtattgtgtgtatttatgttcaggcgagacaaacatcaatgttaatatgtt

SEQ ID NO: 100820 - protein, 970 aa, Arabidopsis thaliana
  peptide (1)..(970): Ceres Seq. ID no. 13606138
  misc_feature (664)..(698): Pfam Name: PPR repeat Pfam Description: PPR repeat
  misc_feature (202)..(970): Homolog of NCBI NO: 25354624 NR Description: protein F3O9.28 [imported] - Arabidopsis thaliana
  misc_feature (103)..(271): Homolog of NCBI NO: 25354624 NR Description: protein F3O9.28 [imported] - Arabidopsis thaliana
  misc_feature (131)..(970): Homolog of NCBI NO: 30694644 NR Description: pentatricopeptide (PPR) repeat-containing protein
  misc_feature (131)..(970): Homolog of NCBI NO: 30794008 NR Description: unknown protein [Arabidopsis thaliana]
  misc_feature (185)..(970): Homolog of NCBI NO: 11281371 NR Description: hypothetical protein T8H10.30 - Arabidopsis >gi|6706414|emb|CAB66100.1| putative protein [Arabidopsis
  misc_feature (90)..(970): Homolog of NCBI NO: 15219258 NR Description: pentatricopeptide (PPR) repeat-containing protein
  misc_feature (291)..(970): Homolog of NCBI NO: 15234095 NR Description: pentatricopeptide (PPR) repeat-containing protein
  misc_feature (99)..(272): Homolog of NCBI NO: 15234095 NR Description: pentatricopeptide (PPR) repeat-containing protein
  misc_feature (104)..(970): Homolog of NCBI NO: 15228590 NR Description: pentatricopeptide (PPR) repeat-containing protein thaliana] >gi|6091764|gb|AAF03474.1|AC009327_13 hypothetical [Arabidopsis thaliana] >gi|28393735|gb|AAO42278.1| unknown
  misc_feature (105)..(970): Homolog of NCBI NO: 34912228 NR Description: P0415C01.16 [Oryza sativa (japonica
MASVLLPLPQVFVLFDYRRSRKESSFPRAVYNSNSISSNSTNANHFLRRISNFCETGDLDKSFRTVQEFVGDDESSSDAFLLVREALGLLLQASGKRKDIEMGRKIHQLVSGSTRLRNDDVLCTRIITMYAMCGSPDDSRFVFDALRSKNLFQWNAVISSYSRNELYDEVLETFIEMISTTDLLPDHFTYPCVIKACAGMSDVGIGLAVHGLVVKTGLVEDVFVGNALVSFYGTHGFVTDALQLFDIMPERNLVSWNSMIRVFSDNGFSEESFLLLGEMMEENGDGAFMPDVATLVTVLPVCAREREIGLGKGVHGWAVKLRLDKELVLNNALMDMYSKCGCITNAQMIFKMNNNKNVVSWNTMVGGFSAEGDTHGTFDVLRQMLAGGEDVKADEVTILNAVPVCFHESFLPSLKELHCYSLKQEFVYNELVANAFVASYAKCGSLSYAQRVFHGIRSKTVNSWNALIGGHAQSNDPRLSLDAHLQMKISGLLPDSFTVCSLLSACSKLKSLRLGKEVHGFIIRNWLERDLFVYLSVLSLYIHCGELCTVQALFDAMEDKSLVSWNTVITGYLQNGFPDRALGVFRQMVLYGIQLCGISMMPVFGACSLLPSLRLGREAHAYALKHLLEDDAFIACSLIDMYAKNGSITQSSKVFNGLKEKSTASWNAMIMGYGIHGLAKEAIKLFEEMQRTGHNPDDLTFLGVLTACNHSGLIHEGLRYLDQMKSSFGLKPNLKHYACVIDMLGRAGQLDKALRVVAEEMSEEADVGIWKSLLSSCRIHQNLEMGEKVAAKLFELEPEKPENYVLLSNLYAGLGKWEDVRKVRQRMNEMSLRKDAGCSWIELNRKVFSFVVGERFLDGFEEIKSLWSILEMKISKMGYRPDTMSVQHDLSEEEKIEQLRGHSEKLALTYGLIKTSEGTTIRVYKNLRICVDCHNAAKLISKVMEREIVVRDNKRFHHFKNGVCSCGDYW

SEQ ID NO: 100821 - protein, 869 aa, Arabidopsis thaliana
  peptide (1)..(869): Ceres Seq. ID no. 13606139
  misc_feature (563)..(597): Pfam Name: PPR repeat Pfam Description: PPR repeat
  misc_feature (101)..(869): Homolog of NCBI NO: 25354624 NR Description: protein F3O9.28 [imported] - Arabidopsis thaliana
  misc_feature (2)..(170): Homolog of NCBI NO: 25354624 NR Description: protein F3O9.28 [imported] - Arabidopsis thaliana
  misc_feature (30)..(869): Homolog of NCBI NO: 30694644 NR Description: pentatricopeptide (PPR) repeat-containing protein
  misc_feature (30)..(869): Homolog of NCBI NO: 30794008 NR Description: unknown protein [Arabidopsis thaliana]
  misc_feature (84)..(869): Homolog of NCBI NO: 11281371 NR Description: hypothetical protein T8H10.30 - Arabidopsis >gi|6706414|emb|CAB66100.1| putative protein [Arabidopsis
  misc_feature (1)..(869): Homolog of NCBI NO: 15219258 NR Description: pentatricopeptide (PPR) repeat-containing protein
  misc_feature (190)..(869): Homolog of NCBI NO: 15234095 NR Description: pentatricopeptide (PPR) repeat-containing protein
  misc_feature (1)..(171): Homolog of NCBI NO: 15234095 NR Description: pentatricopeptide (PPR) repeat-containing protein
  misc_feature (3)..(869): Homolog of NCBI NO: 15228590 NR Description: pentatricopeptide (PPR) repeat-containing protein thaliana] >gi|6091764|gb|AAF03474.1|AC009327_13 hypothetical [Arabidopsis thaliana] >gi|28393735|gb|AAO42278.1| unknown
  misc_feature (4)..(869): Homolog of NCBI NO: 34912228 NR Description: P0415C01.16 [Oryza sativa (japonica
MGRKIHQLVSGSTRLRNDDVLCTRIITMYAMCGSPDDSRFVFDALRSKNLFQWNAVISSYSRNELYDEVLETFIEMISTTDLLPDHFTYPCVIKACAGMSDVGIGLAVHGLVVKTGLVEDVFVGNALVSFYGTHGFVTDALQLFDIMPERNLVSWNSMIRVFSDNGFSEESFLLLGEMMEENGDGAFMPDVATLVTVLPVCAREREIGLGKGVHGWAVKLRLDKELVLNNALMDMYSKCGCITNAQMIFKMNNNKNVVSWNTMVGGFSAEGDTHGTFDVLRQMLAGGEDVKADEVTILNAVPVCFHESFLPSLKELHCYSLKQEFVYNELVANAFVASYAKCGSLSYAQRVFHGIRSKTVNSWNALIGGHAQSNDPRLSLDAHLQMKISGLLPDSFTVCSLLSACSKLKSLRLGKEVHGFIIRNWLERDLFVYLSVLSLYIHCGELCTVQALFDAMEDKSLVSWNTVITGYLQNGFPDRALGVFRQMVLYGIQLCGISMMPVFGACSLLPSLRLGREAHAYALKHLLEDDAFIACSLIDMYAKNGSITQSSKVFNGLKEKSTASWNAMIMGYGIHGLAKEAIKLFEEMQRTGHNPDDLTFLGVLTACNHSGLIHEGLRYLDQMKSSFGLKPNLKHYACVIDMLGRAGQLDKALRVVAEEMSEEADVGIWKSLLSSCRIHQNLEMGEKVAAKLFELEPEKPENYVLLSNLYAGLGKWEDVRKVRQRMNEMSLRKDAGCSWIELNRKVFSFVVGERFLDGFEEIKSLWSILEMKISKMGYRPDTMSVQHDLSEEEKIEQLRGHSEKLALTYGLIKTSEGTTIRVYKNLRICVDCHNAAKLISKVMEREIVVRDNKRFHHFKNGVCSCGDYW

SEQ ID NO: 100822 - protein, 842 aa, Arabidopsis thaliana
  peptide (1)..(842): Ceres Seq. ID no. 13606140
  misc_feature (536)..(570): Pfam Name: PPR repeat Pfam Description: PPR repeat
  misc_feature (74)..(842): Homolog of NCBI NO: 25354624 NR Description: protein F3O9.28 [imported] - Arabidopsis thaliana
  misc_feature (1)..(143): Homolog of NCBI NO: 25354624 NR Description: protein F3O9.28 [imported] - Arabidopsis thaliana
  misc_feature (3)..(842): Homolog of NCBI NO: 30694644 NR Description: pentatricopeptide (PPR) repeat-containing protein
  misc_feature (3)..(842): Homolog of NCBI NO: 30794008 NR Description: unknown protein [Arabidopsis thaliana]
  misc_feature (57)..(842): Homolog of NCBI NO: 11281371 NR Description: hypothetical protein T8H10.30 - Arabidopsis >gi|6706414|emb|CAB66100.1| putative protein [Arabidopsis
  misc_feature (1)..(842): Homolog of NCBI NO: 15219258 NR Description: pentatricopeptide (PPR) repeat-containing protein
  misc_feature (163)..(842): Homolog of NCBI NO: 15234095 NR Description: pentatricopeptide (PPR) repeat-containing protein
  misc_feature (1)..(144): Homolog of NCBI NO: 15234095 NR Description: pentatricopeptide (PPR) repeat-containing protein
  misc_feature (1)..(842): Homolog of NCBI NO: 15228590 NR Description: pentatricopeptide (PPR) repeat-containing protein thaliana] >gi|6091764|gb|AAF03474.1|AC009327_13 hypothetical [Arabidopsis thaliana] >gi|28393735|gb|AAO42278.1| unknown
  misc_feature (1)..(842): Homolog of NCBI NO: 34912228 NR Description: P0415C01.16 [Oryza sativa (japonica
MYAMCGSPDDSRFVFDALRSKNLFQWNAVISSYSRNELYDEVLETFIEMISTTDLLPDHFTYPCVIKACAGMSDVGIGLAVHGLVVKTGLVEDVFVGNALVSFYGTHGFVTDALQLFDIMPERNLVSWNSMIRVFSDNGFSEESFLLLGEMMEENGDGAFMPDVATLVTVLPVCAREREIGLGKGVHGWAVKLRLDKELVLNNALMDMYSKCGCITNAQMIFKMNNNKNVVSWNTMVGGFSAEGDTHGTFDVLRQMLAGGEDVKADEVTILNAVPVCFHESFLPSLKELHCYSLKQEFVYNELVANAFVASYAKCGSLSYAQRVFHGIRSKTVNSWNALIGGHAQSNDPRLSLDAHLQMKISGLLPDSFTVCSLLSACSKLKSLRLGKEVHGFIIRNWLERDLFVYLSVLSLYIHCGELCTVQALFDAMEDKSLVSWNTVITGYLQNGFPDRALGVFRQMVLYGIQLCGISMMPVFGACSLLPSLRLGREAHAYALKHLLEDDAFIACSLIDMYAKNGSITQSSKVFNGLKEKSTASWNAMIMGYGIHGLAKEAIKLFEEMQRTGHNPDDLTFLGVLTACNHSGLIHEGLRYLDQMKSSFGLKPNLKHYACVIDMLGRAGQLDKALRVVAEEMSEEADVGIWKSLLSSCRIHQNLEMGEKVAAKLFELEPEKPENYVLLSNLYAGLGKWEDVRKVRQRMNEMSLRKDAGCSWIELNRKVFSFVVGERFLDGFEEIKSLWSILEMKISKMGYRPDTMSVQHDLSEEEKIEQLRGHSEKLALTYGLIKTSEGTTIRVYKNLRICVDCHNAAKLISKVMEREIVVRDNKRFHHFKNGVCSCGDYW

SEQ ID NO: 100823 - DNA, 1106 bp, Arabidopsis thaliana
  misc_feature (1)..(1106): Ceres Seq. ID no. 13606141
  misc_feature: MA Experiment ID: 108434 Result: Up-regulated in Transcription
  misc_feature: MA Experiment 108434 PARAMETER Experiment Name: At_Root_Tips_cDNA_P Parameter: Tissue Value: Root Tips
  misc_feature: MA Experiment ID: 108595 Result: Down-regulated in Transcription
  misc_feature: MA Experiment 108595 PARAMETER Experiment Name: At_Ler-pi_Ovule_cDNA_P Parameter: Plant Line Value: null
attcgaacaattaccgacacacaaaaagtttgaagagaaaaacaaaaaatgttgtcgagattgttcaaggcaggtgaaaaggttttgtcgaatctcgttagcaagaaagacatttacatggcgtcgaggaatcaggagaaatctcccaaagtgcaagagctttacgacctctgcaaagagactttcactggcaaagctccttctcctgcttccatggctatccaaaagctatgctctgtgttggactcagttagtcctgcagatgttgggcttgaagaggtatctcaagacgatgatcgaggctatggagtttctggggttagccgtttcaatagagtaggacgatgggcacaaccgataacattcttagacattcatgaatgtgatacttttacaatgtgtattttctgcttcccaacgtcttcagtgatcccattgcatgatcatccagagatggctgtgtttagtaaaatcctctatggatcacttcatgttaaagcttacgattgggtcgaacctccatgtattatcacacaagataaaggcgtccccggttctcttccagcaaggttggcgaaattggtgagtgacaaagttataacgcctcagtctgagataccggcgttgtacccaaagactggaggcaatctccattgcttcactgcgttgactccatgtgctgtgctcgacattctctcacctccttacaaagaaagtgttggcaggagttgcagttactacatggactatccgttttccactttcgcattggagaacggaatgaagaaggtggatgaaggaaaggaagacgaatacgcatggcttgtacagattgacacgcccgatgatcttcacatgcgtcccggatcatatactggtccaactatcagagtctagatatttgtggtttgttttgtagcaaagtagagcaactcttgtaacattccaagataagtttctggagaagatatcaatacgatttcagattaaagatgaactctttgtttagtccatgtccacttctcagttctcacacgcattcaagcaaatgaaactgcggaaaactacaaatagatcggcaatgagaaatgttaagatttcatttc

SEQ ID NO: 100824 - protein, 282 aa, Arabidopsis thaliana [sequence omitted]

SEQ ID NO: 100825 - protein, 259 aa, Arabidopsis thaliana
  peptide (1)..(259): Ceres Seq. ID no. 13606143
  misc_feature (1)..(259): Homolog of NCBI NO: 18394617 NR Description: expressed protein [Arabidopsis thaliana]
  misc_feature (1)..(259): Homolog of NCBI NO: 25402861 NR Description: protein F15H18.4 [imported] - Arabidopsis >gi|6714305|gb|AAF26001.1|AC013354_20 F15H18.4 [Arabidopsis
  misc_feature (1)..(259): Homolog of NCBI NO: 21618020 NR Description: unknown [Arabidopsis thaliana]
  misc_feature (33)..(259): Homolog of NCBI NO: 15451150 NR Description: Unknown protein [Arabidopsis thaliana]
  misc_feature (13)..(258): Homolog of NCBI NO: 25370572 NR Description: hypothetical protein At2g42670 [imported] -
  misc_feature (13)..(258): Homolog of NCBI NO: 21536850 NR Description: unknown [Arabidopsis thaliana]
  misc_feature (13)..(258): Homolog of NCBI NO: 18406030 NR Description: expressed protein [Arabidopsis thaliana] expressed protein [Arabidopsis thaliana]
  misc_feature (2)..(257): Homolog of NCBI NO: 34906308 NR Description: unnamed protein product [Oryza sativa (japonica group)] >gi|9558428|dbj|BAB03364.1| unnamed protein product
  misc_feature (52)..(258): Homolog of NCBI NO: 10176982 NR Description: contains similarity to unknown
  misc_feature (52)..(258): Homolog of NCBI NO: 15242505 NR Description: expressed protein [Arabidopsis thaliana] unknown [Arabidopsis thaliana] >gi|27808558|gb|AAO24559.1|
MASRNQEKSPKVQELYDLCKETFTGKAPSPASMAIQKLCSVLDSVSPADVGLEEVSQDDDRGYGVSGVSRFNRVGRWAQPITFLDIHECDTFTMCIFCFPTSSVIPLHDHPEMAVFSKILYGSLHVKAYDWVEPPCIITQDKGVPGSLPARLAKLVSDKVITPQSEIPALYPKTGGNLHCFTALTPCAVLDILSPPYKESVGRSCSYYMDYPFSTFALENGMKKVDEGKEDEYAWLVQIDTPDDLHMRPGSYTGPTIRV

SEQ ID NO: 100826 - protein, 227 aa, Arabidopsis thaliana
  peptide (1)..(227): Ceres Seq. ID no. 13606144
  misc_feature (1)..(227): Homolog of NCBI NO: 18394617 NR Description: expressed protein [Arabidopsis thaliana]
  misc_feature (1)..(227): Homolog of NCBI NO: 25402861 NR Description: protein F15H18.4 [imported] - Arabidopsis >gi|6714305|gb|AAF26001.1|AC013354_20 F15H18.4 [Arabidopsis
  misc_feature (1)..(227): Homolog of NCBI NO: 21618020 NR Description: unknown [Arabidopsis thaliana]
  misc_feature (1)..(227): Homolog of NCBI NO: 15451150 NR Description: Unknown protein [Arabidopsis thaliana]
  misc_feature (1)..(226): Homolog of NCBI NO: 25370572 NR Description: hypothetical protein At2g42670 [imported] -
  misc_feature (1)..(226): Homolog of NCBI NO: 21536850 NR Description: unknown [Arabidopsis thaliana]
  misc_feature (1)..(226): Homolog of NCBI NO: 18406030 NR Description: expressed protein [Arabidopsis thaliana] expressed protein [Arabidopsis thaliana]
  misc_feature (1)..(225): Homolog of NCBI NO: 34906308 NR Description: unnamed protein product [Oryza sativa (japonica group)] >gi|9558428|dbj|BAB03364.1| unnamed protein product
  misc_feature (20)..(226): Homolog of NCBI NO: 10176982 NR Description: contains similarity to unknown
  misc_feature (20)..(226): Homolog of NCBI NO: 15242505 NR Description: expressed protein [Arabidopsis thaliana] unknown [Arabidopsis thaliana] >gi|27808558|gb|AAO24559.1|
MAIQKLCSVLDSVSPADVGLEEVSQDDDRGYGVSGVSRFNRVGRWAQPITFLDIHECDTFTMCIFCFPTSSVIPLHDHPEMAVFSKILYGSLHVKAYDWVEPPCIITQDKGVPGSLPARLAKLVSDKVITPQSEIPALYPKTGGNLHCFTALTPCAVLDILSPPYKESVGRSCSYYMDYPFSTFALENGMKKVDEGKEDEYAWLVQIDTPDDLHMRPGSYTGPTIRV

SEQ ID NO: 100827 - DNA, 1579 bp, Arabidopsis thaliana
  misc_feature (1)..(1579): Ceres Seq. ID no. 13606145
  misc_feature: MA Experiment ID: 20000171 Result: Up-regulated in Transcription
  misc_feature: MA Experiment 20000171 PARAMETER Experiment Name: At_42deg_Heat_P Parameter: Age (day) Value: 14
  misc_feature: MA Experiment 20000171 PARAMETER Experiment Name: At_42deg_Heat_P Parameter: Organism Value: A. thaliana
  misc_feature: MA Experiment 20000171 PARAMETER Experiment Name: At_42deg_Heat_P Parameter: Plant Line Value: WS
  misc_feature: MA Experiment 20000171 PARAMETER Experiment Name: At_42deg_Heat_P Parameter: Temperature (deg C) Value: 42 vs. 22
  misc_feature: MA Experiment 20000171 PARAMETER Experiment Name: At_42deg_Heat_P Parameter: Timepoint (hr) Value: 1
  misc_feature: MA Experiment 20000171 PARAMETER Experiment Name: At_42deg_Heat_P Parameter: Tissue Value: Aerial
  misc_feature: MA Experiment ID: 20000184 Result: Down-regulated in Transcription
  misc_feature: MA Experiment 20000184 PARAMETER Experiment Name: At_Shoots__P Parameter: Age (day) Value: 7
  misc_feature: MA Experiment 20000184 PARAMETER Experiment Name: At_Shoots__P Parameter: Tissue Value: Shoots vs. Whole Plant
  misc_feature: MA Experiment ID: 20000185 Result: Down-regulated in Transcription
  misc_feature: MA Experiment 20000185 PARAMETER Experiment Name: At_Roots__P Parameter: Age (day) Value: 7 vs. 21
  misc_feature: MA Experiment 20000185 PARAMETER Experiment Name: At_Roots__P Parameter: Organism Value: A. thaliana
  misc_feature: MA Experiment 20000185 PARAMETER Experiment Name: At_Roots__P Parameter: Tissue Value: Roots vs. Whole Plant
  misc_feature: MA Experiment ID: 20000227 Result: Down-regulated in Transcription
  misc_feature: MA Experiment 20000227 PARAMETER Experiment Name: At_Root-Tips-vs-Tops_P Parameter: Tissue Value: Root Tips vs. Root Tops
  misc_feature: MA Experiment ID: 20000234 Result: Down-regulated in Transcription
  misc_feature: MA Experiment 20000234 PARAMETER Experiment Name: At_Siliques_P Parameter: Age (day) Value: 21
  misc_feature: MA Experiment 20000234 PARAMETER Experiment Name: At_Siliques_P Parameter: Organism Value: A. thaliana
  misc_feature: MA Experiment 20000234 PARAMETER Experiment Name: At_Siliques_P Parameter: Plant Line Value: WS
  misc_feature: MA Experiment 20000234 PARAMETER Experiment Name: At_Siliques_P Parameter: Tissue Value: Less Than 5mm Siliques vs. Whole Plant
  misc_feature: MA Experiment ID: 20000235 Result: Down-regulated in Transcription
  misc_feature: MA Experiment 20000235 PARAMETER Experiment Name: At_Siliques_P Parameter: Age (day) Value: 21
  misc_feature: MA Experiment 20000235 PARAMETER Experiment Name: At_Siliques_P Parameter: Organism Value: A. thaliana
  misc_feature: MA Experiment 20000235 PARAMETER Experiment Name: At_Siliques_P Parameter: Plant Line Value: WS
  misc_feature: MA Experiment 20000235 PARAMETER Experiment Name: At_Siliques_P Parameter: Tissue Value: 5-10mm Siliques vs. Whole Plant
  misc_feature: MA Experiment ID: 20000264 Result: Down-regulated in Transcription
  misc_feature: MA Experiment 20000264 PARAMETER Experiment Name: At_Open_Flower_P Parameter: Age (day) Value: 21
  misc_feature: MA Experiment 20000264 PARAMETER Experiment Name: At_Open_Flower_P Parameter: Plant Line Value: WS
  misc_feature: MA Experiment 20000264 PARAMETER Experiment Name: At_Open_Flower_P Parameter: Tissue Value: Open Flower vs. Whole Plant
  misc_feature: MA Experiment ID: 20000265 Result: Down-regulated in Transcription
  misc_feature: MA Experiment 20000265 PARAMETER Experiment Name: At_Open_Flower_P Parameter: Age (day) Value: 21
  misc_feature: MA Experiment 20000265 PARAMETER Experiment Name: At_Open_Flower_P Parameter: Plant Line Value: WS
  misc_feature: MA Experiment 20000265 PARAMETER Experiment Name: At_Open_Flower_P Parameter: Tissue Value: Closed Flower vs. Whole Plant
  misc_feature: MA Experiment ID: 20000268 Result: Down-regulated in Transcription
  misc_feature: MA Experiment 20000268 PARAMETER Experiment Name: At_100mM_NaCl__P Parameter: Age (day) Value: 14
  misc_feature: MA Experiment 20000268 PARAMETER Experiment Name: At_100mM_NaCl__P Parameter: Organism Value: A. thaliana
  misc_feature: MA Experiment 20000268 PARAMETER Experiment Name: At_100mM_NaCl__P Parameter: Plant Line Value: WS
  misc_feature: MA Experiment 20000268 PARAMETER Experiment Name: At_100mM_NaCl__P Parameter: Timepoint (hr) Value: 6
  misc_feature: MA Experiment 20000268 PARAMETER Experiment Name: At_100mM_NaCl__P Parameter: Tissue Value: Whole Plant
  misc_feature: MA Experiment 20000268 PARAMETER Experiment Name: At_100mM_NaCl__P Parameter: Treatment Value: 100mM NaCl vs. No Treatment
  misc_feature: MA Experiment ID: 20000286 Result: Down-regulated in Transcription
  misc_feature: MA Experiment 20000286 PARAMETER Experiment Name: At_Open_Flower_P Parameter: Age (day) Value: 21
  misc_feature: MA Experiment 20000286 PARAMETER Experiment Name: At_Open_Flower_P Parameter: Plant Line Value: WS
  misc_feature: MA Experiment 20000286 PARAMETER Experiment Name: At_Open_Flower_P Parameter: Tissue Value: Half Open vs. Whole Plant
  misc_feature: MA Experiment ID: 20000438 Result: Down-regulated in Transcription
  misc_feature: MA Experiment 20000438 PARAMETER Experiment Name: At_Shoots__P Parameter: Age (day) Value: 14
  misc_feature: MA Experiment 20000438 PARAMETER Experiment Name: At_Shoots__P Parameter: Tissue Value: Shoots vs. Whole Plant
  misc_feature: MA Experiment ID: 20000439 Result: Down-regulated in Transcription
  misc_feature: MA Experiment 20000439 PARAMETER Experiment Name: At_Roots__P Parameter: Age (day) Value: 14 vs. 21
  misc_feature: MA Experiment 20000439 PARAMETER Experiment Name: At_Roots__P Parameter: Organism Value: A. thaliana
  misc_feature: MA Experiment 20000439 PARAMETER Experiment Name: At_Roots__P Parameter: Tissue Value: Roots vs. Whole Plant
  misc_feature: MA Experiment ID: 20000441 Result: Up-regulated in Transcription
  misc_feature: MA Experiment 20000441 PARAMETER Experiment Name: At_1uM_BR-BRZ__P Parameter: Tissue Value: Shoot Apices
  misc_feature: MA Experiment 20000441 PARAMETER Experiment Name: At_1uM_BR-BRZ__P Parameter: Treatment Value: 1uM BR vs. No Treatment
  misc_feature: MA Experiment ID: 20000443 Result: Up-regulated in Transcription
  misc_feature: MA Experiment 20000443 PARAMETER Experiment Name: At_1uM_BR-BRZ__P Parameter: Tissue Value: Shoot Apices
  misc_feature: MA Experiment 20000443 PARAMETER Experiment Name: At_1uM_BR-BRZ__P Parameter: Treatment Value: 1uM BRZ vs. No Treatment
  misc_feature: MA Experiment ID: 20000451 Result: Down-regulated in Transcription
  misc_feature: MA Experiment 20000451 PARAMETER Experiment Name: At_CS6879_Shoots-Roots_P Parameter: Age (day) Value: 14
  misc_feature: MA Experiment 20000451 PARAMETER Experiment Name: At_CS6879_Shoots-Roots_P Parameter: Organism Value: A. thaliana
  misc_feature: MA Experiment 20000451 PARAMETER Experiment Name: At_CS6879_Shoots-Roots_P Parameter: Plant Line Value: CS6879 vs. WS
  misc_feature: MA Experiment 20000451 PARAMETER Experiment Name: At_CS6879_Shoots-Roots_P Parameter: Tissue Value: Roots
  misc_feature: MA Experiment ID: 20000573 Result: Down-regulated in Transcription
  misc_feature: MA Experiment 20000573 PARAMETER Experiment Name: At_100uM_ABA_Mutants__P Parameter: Organism Value: A. thaliana
  misc_feature: MA Experiment 20000573 PARAMETER Experiment Name: At_100uM_ABA_Mutants__P Parameter: Plant Line Value: CS22 vs. Ler wt
  misc_feature: MA Experiment 20000573 PARAMETER Experiment Name: At_100uM_ABA_Mutants__P Parameter: Timepoint (hr) Value: N/A
  misc_feature: MA Experiment 20000573 PARAMETER Experiment Name: At_100uM_ABA_Mutants__P Parameter: Tissue Value: Whole Plant
  misc_feature: MA Experiment 20000573 PARAMETER Experiment Name: At_100uM_ABA_Mutants__P Parameter: Treatment Value: None
  misc_feature: MA Experiment ID: 20000574 Result: Down-regulated in Transcription
  misc_feature: MA Experiment 20000574 PARAMETER Experiment Name: At_100uM_ABA_Mutants__P Parameter: Organism Value: A. thaliana
  misc_feature: MA Experiment 20000574 PARAMETER Experiment Name: At_100uM_ABA_Mutants__P Parameter: Plant Line Value: CS23 vs. Ler wt
  misc_feature: MA Experiment 20000574 PARAMETER Experiment Name: At_100uM_ABA_Mutants__P Parameter: Timepoint (hr) Value: N/A
  misc_feature: MA Experiment 20000574 PARAMETER Experiment Name: At_100uM_ABA_Mutants__P Parameter: Tissue Value: Whole Plant
  misc_feature: MA Experiment 20000574 PARAMETER Experiment Name: At_100uM_ABA_Mutants__P Parameter: Treatment Value: None
  misc_feature: MA Experiment ID: 20000794 Result: Down-regulated in Transcription
  misc_feature: MA Experiment 20000794 PARAMETER Experiment Name: At_Petals_P Parameter: Age (day) Value: 23-25 days
  misc_feature: MA Experiment 20000794 PARAMETER Experiment Name: At_Petals_P Parameter: Plant Line Value: WS
  misc_feature: MA Experiment 20000794 PARAMETER Experiment Name: At_Petals_P Parameter: Tissue Value: Petals vs. Whole plant
  misc_feature: MA Experiment ID: 20001248 Result: Up-regulated in Transcription
  misc_feature: MA Experiment 20001248 PARAMETER Experiment Name: At_Far-red-induction_P Parameter: Age (day) Value: 7
  misc_feature: MA Experiment 20001248 PARAMETER Experiment Name: At_Far-red-induction_P Parameter: Light Value: Far-red vs. White
  misc_feature: MA Experiment 20001248 PARAMETER Experiment Name: At_Far-red-induction_P Parameter: Organism Value: A. thaliana
  misc_feature: MA Experiment 20001248 PARAMETER Experiment Name: At_Far-red-induction_P Parameter: Plant Line Value: Columbia
  misc_feature: MA Experiment 20001248 PARAMETER Experiment Name: At_Far-red-induction_P Parameter: Timepoint (hr) Value: 4
  misc_feature: MA Experiment 20001248 PARAMETER Experiment Name: At_Far-red-induction_P Parameter: Tissue Value: Whole Plant
  misc_feature: MA Experiment ID: 20001554 Result: Down-regulated in Transcription
  misc_feature: MA Experiment 20001554 PARAMETER Experiment Name: At_Drought_Soil_Dry_P Parameter: Age (day) Value: 21
  misc_feature: MA Experiment 20001554 PARAMETER Experiment Name: At_Drought_Soil_Dry_P Parameter: Organism Value: A. thaliana
  misc_feature: MA Experiment 20001554 PARAMETER Experiment Name: At_Drought_Soil_Dry_P Parameter: Plant Line Value: WS
  misc_feature: MA Experiment 20001554 PARAMETER Experiment Name: At_Drought_Soil_Dry_P Parameter: Post Timepoint (hr) Value: None
  misc_feature: MA Experiment 20001554 PARAMETER Experiment Name: At_Drought_Soil_Dry_P Parameter: Post-Treatment Value: None
  misc_feature: MA Experiment 20001554 PARAMETER Experiment Name: At_Drought_Soil_Dry_P Parameter: Timepoint (day) Value: 7
  misc_feature: MA Experiment 20001554 PARAMETER Experiment Name: At_Drought_Soil_Dry_P Parameter: Treatment Value: Drought vs. No Drought
  misc_feature: MA Experiment ID: 20001555 Result: Down-regulated in Transcription
  misc_feature: MA Experiment 20001555 PARAMETER Experiment Name: At_Drought_Soil_Dry_P Parameter: Age (day) Value: 24
  misc_feature: MA Experiment 20001555 PARAMETER Experiment Name: At_Drought_Soil_Dry_P Parameter: Organism Value: A. thaliana
  misc_feature: MA Experiment 20001555 PARAMETER Experiment Name: At_Drought_Soil_Dry_P Parameter: Plant Line Value: WS
  misc_feature: MA Experiment 20001555 PARAMETER Experiment Name: At_Drought_Soil_Dry_P Parameter: Post Timepoint (hr) Value: None
  misc_feature: MA Experiment 20001555 PARAMETER Experiment Name: At_Drought_Soil_Dry_P Parameter: Post-Treatment Value: None
  misc_feature: MA Experiment 20001555 PARAMETER Experiment Name: At_Drought_Soil_Dry_P Parameter: Timepoint (day) Value: 10
  misc_feature: MA Experiment 20001555 PARAMETER Experiment Name: At_Drought_Soil_Dry_P Parameter: Treatment Value: Drought vs. No Drought
  misc_feature: MA Experiment ID: 20001556 Result: Down-regulated in Transcription
  misc_feature: MA Experiment 20001556 PARAMETER Experiment Name: At_Drought_Soil_Dry_P Parameter: Age (day) Value: 26
  misc_feature: MA Experiment 20001556 PARAMETER Experiment Name: At_Drought_Soil_Dry_P Parameter: Organism Value: A. thaliana
  misc_feature: MA Experiment 20001556 PARAMETER Experiment Name: At_Drought_Soil_Dry_P Parameter: Plant Line Value: WS
  misc_feature: MA Experiment 20001556 PARAMETER Experiment Name: At_Drought_Soil_Dry_P Parameter: Post Timepoint (hr) Value: None
  misc_feature: MA Experiment 20001556 PARAMETER Experiment Name: At_Drought_Soil_Dry_P Parameter: Post-Treatment Value: None
  misc_feature: MA Experiment 20001556 PARAMETER Experiment Name: At_Drought_Soil_Dry_P Parameter: Timepoint (day) Value: 12
  misc_feature: MA Experiment 20001556 PARAMETER Experiment Name: At_Drought_Soil_Dry_P Parameter: Treatment Value: Drought vs. No Drought
  misc_feature: MA Experiment ID: 20001559 Result: Down-regulated in Transcription
  misc_feature: MA Experiment 20001559 PARAMETER Experiment Name: At_Drought_Soil_Dry_P Parameter: Age (day) Value: 28
  misc_feature: MA Experiment 20001559 PARAMETER Experiment Name: At_Drought_Soil_Dry_P Parameter: Organism Value: A. thaliana
  misc_feature: MA Experiment 20001559 PARAMETER Experiment Name: At_Drought_Soil_Dry_P Parameter: Plant Line Value: WS
  misc_feature: MA Experiment 20001559 PARAMETER Experiment Name: At_Drought_Soil_Dry_P Parameter: Post Timepoint (hr) Value: 29
  misc_feature: MA Experiment 20001559 PARAMETER Experiment Name: At_Drought_Soil_Dry_P Parameter: Post-Treatment Value: Re-Water vs. No Drought
  misc_feature: MA Experiment 20001559 PARAMETER Experiment Name: At_Drought_Soil_Dry_P Parameter: Timepoint (day) Value: 14
  misc_feature: MA Experiment 20001559 PARAMETER Experiment Name: At_Drought_Soil_Dry_P Parameter: Treatment Value: Drought vs. No Drought
  misc_feature: MA Experiment ID: 20001560 Result: Down-regulated in Transcription
  misc_feature: MA Experiment 20001560 PARAMETER Experiment Name: At_Drought_Soil_Dry_P Parameter: Age (day) Value: 28
  misc_feature: MA Experiment 20001560 PARAMETER Experiment Name: At_Drought_Soil_Dry_P Parameter: Organism Value: A. thaliana
  misc_feature: MA Experiment 20001560 PARAMETER Experiment Name: At_Drought_Soil_Dry_P Parameter: Plant Line Value: WS
  misc_feature: MA Experiment 20001560 PARAMETER Experiment Name: At_Drought_Soil_Dry_P Parameter: Post Timepoint (hr) Value: None
  misc_feature: MA Experiment 20001560 PARAMETER Experiment Name: At_Drought_Soil_Dry_P Parameter: Post-Treatment Value: None
  misc_feature: MA Experiment 20001560 PARAMETER Experiment Name: At_Drought_Soil_Dry_P Parameter: Timepoint (day) Value: 14
  misc_feature: MA Experiment 20001560 PARAMETER Experiment Name: At_Drought_Soil_Dry_P Parameter: Treatment Value: Drought vs. No Drought
  misc_feature: MA Experiment ID: 20001904 Result: Down-regulated in Transcription
  misc_feature: MA Experiment 20001904 PARAMETER Experiment Name: At_Drought_Reproduction_P Parameter: Age (day) Value: 37
  misc_feature: MA Experiment 20001904 PARAMETER Experiment Name: At_Drought_Reproduction_P Parameter: Organism Value: A. thaliana
  misc_feature: MA Experiment 20001904 PARAMETER Experiment Name: At_Drought_Reproduction_P Parameter: Plant Line Value: WS
  misc_feature: MA Experiment 20001904 PARAMETER Experiment Name: At_Drought_Reproduction_P Parameter: Timepoint (day) Value: 7
  misc_feature: MA Experiment 20001904 PARAMETER Experiment Name: At_Drought_Reproduction_P Parameter: Tissue Value: Rosettes
  misc_feature: MA Experiment 20001904 PARAMETER Experiment Name: At_Drought_Reproduction_P Parameter: Treatment Value: Drought vs. No Drought
  misc_feature: MA Experiment ID: 20001905 Result: Down-regulated in Transcription
  misc_feature: MA Experiment 20001905 PARAMETER Experiment Name: At_Drought_Reproduction_P Parameter: Age (day) Value: 40
  misc_feature: MA Experiment 20001905 PARAMETER Experiment Name: At_Drought_Reproduction_P Parameter: Organism Value: A. thaliana
  misc_feature: MA Experiment 20001905 PARAMETER Experiment Name: At_Drought_Reproduction_P Parameter: Plant Line Value: WS
  misc_feature: MA Experiment 20001905 PARAMETER Experiment Name: At_Drought_Reproduction_P Parameter: Timepoint (day) Value: 10
  misc_feature: MA Experiment 20001905 PARAMETER Experiment Name: At_Drought_Reproduction_P Parameter: Tissue Value: Rosettes
  misc_feature: MA Experiment 20001905 PARAMETER Experiment Name: At_Drought_Reproduction_P Parameter: Treatment Value: Drought vs. No Drought
aagaaaacagagcaactagatctctcttctcctctgctcgttcaatgttataacgatctcgagtatcacaaaagaacaagatgtctattcgaagaatctaccgatgtctgaattctttaatcaaaagatcttgtgctcaatctctatgatcatacgccccatttcacactttgtttcacctctcagtttttttttttgtgtttttttgtccctctttgtttcacttgagaacaaccccctttgaactcgatcaagaaagctaagtttgaagaatcaagaatggtgcggacaccgtgttgcaaagctgaactagggttaaagaaaggagcttggactcccgaggaagatcagaagcttctctcttaccttaaccgccacggtgaaggtggatggcgaactctccccgaaaaagctggactcaagagatgcggcaaaagctgcagactgagatgggccaattatcttagacctgacatcaaaagaggagagttcactgaagacgaagaacgttcaatcatctctcttcacgcccttcacggcaacaaatggtctgctatagctcgtggactaccaggaagaaccgataacgagatcaagaactactggaacactcatatcaaaaaacgtttgatcaagaaaggtattgatccagttacacacaagggcataacctccggtaccgacaaatcagaaaacctcccggagaaacaaaatgttaatctgacaactagtgaccatgatcttgataatgacaaggcgaagaagaacaacaagaattttggattatcatcggctagtttcttgaacaaagtagctaataggttcggaaagagaatcaatcagagtgttctgtctgagattatcggaagtggaggcccacttgcttctactagtcacactactaatactacaactacaagtgtttccgttgactctgaatcagttaagtcaacgagttcttccttcgcaccaacctcgaatcttctctgccatgggaccgttgcaacaacaccagtttcatcgaactttgacgttgatggtaacgttaatctgacgtgttcttcgtccacgttctctgattcctccgttaacaatcctctaatgtactgcgataatttcgttggtaataacaacgttgatgatgaggatactatcgggttctccacatttctgaatgatgaagatttcatgatgttggaggagtcttgtgttgaaaacactgcgttcatgaaagaacttacgaggtttcttcacgaggatgaaaacgacgtcgttgatgtgacgccggtctatgaacgtcaagacttgtttgacgaaattgataactattttggatgagtgaaactcataatcgatgaatcccacgtgaccatgtcaatatgatgtctatggatatgttaccttgatgatgttgatggtaataataataaataatgatggtgatgatgaccatgcatgaatcatgaatgtagttcgtgttgtcacatatgcttgtgtttttgtgttttttttttttggtctgaagtgtgttgtttcgttgtaaatggattataaatggtgatgtaataattataatgtt

SEQ ID NO: 100828 - protein, 352 aa, Arabidopsis thaliana
  peptide (1)..(352): Ceres Seq. ID no. 13606146
  misc_feature (15)..(62): Pfam Name: Myb-like DNA-binding domain Pfam Description: Myb-like DNA-binding domain
  misc_feature (1)..(352): Homolog of NCBI NO: 15221803 NR Description: myb family transcription factor [Arabidopsis
  misc_feature (1)..(352): Homolog of NCBI NO: 15221129 NR Description: myb family transcription factor (MYB122) thaliana] >gi|25294096|pir||G96768 protein transcription factor
  misc_feature (1)..(352): Homolog of NCBI NO: 15240251 NR Description: myb-related transcription factor(mixta), putative thaliana] >gi|5823329|gb|AAD53103.1|AF175998_1 putative factor [Arabidopsis thaliana] >gi|9757864|dbj|BAB08498.1|
  misc_feature (1)..(213): Homolog of NCBI NO: 15239466 NR Description: receptor-like protein kinase(ATR1), putative thaliana] >gi|3150037|gb|AAC16897.1| ATR1 [Arabidopsis thaliana]
  misc_feature (1)..(305): Homolog of NCBI NO: 15240838 NR Description: myb family transcription factor [Arabidopsis
  misc_feature (1)..(305): Homolog of NCBI NO: 11358683 NR Description: probable transcription factor MYB29 [imported] - thaliana >gi|3941436|gb|AAC83594.1| putative transcription factor
  misc_feature (1)..(270): Homolog of NCBI NO: 15232045 NR Description: myb family transcription factor [Arabidopsis
  misc_feature (1)..(252): Homolog of NCBI NO: 27125807 NR Description: MYB27 protein [Oryza sativa (japonica
  misc_feature (1)..(330): Homolog of NCBI NO: 15240839 NR Description: myb DNA-binding protein (MYB76) [Arabidopsis >gi|5823317|gb|AAD53097.1|AF175992_1 putative transcription [Arabidopsis thaliana] >gi|9759592|dbj|BAB11449.1| transcription
  misc_feature (1)..(207): Homolog of NCBI NO: 30024598 NR Description: transcription factor MYB101 [Lotus japonicus]
MVRTPCCKAELGLKKGAWTPEEDQKLLSYLNRHGEGGWRTLPEKAGLKRCGKSCRLRWANYLRPDIKRGEFTEDEERSIISLHALHGNKWSAIARGLPGRTDNEIKNYWNTHIKKRLIKKGIDPVTHKGITSGTDKSENLPEKQNVNLTTSDHDLDNDKAKKNNKNFGLSSASFLNKVANRFGKRINQSVLSEIIGSGGPLASTSHTTNTTTTSVSVDSESVKSTSSSFAPTSNLLCHGTVATTPVSSNFDVDGNVNLTCSSSTFSDSSVNNPLMYCDNFVGNNNVDDEDTIGFSTFLNDEDFMMLEESCVENTAFMKELTRFLHEDENDVVDVTPVYERQDLFDEIDNYFG

SEQ ID NO: 100829 - DNA, 636 bp, Arabidopsis thaliana
  misc_feature (1)..(636): Ceres Seq. ID no. 13606157
  misc_feature: MA Experiment ID: 108434 Result: Down-regulated in Transcription
  misc_feature: MA Experiment 108434 PARAMETER Experiment Name: At_Root_Tips_cDNA_P Parameter: Tissue Value: Root Tips
  misc_feature: MA Experiment ID: 108435 Result: Down-regulated in Transcription
  misc_feature: MA Experiment 108435 PARAMETER Experiment Name: At_stm_Mutants_cDNA_P Parameter: Plant Line Value: wt Landsburg vs stm
  misc_feature: MA Experiment 108435 PARAMETER Experiment Name: At_stm_Mutants_cDNA_P Parameter: Tissue Value: Shoot Apical Meristem Region
  misc_feature: MA Experiment ID: 108461 Result: Up-regulated in Transcription
  misc_feature: MA Experiment 108461 PARAMETER Experiment Name: At_Germinating_Seeds_cDNA_P Parameter: Age (day) Value: 1 vs. 0
  misc_feature: MA Experiment 108461 PARAMETER Experiment Name: At_Germinating_Seeds_cDNA_P Parameter: Tissue Value: Germinating Seeds
  misc_feature: MA Experiment ID: 108462 Result: Up-regulated in Transcription
  misc_feature: MA Experiment 108462 PARAMETER Experiment Name: At_Germinating_Seeds_cDNA_P Parameter: Age (day) Value: 2 vs. 0
  misc_feature: MA Experiment 108462 PARAMETER Experiment Name: At_Germinating_Seeds_cDNA_P Parameter: Tissue Value: Germinating Seeds
  misc_feature: MA Experiment ID: 108488 Result: Up-regulated in Transcription
  misc_feature: MA Experiment ID: 108489 Result: Down-regulated in Transcription
  misc_feature: MA Experiment ID: 20000180 Result: Up-regulated in Transcription
  misc_feature: MA Experiment 20000180 PARAMETER Experiment Name: At_Germinating_Seeds_P Parameter: Age (hr) Value: 24 vs. 0
  misc_feature: MA Experiment 20000180 PARAMETER Experiment Name: At_Germinating_Seeds_P Parameter: Tissue Value: Germinating Seeds
  misc_feature: MA Experiment ID: 20000185 Result: Down-regulated in Transcription
  misc_feature: MA Experiment 20000185 PARAMETER Experiment Name: At_Roots__P Parameter: Age (day) Value: 7 vs. 21
  misc_feature: MA Experiment 20000185 PARAMETER Experiment Name: At_Roots__P Parameter: Organism Value: A. thaliana
  misc_feature: MA Experiment 20000185 PARAMETER Experiment Name: At_Roots__P Parameter: Tissue Value: Roots vs. Whole Plant
  misc_feature: MA Experiment ID: 20000227 Result: Down-regulated in Transcription
  misc_feature: MA Experiment 20000227 PARAMETER Experiment Name: At_Root-Tips-vs-Tops_P Parameter: Tissue Value: Root Tips vs. Root Tops
  misc_feature: MA Experiment ID: 20000264 Result: Down-regulated in Transcription
  misc_feature: MA Experiment 20000264 PARAMETER Experiment Name: At_Open_Flower_P Parameter: Age (day) Value: 21
  misc_feature: MA Experiment 20000264 PARAMETER Experiment Name: At_Open_Flower_P Parameter: Plant Line Value: WS
  misc_feature: MA Experiment 20000264 PARAMETER Experiment Name: At_Open_Flower_P Parameter: Tissue Value: Open Flower vs. Whole Plant
  misc_feature: MA Experiment ID: 20000286 Result: Down-regulated in Transcription
  misc_feature: MA Experiment 20000286 PARAMETER Experiment Name: At_Open_Flower_P Parameter: Age (day) Value: 21
  misc_feature: MA Experiment 20000286 PARAMETER Experiment Name: At_Open_Flower_P Parameter: Plant Line Value: WS
  misc_feature: MA Experiment 20000286 PARAMETER Experiment Name: At_Open_Flower_P Parameter: Tissue Value: Half Open vs. Whole Plant
  misc_feature: MA Experiment ID: 20000439 Result: Down-regulated in Transcription
  misc_feature: MA Experiment 20000439 PARAMETER Experiment Name: At_Roots__P Parameter: Age (day) Value: 14 vs. 21
  misc_feature: MA Experiment 20000439 PARAMETER Experiment Name: At_Roots__P Parameter: Organism Value: A. thaliana
  misc_feature: MA Experiment 20000439 PARAMETER Experiment Name: At_Roots__P Parameter: Tissue Value: Roots vs. Whole Plant
  misc_feature: MA Experiment ID: 20000794 Result: Down-regulated in Transcription
  misc_feature: MA Experiment 20000794 PARAMETER Experiment Name: At_Petals_P Parameter: Age (day) Value: 23-25 days
  misc_feature: MA Experiment 20000794 PARAMETER Experiment Name: At_Petals_P Parameter: Plant Line Value: WS
  misc_feature: MA Experiment 20000794 PARAMETER Experiment Name: At_Petals_P Parameter: Tissue Value: Petals vs. Whole plant
  misc_feature: MA Experiment ID: 20001557 Result: Down-regulated in Transcription
  misc_feature: MA Experiment 20001557 PARAMETER Experiment Name: At_Drought_Soil_Dry_P Parameter: Age (day) Value: 27
  misc_feature: MA Experiment 20001557 PARAMETER Experiment Name: At_Drought_Soil_Dry_P Parameter: Organism Value: A. thaliana
  misc_feature: MA Experiment 20001557 PARAMETER Experiment Name: At_Drought_Soil_Dry_P Parameter: Plant Line Value: WS
  misc_feature: MA Experiment 20001557 PARAMETER Experiment Name: At_Drought_Soil_Dry_P Parameter: Post Timepoint (hr) Value: 3
  misc_feature: MA Experiment 20001557 PARAMETER Experiment Name: At_Drought_Soil_Dry_P Parameter: Post-Treatment Value: Re-Water vs. No Drought
  misc_feature: MA Experiment 20001557 PARAMETER Experiment Name: At_Drought_Soil_Dry_P Parameter: Timepoint (day) Value: 13
  misc_feature: MA Experiment 20001557 PARAMETER Experiment Name: At_Drought_Soil_Dry_P Parameter: Treatment Value: Drought vs. No Drought
  misc_feature: MA Experiment ID: 20001757 Result: Up-regulated in Transcription
  misc_feature: MA Experiment 20001757 PARAMETER Experiment Name: At_50mM_NH4NO3_L-to-H_P Parameter: Timepoint (hr) Value: 6
  misc_feature: MA Experiment 20001757 PARAMETER Experiment Name: At_50mM_NH4NO3_L-to-H_P Parameter: Tissue Value: Leaf
  misc_feature: MA Experiment 20001757 PARAMETER Experiment Name: At_50mM_NH4NO3_L-to-H_P Parameter: Treatment Value: 50mM NH4NO3 vs 100mM Mannitol
  misc_feature: MA Experiment ID: 20001908 Result: Down-regulated in Transcription
  misc_feature: MA Experiment 20001908 PARAMETER Experiment Name: At_Drought_Reproduction_P Parameter: Age (day) Value: 40
  misc_feature: MA Experiment 20001908 PARAMETER Experiment Name: At_Drought_Reproduction_P Parameter: Organism Value: A. thaliana
  misc_feature: MA Experiment 20001908 PARAMETER Experiment Name: At_Drought_Reproduction_P Parameter: Plant Line Value: WS
  misc_feature: MA Experiment 20001908 PARAMETER Experiment Name: At_Drought_Reproduction_P Parameter: Timepoint (day) Value: 10
  misc_feature: MA Experiment 20001908 PARAMETER Experiment Name: At_Drought_Reproduction_P Parameter: Tissue Value: Siliques
  misc_feature: MA Experiment 20001908 PARAMETER Experiment Name: At_Drought_Reproduction_P Parameter: Treatment Value: Drought vs. No Drought
cagaataaaaatctatttcttgtgtttgtgttgtatttacttaaaaaaataaaggagatcagtttgggagaaagcagcaaagaagaaaaatggcagcaacatttgcaacaccatcgacggtgataggcctcggaggatcatccatcaccaccaaacccttctcttcatcctttttaaaaccaacattaagcgccaagaaccctttgagactcgccggtgcatcgggaggaagagtcacttgctttgagaggaactggttgaggagagatttgaacgtggtaggatttgggctgatcggatggctagctccgtcgagcattccagcgataaatgggaagagcctgacgggtctcttcttcgatagcatcggaactgagctcgctcacttcccgactcctccagctctcacttcacagttctggttgtggttggttacgtggcacttaggcctcttcctctgcctcactttcggacaaatcggattcaagggcaggactgaagattacttctaaggataactattcttgttttcgtttgtactatatgctctctcttggttatgtgtaatattatcaatcaaaacaaagctttctttgctatttgatgtttcattctatatctcgacaagtctttctt

SEQ ID NO: 100830 - protein, 140 aa, Arabidopsis thaliana; identical to SEQ ID NO: 22821
  peptide (1)..(140): Ceres Seq. ID no. 13606158
  misc_feature (1)..(140): Homolog of NCBI NO: 18390888 NR Description: expressed protein [Arabidopsis thaliana] unknown protein [Arabidopsis thaliana] unknown protein [Arabidopsis thaliana]
  misc_feature (1)..(140): Homolog of NCBI NO: 22531014 NR Description: expressed protein [Arabidopsis thaliana]
  misc_feature (6)..(140): Homolog of NCBI NO: 6996562 NR Description: putative 16kDa membrane protein [Nicotiana
  misc_feature (9)..(140): Homolog of NCBI NO: 32479727 NR Description: OJ991214_12.3 [Oryza sativa (japonica

SEQ ID NO: 100831 - DNA, 1444 bp, Arabidopsis thaliana
  misc_feature (1)..(1444): Ceres Seq. ID no. 13606170
  misc_feature: MA Experiment ID: 108433 Result: Up-regulated in Transcription
  misc_feature: MA Experiment 108433 PARAMETER Experiment Name: At_rhl_Mutant2_cDNA_P Parameter: Age (day) Value: 7
  misc_feature: MA Experiment 108433 PARAMETER Experiment Name: At_rhl_Mutant2_cDNA_P Parameter: Organism Value: A. thaliana
  misc_feature: MA Experiment 108433 PARAMETER Experiment Name: At_rhl_Mutant2_cDNA_P Parameter: Plant Line Value: rhl Mutant vs. wt landsburg
  misc_feature: MA Experiment 108433 PARAMETER Experiment Name: At_rhl_Mutant2_cDNA_P Parameter: Tissue Value: Roots
  misc_feature: MA Experiment ID: 108434 Result: Down-regulated in Transcription
  misc_feature: MA Experiment 108434 PARAMETER Experiment Name: At_Root_Tips_cDNA_P Parameter: Tissue Value: Root Tips
  misc_feature: MA Experiment ID: 108462 Result: Up-regulated in Transcription
  misc_feature: MA Experiment 108462 PARAMETER Experiment Name: At_Germinating_Seeds_cDNA_P Parameter: Age (day) Value: 2 vs. 0
  misc_feature: MA Experiment 108462 PARAMETER Experiment Name: At_Germinating_Seeds_cDNA_P Parameter: Tissue Value: Germinating Seeds
  misc_feature: MA Experiment ID: 108463 Result: Up-regulated in Transcription
  misc_feature: MA Experiment 108463 PARAMETER Experiment Name: At_Germinating_Seeds_cDNA_P Parameter: Age (day) Value: 3 vs. 0
  misc_feature: MA Experiment 108463 PARAMETER Experiment Name: At_Germinating_Seeds_cDNA_P Parameter: Tissue Value: Germinating Seeds
  misc_feature: MA Experiment ID: 108464 Result: Up-regulated in Transcription
  misc_feature: MA Experiment 108464 PARAMETER Experiment Name: At_Germinating_Seeds_cDNA_P Parameter: Age (day) Value: 4 vs. 0
  misc_feature: MA Experiment 108464 PARAMETER Experiment Name: At_Germinating_Seeds_cDNA_P Parameter: Tissue Value: Germinating Seeds
  misc_feature: MA Experiment ID: 20000068 Result: Up-regulated in Transcription
  misc_feature: MA Experiment ID: 20000111 Result: Down-regulated in Transcription
  misc_feature: MA Experiment 20000111 PARAMETER Experiment Name: At_42deg_Heat_cDNA_P Parameter: Temperature (deg C) Value: 42 vs. 22
  misc_feature: MA Experiment 20000111 PARAMETER Experiment Name: At_42deg_Heat_cDNA_P Parameter: Timepoint (hr) Value: 6
  misc_feature: MA Experiment 20000111 PARAMETER Experiment Name: At_42deg_Heat_cDNA_P Parameter: Tissue Value: Aerial
  misc_feature: MA Experiment ID: 20000113 Result: Down-regulated in Transcription
  misc_feature: MA Experiment 20000113 PARAMETER Experiment Name: At_42deg_Heat_cDNA_P Parameter: Temperature (deg C) Value: 42 vs. 22
  misc_feature: MA Experiment 20000113 PARAMETER Experiment Name: At_42deg_Heat_cDNA_P Parameter: Timepoint (hr) Value: 8
  misc_feature: MA Experiment 20000113 PARAMETER Experiment Name: At_42deg_Heat_cDNA_P Parameter: Tissue Value: Aerial
  misc_feature: MA Experiment ID: 20000173 Result: Down-regulated in Transcription
  misc_feature: MA Experiment 20000173 PARAMETER Experiment Name: At_42deg_Heat_P Parameter: Age (day) Value: 14
  misc_feature: MA Experiment 20000173 PARAMETER Experiment Name: At_42deg_Heat_P Parameter: Organism Value: A. thaliana
  misc_feature: MA Experiment 20000173 PARAMETER Experiment Name: At_42deg_Heat_P Parameter: Plant Line Value: WS
  misc_feature: MA Experiment 20000173 PARAMETER Experiment Name: At_42deg_Heat_P Parameter: Temperature (deg C) Value: 42 vs. 22
  misc_feature: MA Experiment 20000173 PARAMETER Experiment Name: At_42deg_Heat_P Parameter: Timepoint (hr) Value: 6
  misc_feature: MA Experiment 20000173 PARAMETER Experiment Name: At_42deg_Heat_P Parameter: Tissue Value: Aerial
  misc_feature: MA Experiment ID: 20000184 Result: Down-regulated in Transcription
  misc_feature: MA Experiment 20000184 PARAMETER Experiment Name: At_Shoots__P Parameter: Age (day) Value: 7
  misc_feature: MA Experiment 20000184 PARAMETER Experiment Name: At_Shoots__P Parameter: Tissue Value: Shoots vs. Whole Plant
  misc_feature: MA Experiment ID: 20000185 Result: Down-regulated in Transcription
  misc_feature: MA Experiment 20000185 PARAMETER Experiment Name: At_Roots__P Parameter: Age (day) Value: 7 vs. 21
  misc_feature: MA Experiment 20000185 PARAMETER Experiment Name: At_Roots__P Parameter: Organism Value: A. thaliana
  misc_feature: MA Experiment 20000185 PARAMETER Experiment Name: At_Roots__P Parameter: Tissue Value: Roots vs. Whole Plant
  misc_feature: MA Experiment ID: 20000224 Result: Down-regulated in Transcription
  misc_feature: MA Experiment ID: 20000227 Result: Down-regulated in Transcription
  misc_feature: MA Experiment 20000227 PARAMETER Experiment Name: At_Root-Tips-vs-Tops_P Parameter: Tissue Value: Root Tips vs. Root Tops
  misc_feature: MA Experiment ID: 20000234 Result: Down-regulated in Transcription
  misc_feature: MA Experiment 20000234 PARAMETER Experiment Name: At_Siliques_P Parameter: Age (day) Value: 21
  misc_feature: MA Experiment 20000234 PARAMETER Experiment Name: At_Siliques_P Parameter: Organism Value: A. thaliana
  misc_feature: MA Experiment 20000234 PARAMETER Experiment Name: At_Siliques_P Parameter: Plant Line Value: WS
  misc_feature: MA Experiment 20000234 PARAMETER Experiment Name: At_Siliques_P Parameter: Tissue Value: Less Than 5mm Siliques vs. Whole Plant
  misc_feature: MA Experiment ID: 20000265 Result: Down-regulated in Transcription
  misc_feature: MA Experiment 20000265 PARAMETER Experiment Name: At_Open_Flower_P Parameter: Age (day) Value: 21
  misc_feature: MA Experiment 20000265 PARAMETER Experiment Name: At_Open_Flower_P Parameter: Plant Line Value: WS
  misc_feature: MA Experiment 20000265 PARAMETER Experiment Name: At_Open_Flower_P Parameter: Tissue Value: Closed Flower vs. Whole Plant
  misc_feature: MA Experiment ID: 20000286 Result: Down-regulated in Transcription
  misc_feature: MA Experiment 20000286 PARAMETER Experiment Name: At_Open_Flower_P Parameter: Age (day) Value: 21
  misc_feature: MA Experiment 20000286 PARAMETER Experiment Name: At_Open_Flower_P Parameter: Plant Line Value: WS
  misc_feature: MA Experiment 20000286 PARAMETER Experiment Name: At_Open_Flower_P Parameter: Tissue Value: Half Open vs. Whole Plant
  misc_feature: MA Experiment ID: 20000439 Result: Down-regulated in Transcription
  misc_feature: MA Experiment 20000439 PARAMETER Experiment Name: At_Roots__P Parameter: Age (day) Value: 14 vs. 21
  misc_feature: MA Experiment 20000439 PARAMETER Experiment Name: At_Roots__P Parameter: Organism Value: A. thaliana
  misc_feature: MA Experiment 20000439 PARAMETER Experiment Name: At_Roots__P Parameter: Tissue Value: Roots vs. Whole Plant
  misc_feature: MA Experiment ID: 20000451 Result: Down-regulated in Transcription
  misc_feature: MA Experiment 20000451 PARAMETER Experiment Name: At_CS6879_Shoots-Roots_P Parameter: Age (day) Value: 14
  misc_feature: MA Experiment 20000451 PARAMETER Experiment Name: At_CS6879_Shoots-Roots_P Parameter: Organism Value: A. thaliana
  misc_feature: MA Experiment 20000451 PARAMETER Experiment Name: At_CS6879_Shoots-Roots_P Parameter: Plant Line Value: CS6879 vs. WS
  misc_feature: MA Experiment 20000451 PARAMETER Experiment Name: At_CS6879_Shoots-Roots_P Parameter: Tissue Value: Roots
  misc_feature: MA Experiment ID: 20000496 Result: Down-regulated in Transcription
  misc_feature: MA Experiment 20000496 PARAMETER Experiment Name: At_Guard_Cells_P Parameter: Harvest Date Value: 7/19/2002
  misc_feature: MA Experiment 20000496 PARAMETER Experiment Name: At_Guard_Cells_P Parameter: Organism Value: Canola
  misc_feature: MA Experiment 20000496 PARAMETER Experiment Name: At_Guard_Cells_P Parameter: Tissue Value: Guard Cells vs. Leaves
  misc_feature: MA Experiment ID: 20001557 Result: Down-regulated in Transcription
  misc_feature: MA Experiment 20001557 PARAMETER Experiment Name: At_Drought_Soil_Dry_P Parameter: Age (day) Value: 27
  misc_feature: MA Experiment 20001557 PARAMETER Experiment Name: At_Drought_Soil_Dry_P Parameter: Organism Value: A. thaliana
  misc_feature: MA Experiment 20001557 PARAMETER Experiment Name: At_Drought_Soil_Dry_P Parameter: Plant Line Value: WS
  misc_feature: MA Experiment 20001557 PARAMETER Experiment Name: At_Drought_Soil_Dry_P Parameter: Post Timepoint (hr) Value: 3
  misc_feature: MA Experiment 20001557 PARAMETER Experiment Name: At_Drought_Soil_Dry_P Parameter: Post-Treatment Value: Re-Water vs. No Drought
  misc_feature: MA Experiment 20001557 PARAMETER Experiment Name: At_Drought_Soil_Dry_P Parameter: Timepoint (day) Value: 13
  misc_feature: MA Experiment 20001557 PARAMETER Experiment Name: At_Drought_Soil_Dry_P Parameter: Treatment Value: Drought vs. No Drought
  misc_feature: MA Experiment ID: 20001558 Result: Down-regulated in Transcription
  misc_feature: MA Experiment 20001558 PARAMETER Experiment Name: At_Drought_Soil_Dry_P Parameter: Age (day) Value: 27
  misc_feature: MA Experiment 20001558 PARAMETER Experiment Name: At_Drought_Soil_Dry_P Parameter: Organism Value: A. thaliana
  misc_feature: MA Experiment 20001558 PARAMETER Experiment Name: At_Drought_Soil_Dry_P Parameter: Plant Line Value: WS
  misc_feature: MA Experiment 20001558 PARAMETER Experiment Name: At_Drought_Soil_Dry_P Parameter: Post Timepoint (hr) Value: 6
  misc_feature: MA Experiment 20001558 PARAMETER Experiment Name: At_Drought_Soil_Dry_P Parameter: Post-Treatment Value: Re-Water vs. No Drought
  misc_feature: MA Experiment 20001558 PARAMETER Experiment Name: At_Drought_Soil_Dry_P Parameter: Timepoint (day) Value: 13
  misc_feature: MA Experiment 20001558 PARAMETER Experiment Name: At_Drought_Soil_Dry_P Parameter: Treatment Value: Drought vs. No Drought
  misc_feature: MA Experiment ID: 20001560 Result: Down-regulated in Transcription
  misc_feature: MA Experiment 20001560 PARAMETER Experiment Name: At_Drought_Soil_Dry_P Parameter: Age (day) Value: 28
  misc_feature: MA Experiment 20001560 PARAMETER Experiment Name: At_Drought_Soil_Dry_P Parameter: Organism Value: A. thaliana
  misc_feature: MA Experiment 20001560 PARAMETER Experiment Name: At_Drought_Soil_Dry_P Parameter: Plant Line Value: WS
  misc_feature: MA Experiment 20001560 PARAMETER Experiment Name: At_Drought_Soil_Dry_P Parameter: Post Timepoint (hr) Value: None
  misc_feature: MA Experiment 20001560 PARAMETER Experiment Name: At_Drought_Soil_Dry_P Parameter: Post-Treatment Value: None
  misc_feature: MA Experiment 20001560 PARAMETER Experiment Name: At_Drought_Soil_Dry_P Parameter: Timepoint (day) Value: 14
  misc_feature: MA Experiment 20001560 PARAMETER Experiment Name: At_Drought_Soil_Dry_P Parameter: Treatment Value: Drought vs. No Drought
  misc_feature: MA Experiment ID: 20001905 Result: Down-regulated in Transcription
  misc_feature: MA Experiment 20001905 PARAMETER Experiment Name: At_Drought_Reproduction_P Parameter: Age (day) Value: 40
  misc_feature: MA Experiment 20001905 PARAMETER Experiment Name: At_Drought_Reproduction_P Parameter: Organism Value: A. thaliana
  misc_feature: MA Experiment 20001905 PARAMETER Experiment Name: At_Drought_Reproduction_P Parameter: Plant Line Value: WS
  misc_feature: MA Experiment 20001905 PARAMETER Experiment Name: At_Drought_Reproduction_P Parameter: Timepoint (day) Value: 10
  misc_feature: MA Experiment 20001905 PARAMETER Experiment Name: At_Drought_Reproduction_P Parameter: Tissue Value: Rosettes
  misc_feature: MA Experiment 20001905 PARAMETER Experiment Name: At_Drought_Reproduction_P Parameter: Treatment Value: Drought vs. No Drought
  misc_feature: MA Experiment ID: 20001906 Result: Down-regulated in Transcription
  misc_feature: MA Experiment 20001906 PARAMETER Experiment Name: At_Drought_Reproduction_P Parameter: Age (day) Value: 35
  misc_feature: MA Experiment 20001906 PARAMETER Experiment Name: At_Drought_Reproduction_P Parameter: Organism Value: A. thaliana
  misc_feature: MA Experiment 20001906 PARAMETER Experiment Name: At_Drought_Reproduction_P Parameter: Plant Line Value: WS
  misc_feature: MA Experiment 20001906 PARAMETER Experiment Name: At_Drought_Reproduction_P Parameter: Timepoint (day) Value: 5
  misc_feature: MA Experiment 20001906 PARAMETER Experiment Name: At_Drought_Reproduction_P Parameter: Tissue Value: Siliques
  misc_feature: MA Experiment 20001906 PARAMETER Experiment Name: At_Drought_Reproduction_P Parameter: Treatment Value: Drought vs. No Drought
aagaatcaaagaaagaagatggaatctgaaagactcgaatcacatcttctgaataagcaagaagaagaagcttcttccttcacttctggtcttcttctcagcacatccgtcgttgtcgctggatccttctgttatggctgcgcctccaaaatcatggaagaactgggactttccgttgcagattattcgtttttcacttcggtaatgacattaggaggaatgattaccgccgtgttcagcggtaaaatctctgctctcgttggtcgtcgacagacaatgtggatctcagatgtttgctgtatttttggttggctcgctgtagcgtttgcacatgatattataatgcttaatactggacgactcttcttggggtttggggttggtctcattagttatgtggttcctgtgtatatagcagaaattacacccaaaacatttcgtggaggattttcttattccaatcagcttctacaatgtcttgggatttcactcatgttcttcaccggaaactttttccattggcgaacattagctcttttaagtgcaatcccaagtgctttccaagtgatatgtttattttttattcctgaatctcctagatggctggcgatgtatggtcaagatcaagagcttgaagtttcgttgaaaaaactaaggggagaaaatagtgatattctaaaggaagctgctgaaatcagagaaacagtggaaatatccagaaaagagtctcaaagtggaataagagacttgttccatatcggaaacgcacattcgttaatcattggattgggtttaatgctcttgcaacaattttgtgggagtgcggcgataagtgcttatgctgctcgaattttcgacaaagccggttttccaagcgacataggaacaaccatcctcgcagtgattctgataccgcaatctatagttgtcatgttaaccgttgaccgatggggacgccgaccacttcttatgatttcttctatcggaatgtgcatatgctcattttttattggcctttcatactaccttcagaagaatggtgaatttcagaagttatgttccgttatgttaatcgtcggtttagtgggttatgtctcatcctttggcattggcctaggtggattaccatgggttataatgtctgagatatttccggtgaatgtgaaaatcaccgccggtagccttgtaacgatgtcaaattggttttttaattggattatcatctatagttttaatttcatgatacagtggagcgcttccggaacatatttcatattttctggagtttctctggtgacgatcgtattcatatggacattggtgcctgagacgaaaggccgaacactcgaagagattcaaacatcattagtccgactttcgtaaaatctaagtatggattatacgtaatgttaagtctcttgaatagtctttttaaccgtatatt

SEQ ID NO: 100832 - protein, 460 aa, Arabidopsis thaliana
  peptide (1)..(460): Ceres Seq. ID no. 13606171
  misc_feature (42)..(109): Pfam Name: Sugar (and other) transporter Pfam Description: Sugar (and other) transporter
  misc_feature (42)..(233): Homolog of NCBI NO: 30680852 NR Description: sugar transporter family [Arabidopsis thaliana]
  misc_feature (355)..(460): Homolog of NCBI NO: 30680852 NR Description: sugar transporter family [Arabidopsis thaliana]
  misc_feature (236)..(289): Homolog of NCBI NO: 30680852 NR Description: sugar transporter family [Arabidopsis thaliana]
  misc_feature (7)..(48): Homolog of NCBI NO: 30680852 NR Description: sugar transporter family [Arabidopsis thaliana]
  misc_feature (92)..(233): Homolog of NCBI NO: 25407061 NR Description: hypothetical protein [imported] - Arabidopsis >gi|2342688|gb|AAB70414.1| Similar to Beta integral membrane
  misc_feature (361)..(460): Homolog of NCBI NO: 25407061 NR Description: hypothetical protein [imported] - Arabidopsis >gi|2342688|gb|AAB70414.1| Similar to Beta integral membrane
  misc_feature (42)..(109): Homolog of NCBI NO: 25407061 NR Description: hypothetical protein [imported] - Arabidopsis >gi|2342688|gb|AAB70414.1| Similar to Beta integral membrane
  misc_feature (42)..(233): Homolog of NCBI NO: 25407059 NR Description: hypothetical protein [imported] - Arabidopsis >gi|2342689|gb|AAB70415.1| Similar to Beta integral membrane
  misc_feature (355)..(460): Homolog of NCBI NO: 25407059 NR Description: hypothetical protein [imported] - Arabidopsis >gi|2342689|gb|AAB70415.1| Similar to Beta integral membrane
  misc_feature (7)..(48): Homolog of NCBI NO: 25407059 NR Description: hypothetical protein [imported] - Arabidopsis >gi|2342689|gb|AAB70415.1| Similar to Beta integral membrane
KNQRKKMESERLESHLLNKQEEEASSFTSGLLLSTSVVVAGSFCYGCASKIMEELGLSVADYSFFTSVMTLGGMITAVFSGKISALVGRRQTMWISDVCCIFGWLAVAFAHDIIMLNTGRLFLGFGVGLISYVVPVYIAEITPKTFRGGFSYSNQLLQCLGISLMFFTGNFFHWRTLALLSAIPSAFQVICLFFIPESPRWLAMYGQDQELEVSLKKLRGENSDILKEAAEIRETVEISRKESQSGIRDLFHIGNAHSLIIGLGLMLLQQFCGSAAISAYAARIFDKAGFPSDIGTTILAVILIPQSIVVMLTVDRWGRRPLLMISSIGMCICSFFIGLSYYLQKNGEFQKLCSVMLIVGLVGYVSSFGIGLGGLPWVIMSEIFPVNVKITAGSLVTMSNWFFNWIIIYSFNFMIQWSASGTYFIFSGVSLVTIVFIWTLVPETKGRTLEEIQTSLVRLS

SEQ ID NO: 100833 - protein, 454 aa, Arabidopsis thaliana
  peptide (1)..(454): Ceres Seq. ID no. 13606172
  misc_feature (36)..(103): Pfam Name: Sugar (and other) transporter Pfam Description: Sugar (and other) transporter
  misc_feature (36)..(227): Homolog of NCBI NO: 30680852 NR Description: sugar transporter family [Arabidopsis thaliana]
  misc_feature (349)..(454): Homolog of NCBI NO: 30680852 NR Description: sugar transporter family [Arabidopsis thaliana]
  misc_feature (230)..(283): Homolog of NCBI NO: 30680852 NR Description: sugar transporter family [Arabidopsis thaliana]
  misc_feature (1)..(42): Homolog of NCBI NO: 30680852 NR Description: sugar transporter family [Arabidopsis thaliana]
  misc_feature (86)..(227): Homolog of NCBI NO: 25407061 NR Description: hypothetical protein [imported] - Arabidopsis >gi|2342688|gb|AAB70414.1| Similar to Beta integral membrane
  misc_feature (355)..(454): Homolog of NCBI NO: 25407061 NR Description: hypothetical protein [imported] - Arabidopsis >gi|2342688|gb|AAB70414.1| Similar to Beta integral membrane
  misc_feature (36)..(103): Homolog of NCBI NO: 25407061 NR Description: hypothetical protein [imported] - Arabidopsis >gi|2342688|gb|AAB70414.1| Similar to Beta integral membrane
  misc_feature (36)..(227): Homolog of NCBI NO: 25407059 NR Description: hypothetical protein [imported] - Arabidopsis >gi|2342689|gb|AAB70415.1| Similar to Beta integral membrane
  misc_feature (349)..(454): Homolog of NCBI NO: 25407059 NR Description: hypothetical protein [imported] - Arabidopsis >gi|2342689|gb|AAB70415.1| Similar to Beta integral membrane
  misc_feature (1)..(42): Homolog of NCBI NO: 25407059 NR Description: hypothetical protein [imported] - Arabidopsis >gi|2342689|gb|AAB70415.1| Similar to Beta integral membrane
MESERLESHLLNKQEEEASSFTSGLLLSTSVVVAGSFCYGCASKIMEELGLSVADYSFFTSVMTLGGMITAVFSGKISALVGRRQTMWISDVCCIFGWLAVAFAHDIIMLNTGRLFLGFGVGLISYVVPVYIAEITPKTFRGGFSYSNQLLQCLGISLMFFTGNFFHWRTLALLSAIPSAFQVICLFFIPESPRWLAMYGQDQELEVSLKKLRGENSDILKEAAEIRETVEISRKESQSGIRDLFHIGNAHSLIIGLGLMLLQQFCGSAAISAYAARIFDKAGFPSDIGTTILAVILIPQSIVVMLTVDRWGRRPLLMISSIGMCICSFFIGLSYYLQKNGEFQKLCSVMLIVGLVGYVSSFGIGLGGLPWVIMSEIFPVNVKITAGSLVTMSNWFFNWIIIYSFNFMIQWSASGTYFIFSGVSLVTIVFIWTLVPETKGRTLEEIQTSLVRLS

SEQ ID NO: 100834 - protein, 409 aa, Arabidopsis thaliana
  peptide (1)..(409): Ceres Seq. ID no. 13606173
  misc_feature (1)..(58): Pfam Name: Sugar (and other) transporter Pfam Description: Sugar (and other) transporter
  misc_feature (1)..(182): Homolog of NCBI NO: 30680852 NR Description: sugar transporter family [Arabidopsis thaliana]
  misc_feature (304)..(409): Homolog of NCBI NO: 30680852 NR Description: sugar transporter family [Arabidopsis thaliana]
  misc_feature (185)..(238): Homolog of NCBI NO: 30680852 NR Description: sugar transporter family [Arabidopsis thaliana]
  misc_feature (41)..(182): Homolog of NCBI NO: 25407061 NR Description: hypothetical protein [imported] - Arabidopsis >gi|2342688|gb|AAB70414.1| Similar to Beta integral membrane
  misc_feature (310)..(409): Homolog of NCBI NO: 25407061 NR Description: hypothetical protein [imported] - Arabidopsis >gi|2342688|gb|AAB70414.1| Similar to Beta integral membrane
  misc_feature (1)..(58): Homolog of NCBI NO: 25407061 NR Description: hypothetical protein [imported] - Arabidopsis >gi|2342688|gb|AAB70414.1| Similar to Beta integral membrane
  misc_feature (1)..(182): Homolog of NCBI NO: 25407059 NR Description: hypothetical protein [imported] - Arabidopsis >gi|2342689|gb|AAB70415.1| Similar to Beta integral membrane
  misc_feature (304)..(409): Homolog of NCBI NO: 25407059 NR Description: hypothetical protein [imported] - Arabidopsis >gi|2342689|gb|AAB70415.1| Similar to Beta integral membrane
  misc_feature (1)..(209): Homolog of NCBI NO: 18390954 NR Description: sugar transport protein, ERD6 -related thaliana] >gi|14423388|gb|AAK62376.1|AF386931_1 Similar to Beta membrane protein [Arabidopsis thaliana]
  misc_feature (1)..(245): Homolog of NCBI NO: 6686829 NR Description: putative sugar transporter [Arabidopsis thaliana]
MEELGLSVADYSFFTSVMTLGGMITAVFSGKISALVGRRQTMWISDVCCIFGWLAVAFAHDIIMLNTGRLFLGFGVGLISYVVPVYIAEITPKTFRGGFSYSNQLLQCLGISLMFFTGNFFHWRTLALLSAIPSAFQVICLFFIPESPRWLAMYGQDQELEVSLKKLRGENSDILKEAAEIRETVEISRKESQSGIRDLFHIGNAHSLIIGLGLMLLQQFCGSAAISAYAARIFDKAGFPSDIGTTILAVILIPQSIVVMLTVDRWGRRPLLMISSIGMCICSFFIGLSYYLQKNGEFQKLCSVMLIVGLVGYVSSFGIGLGGLPWVIMSEIFPVNVKITAGSLVTMSNWFFNWIIIYSFNFMIQWSASGTYFIFSGVSLVTIVFIWTLVPETKGRTLEEIQTSLVRLS

SEQ ID NO: 100835 - DNA, 1817 bp, Arabidopsis thaliana
  misc_feature (1)..(1817): Ceres Seq. ID no. 13606174
  misc_feature: MA Experiment ID: 108434 Result: Down-regulated in Transcription
  misc_feature: MA Experiment 108434 PARAMETER Experiment Name: At_Root_Tips_cDNA_P Parameter: Tissue Value: Root Tips
  misc_feature: MA Experiment ID: 108463 Result: Up-regulated in Transcription
  misc_feature: MA Experiment 108463 PARAMETER Experiment Name: At_Germinating_Seeds_cDNA_P Parameter: Age (day) Value: 3 vs. 0
  misc_feature: MA Experiment 108463 PARAMETER Experiment Name: At_Germinating_Seeds_cDNA_P Parameter: Tissue Value: Germinating Seeds
  misc_feature: MA Experiment ID: 108464 Result: Up-regulated in Transcription
  misc_feature: MA Experiment 108464 PARAMETER Experiment Name: At_Germinating_Seeds_cDNA_P Parameter: Age (day) Value: 4 vs. 0
  misc_feature: MA Experiment 108464 PARAMETER Experiment Name: At_Germinating_Seeds_cDNA_P Parameter: Tissue Value: Germinating Seeds
  misc_feature: MA Experiment ID: 108488 Result: Down-regulated in Transcription
  misc_feature: MA Experiment ID: 108489 Result: Up-regulated in Transcription
  misc_feature: MA Experiment ID: 108561 Result: Up-regulated in Transcription
  misc_feature: MA Experiment 108561 PARAMETER Experiment Name: At_100uM_ABA_cDNA_P Parameter: Timepoint (hr) Value: 6
  misc_feature: MA Experiment 108561 PARAMETER Experiment Name: At_100uM_ABA_cDNA_P Parameter: Tissue Value: Aerial
  misc_feature: MA Experiment 108561 PARAMETER Experiment Name: At_100uM_ABA_cDNA_P Parameter: Treatment Value: 100uM ABA vs. No Treatment
  misc_feature: MA Experiment ID: 108572 Result: Up-regulated in Transcription
  misc_feature: MA Experiment 108572 PARAMETER Experiment Name: At_Drought_cDNA_P Parameter: Timepoint (hr) Value: 1
  misc_feature: MA Experiment 108572 PARAMETER Experiment Name: At_Drought_cDNA_P Parameter: Tissue Value: Aerial
  misc_feature: MA Experiment 108572 PARAMETER Experiment Name: At_Drought_cDNA_P Parameter: Treatment Value: Drought vs. No Drought
  misc_feature: MA Experiment ID: 108573 Result: Up-regulated in Transcription
  misc_feature: MA Experiment 108573 PARAMETER Experiment Name: At_Drought_cDNA_P Parameter: Timepoint (hr) Value: 6
  misc_feature: MA Experiment 108573 PARAMETER Experiment Name: At_Drought_cDNA_P Parameter: Tissue Value: Aerial
  misc_feature: MA Experiment 108573 PARAMETER Experiment Name: At_Drought_cDNA_P Parameter: Treatment Value: Drought vs. No Drought
  misc_feature: MA Experiment ID: 108579 Result: Up-regulated in Transcription
  misc_feature: MA Experiment 108579 PARAMETER Experiment Name: At_4deg_Cold_cDNA_P Parameter: Temperature (deg C) Value: 4 vs. 22
  misc_feature: MA Experiment 108579 PARAMETER Experiment Name: At_4deg_Cold_cDNA_P Parameter: Timepoint (hr) Value: 6
  misc_feature: MA Experiment 108579 PARAMETER Experiment Name: At_4deg_Cold_cDNA_P Parameter: Tissue Value: Aerial
  misc_feature: MA Experiment ID: 108585 Result: Up-regulated in Transcription
  misc_feature: MA Experiment 108585 PARAMETER Experiment Name: At_5mM_NaNP_cDNA_P Parameter: Timepoint (hr) Value: 6
  misc_feature: MA Experiment 108585 PARAMETER Experiment Name: At_5mM_NaNP_cDNA_P Parameter: Tissue Value: Aerial
  misc_feature: MA Experiment 108585 PARAMETER Experiment Name: At_5mM_NaNP_cDNA_P Parameter: Treatment Value: null
  misc_feature: MA Experiment ID: 108605 Result: Up-regulated in Transcription
  misc_feature: MA Experiment 108605 PARAMETER Experiment Name: At_100uM_ABA_cDNA_P Parameter: Timepoint (hr) Value: 6
  misc_feature: MA Experiment 108605 PARAMETER Experiment Name: At_100uM_ABA_cDNA_P Parameter: Tissue Value: Aerial
  misc_feature: MA Experiment 108605 PARAMETER Experiment Name: At_100uM_ABA_cDNA_P Parameter: Treatment Value: 100uM ABA vs. No Treatment
  misc_feature: MA Experiment ID: 108607 Result: Up-regulated in Transcription
  misc_feature: MA Experiment 108607 PARAMETER Experiment Name: At_100uM_ABA_cDNA_P Parameter: Timepoint (hr) Value: 4
  misc_feature: MA Experiment 108607 PARAMETER Experiment Name: At_100uM_ABA_cDNA_P Parameter: Tissue Value: Aerial
  misc_feature: MA Experiment 108607 PARAMETER Experiment Name: At_100uM_ABA_cDNA_P Parameter: Treatment Value: 100uM ABA vs. No Treatment
  misc_feature: MA Experiment ID: 108609 Result: Up-regulated in Transcription
  misc_feature: MA Experiment 108609 PARAMETER Experiment Name: At_100uM_ABA_cDNA_P Parameter: Timepoint (hr) Value: 24
  misc_feature: MA Experiment 108609 PARAMETER Experiment Name: At_100uM_ABA_cDNA_P Parameter: Tissue Value: Aerial
  misc_feature: MA Experiment 108609 PARAMETER Experiment Name: At_100uM_ABA_cDNA_P Parameter: Treatment Value: 100uM ABA vs. No Treatment
  misc_feature: MA Experiment ID: 20000069 Result: Up-regulated in Transcription
  misc_feature: MA Experiment 20000069 PARAMETER Experiment Name: At_100uM_ABA_Mutants_cDNA_P Parameter: Plant Line Value: CS23
  misc_feature: MA Experiment 20000069 PARAMETER Experiment Name: At_100uM_ABA_Mutants_cDNA_P Parameter: Timepoint (hr) Value: 6
  misc_feature: MA Experiment 20000069 PARAMETER Experiment Name: At_100uM_ABA_Mutants_cDNA_P Parameter: Tissue Value: Aerial
  misc_feature: MA Experiment 20000069 PARAMETER Experiment Name: At_100uM_ABA_Mutants_cDNA_P Parameter: Treatment Value: 100uM ABA vs. No Treatment
  misc_feature: MA Experiment ID: 20000070 Result: Up-regulated in Transcription
  misc_feature: MA Experiment 20000070 PARAMETER Experiment Name: At_100uM_ABA_Mutants_cDNA_P Parameter: Plant Line Value: CS24
  misc_feature: MA Experiment 20000070 PARAMETER Experiment Name: At_100uM_ABA_Mutants_cDNA_P Parameter: Timepoint (hr) Value: 6
  misc_feature: MA Experiment 20000070 PARAMETER Experiment Name: At_100uM_ABA_Mutants_cDNA_P Parameter: Tissue Value: Aerial
  misc_feature: MA Experiment 20000070 PARAMETER Experiment Name: At_100uM_ABA_Mutants_cDNA_P Parameter: Treatment Value: 100uM ABA vs. No Treatment
  misc_feature: MA Experiment ID: 20000071 Result: Up-regulated in Transcription
  misc_feature: MA Experiment 20000071 PARAMETER Experiment Name: At_100uM_ABA_Mutants_cDNA_P Parameter: Plant Line Value: CS8104
  misc_feature: MA Experiment 20000071 PARAMETER Experiment Name: At_100uM_ABA_Mutants_cDNA_P Parameter: Timepoint (hr) Value: 6
  misc_feature: MA Experiment 20000071 PARAMETER Experiment Name: At_100uM_ABA_Mutants_cDNA_P Parameter: Tissue Value: Aerial
  misc_feature: MA Experiment 20000071 PARAMETER Experiment Name: At_100uM_ABA_Mutants_cDNA_P Parameter: Treatment Value: 100uM ABA vs. No Treatment
  misc_feature: MA Experiment ID: 20000072 Result: Up-regulated in Transcription
  misc_feature: MA Experiment 20000072 PARAMETER Experiment Name: At_100uM_ABA_Mutants_cDNA_P Parameter: Plant Line Value: CS8105
  misc_feature: MA Experiment 20000072 PARAMETER Experiment Name: At_100uM_ABA_Mutants_cDNA_P Parameter: Timepoint (hr) Value: 6
  misc_feature: MA Experiment 20000072 PARAMETER Experiment Name: At_100uM_ABA_Mutants_cDNA_P Parameter: Tissue Value: Aerial
  misc_feature: MA Experiment 20000072 PARAMETER Experiment Name: At_100uM_ABA_Mutants_cDNA_P Parameter: Treatment Value: 100uM ABA vs. No Treatment
  misc_feature: MA Experiment ID: 20000086 Result: Up-regulated in Transcription
  misc_feature: MA Experiment 20000086 PARAMETER Experiment Name: At_100uM_ABA_Mutants_cDNA_P Parameter: Plant Line Value: CS22
  misc_feature: MA Experiment 20000086 PARAMETER Experiment Name: At_100uM_ABA_Mutants_cDNA_P Parameter: Timepoint (hr) Value: 6
  misc_feature: MA Experiment 20000086 PARAMETER Experiment Name: At_100uM_ABA_Mutants_cDNA_P Parameter: Tissue Value: Aerial
  misc_feature: MA Experiment 20000086 PARAMETER Experiment Name: At_100uM_ABA_Mutants_cDNA_P Parameter: Treatment Value: 100uM ABA vs. No Treatment
  misc_feature: MA Experiment ID: 20000087 Result: Up-regulated in Transcription
  misc_feature: MA Experiment 20000087 PARAMETER Experiment Name: At_100uM_ABA_Mutants_cDNA_P Parameter: Plant Line Value: WS
  misc_feature: MA Experiment 20000087 PARAMETER Experiment Name: At_100uM_ABA_Mutants_cDNA_P Parameter: Timepoint (hr) Value: 6
  misc_feature: MA Experiment 20000087 PARAMETER Experiment Name: At_100uM_ABA_Mutants_cDNA_P Parameter: Tissue Value: Aerial
  misc_feature: MA Experiment 20000087 PARAMETER Experiment Name: At_100uM_ABA_Mutants_cDNA_P Parameter: Treatment Value: 100uM ABA vs. No Treatment
  misc_feature: MA Experiment ID: 20000088 Result: Up-regulated in Transcription
  misc_feature: MA Experiment 20000088 PARAMETER Experiment Name: At_100uM_ABA_Mutants_cDNA_P Parameter: Plant Line Value: Landsberg
  misc_feature: MA Experiment 20000088 PARAMETER Experiment Name: At_100uM_ABA_Mutants_cDNA_P Parameter: Timepoint (hr) Value: 6
  misc_feature: MA Experiment 20000088 PARAMETER Experiment Name: At_100uM_ABA_Mutants_cDNA_P Parameter: Tissue Value: Aerial
  misc_feature: MA Experiment 20000088 PARAMETER Experiment Name: At_100uM_ABA_Mutants_cDNA_P Parameter: Treatment Value: 100uM ABA vs. No Treatment
  misc_feature: MA Experiment ID: 20000117 Result: Up-regulated in Transcription
  misc_feature: MA Experiment 20000117 PARAMETER Experiment Name: At_100uM_ABA_Mutants_cDNA_P Parameter: Plant Line Value: Columbia
  misc_feature: MA Experiment 20000117 PARAMETER Experiment Name: At_100uM_ABA_Mutants_cDNA_P Parameter: Timepoint (hr) Value: 6
  misc_feature: MA Experiment 20000117 PARAMETER Experiment Name: At_100uM_ABA_Mutants_cDNA_P Parameter: Tissue Value: Aerial
  misc_feature: MA Experiment 20000117 PARAMETER Experiment Name: At_100uM_ABA_Mutants_cDNA_P Parameter: Treatment Value: 100uM ABA vs. No Treatment
  misc_feature: MA Experiment ID: 20000315 Result: Down-regulated in Transcription
  misc_feature: MA Experiment 20000315 PARAMETER Experiment Name: At_14day_Shoots-Roots_Sub_P Parameter: Age (day) Value: 14
  misc_feature: MA Experiment 20000315 PARAMETER Experiment Name: At_14day_Shoots-Roots_Sub_P Parameter: Organism Value: A. thaliana
  misc_feature: MA Experiment 20000315 PARAMETER Experiment Name: At_14day_Shoots-Roots_Sub_P Parameter: Plant Line Value: WS
  misc_feature: MA Experiment 20000315 PARAMETER Experiment Name: At_14day_Shoots-Roots_Sub_P Parameter: Tissue Value: Shoots vs. Whole Plant
  misc_feature: MA Experiment ID: 20000329 Result: Up-regulated in Transcription
  misc_feature: MA Experiment 20000329 PARAMETER Experiment Name: At_4deg_Cold_Sub_P Parameter: Age (day) Value: 14
  misc_feature: MA Experiment 20000329 PARAMETER Experiment Name: At_4deg_Cold_Sub_P Parameter: Organism Value: A. thaliana
  misc_feature: MA Experiment 20000329 PARAMETER Experiment Name: At_4deg_Cold_Sub_P Parameter: Plant Line Value: WS
  misc_feature: MA Experiment 20000329 PARAMETER Experiment Name: At_4deg_Cold_Sub_P Parameter: Temperature (deg C) Value: 4 vs. 22
  misc_feature: MA Experiment 20000329 PARAMETER Experiment Name: At_4deg_Cold_Sub_P Parameter: Timepoint (hr) Value: 6
  misc_feature: MA Experiment 20000329 PARAMETER Experiment Name: At_4deg_Cold_Sub_P Parameter: Tissue Value: Aerial
  misc_feature: MA Experiment ID: 20000349 Result: Up-regulated in Transcription
  misc_feature: MA Experiment 20000349 PARAMETER Experiment Name: At_100uM_ABA_Sub_P Parameter: Age (day) Value: 14
  misc_feature: MA Experiment 20000349 PARAMETER Experiment Name: At_100uM_ABA_Sub_P Parameter: Organism Value: A. thaliana
  misc_feature: MA Experiment 20000349 PARAMETER Experiment Name: At_100uM_ABA_Sub_P Parameter: Plant Line Value: WS
  misc_feature: MA Experiment 20000349 PARAMETER Experiment Name: At_100uM_ABA_Sub_P Parameter: Timepoint (hr) Value: 6
  misc_feature: MA Experiment 20000349 PARAMETER Experiment Name: At_100uM_ABA_Sub_P Parameter: Tissue Value: Aerial
  misc_feature: MA Experiment 20000349 PARAMETER Experiment Name: At_100uM_ABA_Sub_P Parameter: Treatment Value: 100uM ABA vs. No Treatment
  misc_feature: MA Experiment ID: 20000352 Result: Up-regulated in Transcription
  misc_feature: MA Experiment 20000352 PARAMETER Experiment Name: At_Drought_Sub_P Parameter: Age (day) Value: 7
  misc_feature: MA Experiment 20000352 PARAMETER Experiment Name: At_Drought_Sub_P Parameter: Organism Value: A. thaliana
  misc_feature: MA Experiment 20000352 PARAMETER Experiment Name: At_Drought_Sub_P Parameter: Plant Line Value: WS
  misc_feature: MA Experiment 20000352 PARAMETER Experiment Name: At_Drought_Sub_P Parameter: Timepoint (hr) Value: 6
  misc_feature: MA Experiment 20000352 PARAMETER Experiment Name: At_Drought_Sub_P Parameter: Tissue Value: Whole Plant
  misc_feature: MA Experiment 20000352 PARAMETER Experiment Name: At_Drought_Sub_P Parameter: Treatment Value: Drought vs. No Drought
  misc_feature: MA Experiment ID: 20000355 Result: Down-regulated in Transcription
  misc_feature: MA Experiment 20000355 PARAMETER Experiment Name: At_Siliques_Sub_P Parameter: Age (day) Value: 21
  misc_feature: MA Experiment 20000355 PARAMETER Experiment Name: At_Siliques_Sub_P Parameter: Organism Value: A. thaliana
  misc_feature: MA Experiment 20000355 PARAMETER Experiment Name: At_Siliques_Sub_P Parameter: Plant Line Value: WS
  misc_feature: MA Experiment 20000355 PARAMETER Experiment Name: At_Siliques_Sub_P Parameter: Tissue Value: Less Than 5mm Siliques vs. Whole Plant
  misc_feature: MA Experiment ID: 20000440 Result: Down-regulated in Transcription
  misc_feature: MA Experiment 20000440 PARAMETER Experiment Name: At_Closed-Flower__Sub_P Parameter: Tissue Value: Closed Flower vs. Whole Plant
aaaagattggggaagctgacctctgcctttcctcctccattaatcaaggaatataaatcagctttaaactcagtcctcttatggaagacaaaaaagcaaatatttattcgtaaatataacttcagaaccctttcaacaaaactctctctgttctttctccgtggagaagttaaagatgacgatgtcggagaactcaagaaacttggaagctggtttgctactgaggaagaaccaaaacgacatcaacgaatgtcgtatcactgctgttgtacttttcagtactttcgtttctgtttgtggctctttctgcttcggttgtgcggcaggttattcatcagttgctcaaacagggatcataaatgatttaggtctctctgttgcacaatactccatgtttggttcaatcatgacttttggaggaatgattggtgccatcttcagcgggaaagttgcagatctcatgggtcgaaaagggactatgtggtttgctcaaattttctgcatcttcggttgggttgcagtagcattagcaaaagactccatgtggcttgatattggaagactatccacaggatttgcagttggtttattaagctatgtgataccagtttacattgcagaaataacaccaaaacatgttcgaggagcgtttgtatttgctaatcagctgatgcagagttgtggattgtctttattctacgtcattggaaattttgttcattggcgtaacttggccttaatcggtctcattccatgtgcgttgcaagttgtgactttgttctttattccagagtcccctagactactgggaaaatggggacatgaaaaagaatgtagagcttcattgcaaagtcttcgcggagatgatgcagatatctctgaagaagccaacactatcaaagaaaccatgatcttgtttgatgaaggaccaaaatcgcgggttatggatttgtttcagagaagatatgctccatctgttgttattggtgtgggactaatgcttctacaacaactctctggaagctcaggacttatgtactatgtcggtagcgtatttgataaaggagggtttccaagcagcattggctcaatgattcttgcagtgatcatgataccaaaagctctattgggtctgattttggttgagaaaatgggacgaagaccacttctattggcctctaccggtggaatgtgctttttcagcttgctcctcagtttttccttctgctttcggtcatatggcatgcttgatgagctcactccgattttcacatgtatcggtgtagtgggtttcatctcttcatttgccgtaggcatgggaggcttaccatggatcatcatgtctgagatattcccaatgaatgttaaagtttctgctgggactctggttaccttagccaactggtcctttggttggattgttgctttcgcctacaacttcatgctagagtggaacgcatcaggaacgttcttgatcttctttactatatgtggtgcgggtatagtctttatttatgcgatggtacccgaaactaaaggaagaacattggaagatatacaagcttctcttacagattttctacaatgagatcaagtttgacttgtttaaagttattcattttttcttagattacaattggggggaggtttatagttttttgttgtaattgttacctcatttgatgtgcaattgagaaagagatcacttgaacataaggtttagatatctctctgtctcagtaaattagcccaatgtatgtatagtatagtcccagttttacacccaaaaaaaagaaatataaaattgaactttaagg

SEQ ID NO: 100836 - protein, 470 aa, Arabidopsis thaliana; identical to SEQ ID NO: 29899
  peptide (1)..(470): Ceres Seq. ID no. 13606175
  misc_feature (34)..(465): Pfam Name: Sugar (and other) transporter Pfam Description: Sugar (and other) transporter
  misc_feature (1)..(470): Homolog of NCBI NO: 18390957 NR Description: sugar transporter, putative [Arabidopsis >gi|14194109|gb|AAK56249.1|AF367260_1 At1g08920/F7G19_20 thaliana] >gi|22137064|gb|AAM91377.1| At1g08920/F7G19_20
  misc_feature (1)..(470): Homolog of NCBI NO: 30680865 NR Description: sugar transporter, putative [Arabidopsis thaliana]
  misc_feature (1)..(470): Homolog of NCBI NO: 6686827 NR Description: putative sugar transporter [Arabidopsis thaliana]
  misc_feature (3)..(438): Homolog of NCBI NO: 25407065 NR Description: hypothetical protein [imported] - Arabidopsis >gi|2342687|gb|AAB70413.1| Similar to Beta integral membrane (gb|U43629). EST gb|W43122 comes from this gene. [Arabidopsis
  misc_feature (16)..(470): Homolog of NCBI NO: 18390959 NR Description: ERD6 protein [Arabidopsis thaliana]
  misc_feature (1)..(465): Homolog of NCBI NO: 18421108 NR Description: sugar-porter family protein 2 [Arabidopsis
  misc_feature (1)..(466): Homolog of NCBI NO: 18397141 NR Description: sugar transporter, putative [Arabidopsis thaliana]
  misc_feature (1)..(465): Homolog of NCBI NO: 14585699 NR Description: sugar-porter family protein 1 [Arabidopsis
  misc_feature (10)..(466): Homolog of NCBI NO: 18397139 NR Description: sugar transporter, putative [Arabidopsis >gi|16604316|gb|AAL24164.1| AT3g05160/T12H1_13 [Arabidopsis >gi|27363392|gb|AAO11615.1| At3g05160/T12H1.12 [Arabidopsis
  misc_feature (1)..(465): Homolog of NCBI NO: 18421106 NR Description: sugar-porter family protein 1 [Arabidopsis

SEQ ID NO: 100837 - protein, 468 aa, Arabidopsis thaliana; identical to SEQ ID NO: 29900
  peptide (1)..(468): Ceres Seq. ID no. 13606176
  misc_feature (32)..(463): Pfam Name: Sugar (and other) transporter Pfam Description: Sugar (and other) transporter
  misc_feature (1)..(468): Homolog of NCBI NO: 18390957 NR Description: sugar transporter, putative [Arabidopsis >gi|14194109|gb|AAK56249.1|AF367260_1 At1g08920/F7G19_20 thaliana] >gi|22137064|gb|AAM91377.1| At1g08920/F7G19_20
  misc_feature (1)..(468): Homolog of NCBI NO: 30680865 NR Description: sugar transporter, putative [Arabidopsis thaliana]
  misc_feature (1)..(468): Homolog of NCBI NO: 6686827 NR Description: putative sugar transporter [Arabidopsis thaliana]
  misc_feature (1)..(436): Homolog of NCBI NO: 25407065 NR Description: hypothetical protein [imported] - Arabidopsis >gi|2342687|gb|AAB70413.1| Similar to Beta integral membrane (gb|U43629). EST gb|W43122 comes from this gene. [Arabidopsis
  misc_feature (14)..(468): Homolog of NCBI NO: 18390959 NR Description: ERD6 protein [Arabidopsis thaliana]
  misc_feature (1)..(463): Homolog of NCBI NO: 18421108 NR Description: sugar-porter family protein 2 [Arabidopsis
  misc_feature (1)..(464): Homolog of NCBI NO: 18397141 NR Description: sugar transporter, putative [Arabidopsis thaliana]
  misc_feature (1)..(463): Homolog of NCBI NO: 14585699 NR Description: sugar-porter family protein 1 [Arabidopsis
  misc_feature (8)..(464): Homolog of NCBI NO: 18397139 NR Description: sugar transporter, putative [Arabidopsis >gi|16604316|gb|AAL24164.1| AT3g05160/T12H1_13 [Arabidopsis >gi|27363392|gb|AAO11615.1| At3g05160/T12H1.12 [Arabidopsis
  misc_feature (1)..(463): Homolog of NCBI NO: 18421106 NR Description: sugar-porter family protein 1 [Arabidopsis

SEQ ID NO: 100838 - protein, 398 aa, Arabidopsis thaliana; identical to SEQ ID NO: 29901
  peptide (1)..(398): Ceres Seq. ID no. 13606177
  misc_feature (1)..(393): Pfam Name: Sugar (and other) transporter Pfam Description: Sugar (and other) transporter
  misc_feature (1)..(398): Homolog of NCBI NO: 18390957 NR Description: sugar transporter, putative [Arabidopsis >gi|14194109|gb|AAK56249.1|AF367260_1 At1g08920/F7G19_20 thaliana] >gi|22137064|gb|AAM91377.1| At1g08920/F7G19_20
  misc_feature (1)..(398): Homolog of NCBI NO: 30680865 NR Description: sugar transporter, putative [Arabidopsis thaliana]
  misc_feature (1)..(398): Homolog of NCBI NO: 6686827 NR Description: putative sugar transporter [Arabidopsis thaliana]
  misc_feature (1)..(366): Homolog of NCBI NO: 25407065 NR Description: hypothetical protein [imported] - Arabidopsis >gi|2342687|gb|AAB70413.1| Similar to Beta integral membrane (gb|U43629). EST gb|W43122 comes from this gene. [Arabidopsis
  misc_feature (1)..(398): Homolog of NCBI NO: 18390959 NR Description: ERD6 protein [Arabidopsis thaliana]
  misc_feature (1)..(393): Homolog of NCBI NO: 18421108 NR Description: sugar-porter family protein 2 [Arabidopsis
  misc_feature (1)..(394): Homolog of NCBI NO: 18397141 NR Description: sugar transporter, putative [Arabidopsis thaliana]
  misc_feature (1)..(393): Homolog of NCBI NO: 14585699 NR Description: sugar-porter family protein 1 [Arabidopsis
  misc_feature (1)..(394): Homolog of NCBI NO: 18397139 NR Description: sugar transporter, putative [Arabidopsis >gi|16604316|gb|AAL24164.1| AT3g05160/T12H1_13 [Arabidopsis >gi|27363392|gb|AAO11615.1| At3g05160/T12H1.12 [Arabidopsis
  misc_feature (1)..(393): Homolog of NCBI NO: 18421106 NR Description: sugar-porter family protein 1 [Arabidopsis

SEQ ID NO: 100839 - DNA, 1595 bp, Arabidopsis thaliana
  misc_feature (1)..(1595): Ceres Seq. ID no. 13606178
  misc_feature: MA Experiment ID: 20000180 Result: Down-regulated in Transcription
  misc_feature: MA Experiment 20000180 PARAMETER Experiment Name: At_Germinating_Seeds_P Parameter: Age (hr) Value: 24 vs. 0
  misc_feature: MA Experiment 20000180 PARAMETER Experiment Name: At_Germinating_Seeds_P Parameter: Tissue Value: Germinating Seeds
  misc_feature: MA Experiment ID: 20000227 Result: Up-regulated in Transcription
  misc_feature: MA Experiment 20000227 PARAMETER Experiment Name: At_Root-Tips-vs-Tops_P Parameter: Tissue Value: Root Tips vs. Root Tops
  misc_feature: MA Experiment ID: 20000439 Result: Down-regulated in Transcription
  misc_feature: MA Experiment 20000439 PARAMETER Experiment Name: At_Roots__P Parameter: Age (day) Value: 14 vs. 21
  misc_feature: MA Experiment 20000439 PARAMETER Experiment Name: At_Roots__P Parameter: Organism Value: A. thaliana
  misc_feature: MA Experiment 20000439 PARAMETER Experiment Name: At_Roots__P Parameter: Tissue Value: Roots vs. Whole Plant
  misc_feature: MA Experiment ID: 20001247 Result: Down-regulated in Transcription
  misc_feature: MA Experiment 20001247 PARAMETER Experiment Name: At_Far-red-induction_P Parameter: Age (day) Value: 7
  misc_feature: MA Experiment 20001247 PARAMETER Experiment Name: At_Far-red-induction_P Parameter: Light Value: Far-red vs. White
  misc_feature: MA Experiment 20001247 PARAMETER Experiment Name: At_Far-red-induction_P Parameter: Organism Value: A. thaliana
  misc_feature: MA Experiment 20001247 PARAMETER Experiment Name: At_Far-red-induction_P Parameter: Plant Line Value: Columbia
  misc_feature: MA Experiment 20001247 PARAMETER Experiment Name: At_Far-red-induction_P Parameter: Timepoint (hr) Value: 1
  misc_feature: MA Experiment 20001247 PARAMETER Experiment Name: At_Far-red-induction_P Parameter: Tissue Value: Whole Plant
  misc_feature: MA Experiment ID: 20001557 Result: Up-regulated in Transcription
  misc_feature: MA Experiment 20001557 PARAMETER Experiment Name: At_Drought_Soil_Dry_P Parameter: Age (day) Value: 27
  misc_feature: MA Experiment 20001557 PARAMETER Experiment Name: At_Drought_Soil_Dry_P Parameter: Organism Value: A. thaliana
  misc_feature: MA Experiment 20001557 PARAMETER Experiment Name: At_Drought_Soil_Dry_P Parameter: Plant Line Value: WS
  misc_feature: MA Experiment 20001557 PARAMETER Experiment Name: At_Drought_Soil_Dry_P Parameter: Post Timepoint (hr) Value: 3
  misc_feature: MA Experiment 20001557 PARAMETER Experiment Name: At_Drought_Soil_Dry_P Parameter: Post-Treatment Value: Re-Water vs. No Drought
  misc_feature: MA Experiment 20001557 PARAMETER Experiment Name: At_Drought_Soil_Dry_P Parameter: Timepoint (day) Value: 13
  misc_feature: MA Experiment 20001557 PARAMETER Experiment Name: At_Drought_Soil_Dry_P Parameter: Treatment Value: Drought vs. No Drought
atggaaatcgagcgtaagctgctgcgtcttctccacggccacaatactcgaacccgtttacccgaaatccacgcccatcttctgcgtcacttccttcatggttccaatctccttctcgcccacttcatctctatctgcggatccctcagcaactctgattacgccaaccgcgtcttctctcatatccaaaaccctaacgttctggtcttcaacgccatgatcaaatgctattcgcttgtcggtccgcctctagaatctttatctttcttctcttccatgaaaagccggggaatttgggctgacgagtatacttacgcgcctttgctcaaatcctgttcgtctctttctgatttgcgatttgggaaatgcgttcatggtgagcttataagaactgggttccaccgtcttgggaaaattaggattggggtggtggagctttatacttccggtgggagaatgggtgatgcacagaaagtgttcgacgaaatgtctgagagaaacgttgtcgtctggaatcttatgattcgcgggttctgtgactccggggacgttgaaagaggtcttcatttgttcaaacagatgagcgaaagaagcattgtgtcgtggaattcgatgatatctagcttgtctaaatgtggtagagatcgtgaggctttggagcttttctgcgaaatgattgatcaaggttttgaccctgatgaggcgactgtggttacagtcttgccaatttctgcatctctaggagtgttggataccggaaaatggattcattctaccgcagaatccagtggtttgtttaaagatttcatcaccgtgggaaacgctttggtagatttctactgcaaaagcggcgacttggaggcagcaacggctatatttagaaaaatgcagcgtagaaacgttgtttcatggaacacattgatatcgggatcagccgtaaacggaaagggagaatttgggatagacttgtttgatgctatgatagaggaagggaaagtagctccaaatgaagcgacatttttgggggttttggcatgttgctcatacacaggtcaggtggagagaggagaggaattgtttggtttgatgatggaaagattcaaacttgaggcgagaaccgagcattacggtgccatggtagatctaatgagtagaagtgggagaatcacagaggcgtttaagtttctaaaaaatatgcccgtaaacgcaaatgcggcaatgtgggggtcgctgctcagtgcttgtcgtagccacggagatgtaaagctagcagaagttgcagcaatggagttagtgaagattgagccagggaattcggggaattatgtgttgttatctaatttgtatgcagaggaagggagatggcaagatgtggagaaggtacgaacgttgatgaaaaagaaccgccttagaaagtctactggccaaagcaccatttgcgatgtttcagtctgagaagtagctggtttttgtcaatagaggccagacttattgctaaatacggtaatcaagttcatttgtaagcacatttgtatttttctggctcggtgaaaatgcggccaccaggtttgattagtttctaatgaattgattag

SEQ ID NO: 100840 - protein, 484 aa, Arabidopsis thaliana
  peptide (1)..(484): Ceres Seq. ID no. 13606179
  misc_feature (200)..(234): Pfam Name: PPR repeat Pfam Description: PPR repeat
  misc_feature (1)..(484): Homolog of NCBI NO: 25402522 NR Description: hypothetical protein [imported] - Arabidopsis
  misc_feature (81)..(484): Homolog of NCBI NO: 15217458 NR Description: pentatricopeptide (PPR) repeat-containing protein
  misc_feature (2)..(479): Homolog of NCBI NO: 15225375 NR Description: pentatricopeptide (PPR) repeat-containing protein
  misc_feature (11)..(479): Homolog of NCBI NO: 15241180 NR Description: pentatricopeptide (PPR) repeat-containing protein thaliana] >gi|10177829|dbj|BAB11258.1|
  misc_feature (8)..(482): Homolog of NCBI NO: 15229345 NR Description: pentatricopeptide (PPR) repeat-containing protein thaliana] >gi|6175175|gb|AAF04901.1|AC011437_16 hypothetical
  misc_feature (5)..(479): Homolog of NCBI NO: 9759241 NR Description: gene_id:MNC17.11~pir||T04732~strong similarity to
  misc_feature (5)..(479): Homolog of NCBI NO: 15237835 NR Description: pentatricopeptide (PPR) repeat-containing protein
  misc_feature (20)..(484): Homolog of NCBI NO: 15241651 NR Description: pentatricopeptide (PPR) repeat-containing protein thaliana] >gi|9759345|dbj|BAB10000.1|
  misc_feature (22)..(479): Homolog of NCBI NO: 9279687 NR Description: gb|AAC35225.1~gene_id:MWI23.6~strong similarity
  misc_feature (22)..(479): Homolog of NCBI NO: 15228829 NR Description: pentatricopeptide (PPR) repeat-containing protein
MEIERKLLRLLHGHNTRTRLPEIHAHLLRHFLHGSNLLLAHFISICGSLSNSDYANRVFSHIQNPNVLVFNAMIKCYSLVGPPLESLSFFSSMKSRGIWADEYTYAPLLKSCSSLSDLRFGKCVHGELIRTGFHRLGKIRIGVVELYTSGGRMGDAQKVFDEMSERNVVVWNLMIRGFCDSGDVERGLHLFKQMSERSIVSWNSMISSLSKCGRDREALELFCEMIDQGFDPDEATVVTVLPISASLGVLDTGKWIHSTAESSGLFKDFITVGNALVDFYCKSGDLEAATAIFRKMQRRNVVSWNTLISGSAVNGKGEFGIDLFDAMIEEGKVAPNEATFLGVLACCSYTGQVERGEELFGLMMERFKLEARTEHYGAMVDLMSRSGRITEAFKFLKNMPVNANAAMWGSLLSACRSHGDVKLAEVAAMELVKIEPGNSGNYVLLSNLYAEEGRWQDVEKVRTLMKKNRLRKSTGQSTICDVSV

SEQ ID NO: 100841 - protein, 412 aa, Arabidopsis thaliana
  peptide (1)..(412): Ceres Seq. ID no. 13606180
  misc_feature (128)..(162): Pfam Name: PPR repeat Pfam Description: PPR repeat
  misc_feature (1)..(412): Homolog of NCBI NO: 25402522 NR Description: hypothetical protein [imported] - Arabidopsis
  misc_feature (9)..(412): Homolog of NCBI NO: 15217458 NR Description: pentatricopeptide (PPR) repeat-containing protein
  misc_feature (1)..(407): Homolog of NCBI NO: 15225375 NR Description: pentatricopeptide (PPR) repeat-containing protein
  misc_feature (1)..(407): Homolog of NCBI NO: 15241180 NR Description: pentatricopeptide (PPR) repeat-containing protein thaliana] >gi|10177829|dbj|BAB11258.1|
  misc_feature (1)..(410): Homolog of NCBI NO: 15229345 NR Description: pentatricopeptide (PPR) repeat-containing protein thaliana] >gi|6175175|gb|AAF04901.1|AC011437_16 hypothetical
  misc_feature (1)..(407): Homolog of NCBI NO: 9759241 NR Description: gene_id:MNC17.11~pir||T04732~strong similarity to
  misc_feature (1)..(407): Homolog of NCBI NO: 15237835 NR Description: pentatricopeptide (PPR) repeat-containing protein
  misc_feature (1)..(412): Homolog of NCBI NO: 15241651 NR Description: pentatricopeptide (PPR) repeat-containing protein thaliana] >gi|9759345|dbj|BAB10000.1|
  misc_feature (1)..(407): Homolog of NCBI NO: 9279687 NR Description: gb|AAC35225.1~gene_id:MWI23.6~strong similarity
  misc_feature (1)..(407): Homolog of NCBI NO: 15228829 NR Description: pentatricopeptide (PPR) repeat-containing protein
MIKCYSLVGPPLESLSFFSSMKSRGIWADEYTYAPLLKSCSSLSDLRFGKCVHGELIRTGFHRLGKIRIGVVELYTSGGRMGDAQKVFDEMSERNVVVWNLMIRGFCDSGDVERGLHLFKQMSERSIVSWNSMISSLSKCGRDREALELFCEMIDQGFDPDEATVVTVLPISASLGVLDTGKWIHSTAESSGLFKDFITVGNALVDFYCKSGDLEAATAIFRKMQRRNVVSWNTLISGSAVNGKGEFGIDLFDAMIEEGKVAPNEATFLGVLACCSYTGQVERGEELFGLMMERFKLEARTEHYGAMVDLMSRSGRITEAFKFLKNMPVNANAAMWGSLLSACRSHGDVKLAEVAAMELVKIEPGNSGNYVLLSNLYAEEGRWQDVEKVRTLMKKNRLRKSTGQSTICDVSV

SEQ ID NO: 100842 - protein, 392 aa, Arabidopsis thaliana
  peptide (1)..(392): Ceres Seq. ID no. 13606181
  misc_feature (108)..(142): Pfam Name: PPR repeat Pfam Description: PPR repeat
  misc_feature (1)..(392): Homolog of NCBI NO: 25402522 NR Description: hypothetical protein [imported] - Arabidopsis
  misc_feature (1)..(392): Homolog of NCBI NO: 15217458 NR Description: pentatricopeptide (PPR) repeat-containing protein
  misc_feature (1)..(387): Homolog of NCBI NO: 15225375 NR Description: pentatricopeptide (PPR) repeat-containing protein
  misc_feature (1)..(387): Homolog of NCBI NO: 15241180 NR Description: pentatricopeptide (PPR) repeat-containing protein thaliana] >gi|10177829|dbj|BAB11258.1|
  misc_feature (1)..(390): Homolog of NCBI NO: 15229345 NR Description: pentatricopeptide (PPR) repeat-containing protein thaliana] >gi|6175175|gb|AAF04901.1|AC011437_16 hypothetical
  misc_feature (1)..(387): Homolog of NCBI NO: 9759241 NR Description: gene_id:MNC17.11~pir||T04732~strong similarity to
  misc_feature (1)..(387): Homolog of NCBI NO: 15237835 NR Description: pentatricopeptide (PPR) repeat-containing protein
  misc_feature (1)..(392): Homolog of NCBI NO: 15241651 NR Description: pentatricopeptide (PPR) repeat-containing protein thaliana] >gi|9759345|dbj|BAB10000.1|
  misc_feature (1)..(387): Homolog of NCBI NO: 9279687 NR Description: gb|AAC35225.1~gene_id:MWI23.6~strong similarity
  misc_feature (1)..(387): Homolog of NCBI NO: 15228829 NR Description: pentatricopeptide (PPR) repeat-containing protein
MKSRGIWADEYTYAPLLKSCSSLSDLRFGKCVHGELIRTGFHRLGKIRIGVVELYTSGGRMGDAQKVFDEMSERNVVVWNLMIRGFCDSGDVERGLHLFKQMSERSIVSWNSMISSLSKCGRDREALELFCEMIDQGFDPDEATVVTVLPISASLGVLDTGKWIHSTAESSGLFKDFITVGNALVDFYCKSGDLEAATAIFRKMQRRNVVSWNTLISGSAVNGKGEFGIDLFDAMIEEGKVAPNEATFLGVLACCSYTGQVERGEELFGLMMERFKLEARTEHYGAMVDLMSRSGRITEAFKFLKNMPVNANAAMWGSLLSACRSHGDVKLAEVAAMELVKIEPGNSGNYVLLSNLYAEEGRWQDVEKVRTLMKKNRLRKSTGQSTICDVSV

SEQ ID NO: 100843 - DNA, 1213 bp, Arabidopsis thaliana
  misc_feature (1)..(1213): Ceres Seq. ID no. 13606182
  misc_feature: MA Experiment ID: 108434 Result: Down-regulated in Transcription
  misc_feature: MA Experiment 108434 PARAMETER Experiment Name: At_Root_Tips_cDNA_P Parameter: Tissue Value: Root Tips
  misc_feature: MA Experiment ID: 108461 Result: Up-regulated in Transcription
  misc_feature: MA Experiment 108461 PARAMETER Experiment Name: At_Germinating_Seeds_cDNA_P Parameter: Age (day) Value: 1 vs. 0
  misc_feature: MA Experiment 108461 PARAMETER Experiment Name: At_Germinating_Seeds_cDNA_P Parameter: Tissue Value: Germinating Seeds
  misc_feature: MA Experiment ID: 108464 Result: Up-regulated in Transcription
  misc_feature: MA Experiment 108464 PARAMETER Experiment Name: At_Germinating_Seeds_cDNA_P Parameter: Age (day) Value: 4 vs. 0
  misc_feature: MA Experiment 108464 PARAMETER Experiment Name: At_Germinating_Seeds_cDNA_P Parameter: Tissue Value: Germinating Seeds
  misc_feature: MA Experiment ID: 108488 Result: Down-regulated in Transcription
  misc_feature: MA Experiment ID: 108561 Result: Up-regulated in Transcription
  misc_feature: MA Experiment 108561 PARAMETER Experiment Name: At_100uM_ABA_cDNA_P Parameter: Timepoint (hr) Value: 6
  misc_feature: MA Experiment 108561 PARAMETER Experiment Name: At_100uM_ABA_cDNA_P Parameter: Tissue Value: Aerial
  misc_feature: MA Experiment 108561 PARAMETER Experiment Name: At_100uM_ABA_cDNA_P Parameter: Treatment Value: 100uM ABA vs. No Treatment
  misc_feature: MA Experiment ID: 108572 Result: Up-regulated in Transcription
  misc_feature: MA Experiment 108572 PARAMETER Experiment Name: At_Drought_cDNA_P Parameter: Timepoint (hr) Value: 1
  misc_feature: MA Experiment 108572 PARAMETER Experiment Name: At_Drought_cDNA_P Parameter: Tissue Value: Aerial
  misc_feature: MA Experiment 108572 PARAMETER Experiment Name: At_Drought_cDNA_P Parameter: Treatment Value: Drought vs. No Drought
  misc_feature: MA Experiment ID: 108573 Result: Up-regulated in Transcription
  misc_feature: MA Experiment 108573 PARAMETER Experiment Name: At_Drought_cDNA_P Parameter: Timepoint (hr) Value: 6
  misc_feature: MA Experiment 108573 PARAMETER Experiment Name: At_Drought_cDNA_P Parameter: Tissue Value: Aerial
  misc_feature: MA Experiment 108573 PARAMETER Experiment Name: At_Drought_cDNA_P Parameter: Treatment Value: Drought vs. No Drought
  misc_feature: MA Experiment ID: 108576 Result: Down-regulated in Transcription
  misc_feature: MA Experiment 108576 PARAMETER Experiment Name: At_42deg_Heat_cDNA_P Parameter: Temperature (deg C) Value: 42 vs. 22
  misc_feature: MA Experiment 108576 PARAMETER Experiment Name: At_42deg_Heat_cDNA_P Parameter: Timepoint (hr) Value: 1
  misc_feature: MA Experiment 108576 PARAMETER Experiment Name: At_42deg_Heat_cDNA_P Parameter: Tissue Value: Aerial
  misc_feature: MA Experiment ID: 108595 Result: Up-regulated in Transcription
  misc_feature: MA Experiment 108595 PARAMETER Experiment Name: At_Ler-pi_Ovule_cDNA_P Parameter: Plant Line Value: null
  misc_feature: MA Experiment ID: 108668 Result: Down-regulated in Transcription
  misc_feature: MA Experiment 108668 PARAMETER Experiment Name: At_2mM_SA_cDNA_P Parameter: Plant Line Value: WS
  misc_feature: MA Experiment 108668 PARAMETER Experiment Name: At_2mM_SA_cDNA_P Parameter: Timepoint (hr) Value: 6
  misc_feature: MA Experiment 108668 PARAMETER Experiment Name: At_2mM_SA_cDNA_P Parameter: Treatment Value: 2mM SA vs. No Treatment
  misc_feature: MA Experiment ID: 20000070 Result: Up-regulated in Transcription
  misc_feature: MA Experiment 20000070 PARAMETER Experiment Name: At_100uM_ABA_Mutants_cDNA_P Parameter: Plant Line Value: CS24
  misc_feature: MA Experiment 20000070 PARAMETER Experiment Name: At_100uM_ABA_Mutants_cDNA_P Parameter: Timepoint (hr) Value: 6
  misc_feature: MA Experiment 20000070 PARAMETER Experiment Name: At_100uM_ABA_Mutants_cDNA_P Parameter: Tissue Value: Aerial
  misc_feature: MA Experiment 20000070 PARAMETER Experiment Name: At_100uM_ABA_Mutants_cDNA_P Parameter: Treatment Value: 100uM ABA vs. No Treatment
  misc_feature: MA Experiment ID: 20000071 Result: Up-regulated in Transcription
  misc_feature: MA Experiment 20000071 PARAMETER Experiment Name: At_100uM_ABA_Mutants_cDNA_P Parameter: Plant Line Value: CS8104
  misc_feature: MA Experiment 20000071 PARAMETER Experiment Name: At_100uM_ABA_Mutants_cDNA_P Parameter: Timepoint (hr) Value: 6
  misc_feature: MA Experiment 20000071 PARAMETER Experiment Name: At_100uM_ABA_Mutants_cDNA_P Parameter: Tissue Value: Aerial
  misc_feature: MA Experiment 20000071 PARAMETER Experiment Name: At_100uM_ABA_Mutants_cDNA_P Parameter: Treatment Value: 100uM ABA vs. No Treatment
  misc_feature: MA Experiment ID: 20000087 Result: Down-regulated in Transcription
  misc_feature: MA Experiment 20000087 PARAMETER Experiment Name: At_100uM_ABA_Mutants_cDNA_P Parameter: Plant Line Value: WS
  misc_feature: MA Experiment 20000087 PARAMETER Experiment Name: At_100uM_ABA_Mutants_cDNA_P Parameter: Timepoint (hr) Value: 6
  misc_feature: MA Experiment 20000087 PARAMETER Experiment Name: At_100uM_ABA_Mutants_cDNA_P Parameter: Tissue Value: Aerial
  misc_feature: MA Experiment 20000087 PARAMETER Experiment Name: At_100uM_ABA_Mutants_cDNA_P Parameter: Treatment Value: 100uM ABA vs. No Treatment
  misc_feature: MA Experiment ID: 20000088 Result: Up-regulated in Transcription
  misc_feature: MA Experiment 20000088 PARAMETER Experiment Name: At_100uM_ABA_Mutants_cDNA_P Parameter: Plant Line Value: Landsberg
  misc_feature: MA Experiment 20000088 PARAMETER Experiment Name: At_100uM_ABA_Mutants_cDNA_P Parameter: Timepoint (hr) Value: 6
  misc_feature: MA Experiment 20000088 PARAMETER Experiment Name: At_100uM_ABA_Mutants_cDNA_P Parameter: Tissue Value: Aerial
  misc_feature: MA Experiment 20000088 PARAMETER Experiment Name: At_100uM_ABA_Mutants_cDNA_P Parameter: Treatment Value: 100uM ABA vs. No Treatment
  misc_feature: MA Experiment ID: 20000090 Result: Down-regulated in Transcription
  misc_feature: MA Experiment ID: 20000111 Result: Down-regulated in Transcription
  misc_feature: MA Experiment 20000111 PARAMETER Experiment Name: At_42deg_Heat_cDNA_P Parameter: Temperature (deg C) Value: 42 vs. 22
  misc_feature: MA Experiment 20000111 PARAMETER Experiment Name: At_42deg_Heat_cDNA_P Parameter: Timepoint (hr) Value: 6
  misc_feature: MA Experiment 20000111 PARAMETER Experiment Name: At_42deg_Heat_cDNA_P Parameter: Tissue Value: Aerial
  misc_feature: MA Experiment ID: 20000112 Result: Up-regulated in Transcription
  misc_feature: MA Experiment 20000112 PARAMETER Experiment Name: At_42deg_Heat_cDNA_P Parameter: Temperature (deg C) Value: 42 vs. 22
  misc_feature: MA Experiment 20000112 PARAMETER Experiment Name: At_42deg_Heat_cDNA_P Parameter: Timepoint (hr) Value: 2
  misc_feature: MA Experiment 20000112 PARAMETER Experiment Name: At_42deg_Heat_cDNA_P Parameter: Tissue Value: Aerial
  misc_feature: MA Experiment ID: 20000113 Result: Down-regulated in Transcription
  misc_feature: MA Experiment 20000113 PARAMETER Experiment Name: At_42deg_Heat_cDNA_P Parameter: Temperature (deg C) Value: 42 vs. 22
  misc_feature: MA Experiment 20000113 PARAMETER Experiment Name: At_42deg_Heat_cDNA_P Parameter: Timepoint (hr) Value: 8
  misc_feature: MA Experiment 20000113 PARAMETER Experiment Name: At_42deg_Heat_cDNA_P Parameter: Tissue Value: Aerial
  misc_feature: MA Experiment ID: 20000144 Result: Down-regulated in Transcription
  misc_feature: MA Experiment 20000144 PARAMETER Experiment Name: At_42deg_Heat_cDNA_P Parameter: Temperature (deg C) Value: 42 vs. 22
  misc_feature: MA Experiment 20000144 PARAMETER Experiment Name: At_42deg_Heat_cDNA_P Parameter: Timepoint (hr) Value: 1
  misc_feature: MA Experiment 20000144 PARAMETER Experiment Name: At_42deg_Heat_cDNA_P Parameter: Tissue Value: Aerial
  misc_feature: MA Experiment ID: 20000180 Result: Up-regulated in Transcription
  misc_feature: MA Experiment 20000180 PARAMETER Experiment Name: At_Germinating_Seeds_P Parameter: Age (hr) Value: 24 vs. 0
  misc_feature: MA Experiment 20000180 PARAMETER Experiment Name: At_Germinating_Seeds_P Parameter: Tissue Value: Germinating Seeds
  misc_feature: MA Experiment ID: 20000185 Result: Down-regulated in Transcription
  misc_feature: MA Experiment 20000185 PARAMETER Experiment Name: At_Roots__P Parameter: Age (day) Value: 7 vs. 21
  misc_feature: MA Experiment 20000185 PARAMETER Experiment Name: At_Roots__P Parameter: Organism Value: A. thaliana
  misc_feature: MA Experiment 20000185 PARAMETER Experiment Name: At_Roots__P Parameter: Tissue Value: Roots vs. Whole Plant
  misc_feature: MA Experiment ID: 20000234 Result: Down-regulated in Transcription
  misc_feature: MA Experiment 20000234 PARAMETER Experiment Name: At_Siliques_P Parameter: Age (day) Value: 21
  misc_feature: MA Experiment 20000234 PARAMETER Experiment Name: At_Siliques_P Parameter: Organism Value: A. thaliana
  misc_feature: MA Experiment 20000234 PARAMETER Experiment Name: At_Siliques_P Parameter: Plant Line Value: WS
  misc_feature: MA Experiment 20000234 PARAMETER Experiment Name: At_Siliques_P Parameter: Tissue Value: Less Than 5mm Siliques vs. Whole Plant
  misc_feature: MA Experiment ID: 20000235 Result: Down-regulated in Transcription
  misc_feature: MA Experiment 20000235 PARAMETER Experiment Name: At_Siliques_P Parameter: Age (day) Value: 21
  misc_feature: MA Experiment 20000235 PARAMETER Experiment Name: At_Siliques_P Parameter: Organism Value: A. thaliana
  misc_feature: MA Experiment 20000235 PARAMETER Experiment Name: At_Siliques_P Parameter: Plant Line Value: WS
  misc_feature: MA Experiment 20000235 PARAMETER Experiment Name: At_Siliques_P Parameter: Tissue Value: 5-10mm Siliques vs. Whole Plant
  misc_feature: MA Experiment ID: 20000527 Result: Down-regulated in Transcription
  misc_feature: MA Experiment 20000527 PARAMETER Experiment Name: At_10percent_PEG_P Parameter: Age (day) Value: 20
  misc_feature: MA Experiment 20000527 PARAMETER Experiment Name: At_10percent_PEG_P Parameter: Organism Value: A. thaliana
  misc_feature: MA Experiment 20000527 PARAMETER Experiment Name: At_10percent_PEG_P Parameter: Plant Line Value: WS
  misc_feature: MA Experiment 20000527 PARAMETER Experiment Name: At_10percent_PEG_P Parameter: Timepoint (day) Value: 20
  misc_feature: MA Experiment 20000527 PARAMETER Experiment Name: At_10percent_PEG_P Parameter: Tissue Value: Whole Plant
  misc_feature: MA Experiment 20000527 PARAMETER Experiment Name: At_10percent_PEG_P Parameter: Treatment Value: 10percent PEG vs. No Treatment
  misc_feature: MA Experiment ID: 20001560 Result: Down-regulated in Transcription
  misc_feature: MA Experiment 20001560 PARAMETER Experiment Name: At_Drought_Soil_Dry_P Parameter: Age (day) Value: 28
  misc_feature: MA Experiment 20001560 PARAMETER Experiment Name: At_Drought_Soil_Dry_P Parameter: Organism Value: A. thaliana
  misc_feature: MA Experiment 20001560 PARAMETER Experiment Name: At_Drought_Soil_Dry_P Parameter: Plant Line Value: WS
  misc_feature: MA Experiment 20001560 PARAMETER Experiment Name: At_Drought_Soil_Dry_P Parameter: Post Timepoint (hr) Value: None
  misc_feature: MA Experiment 20001560 PARAMETER Experiment Name: At_Drought_Soil_Dry_P Parameter: Post-Treatment Value: None
  misc_feature: MA Experiment 20001560 PARAMETER Experiment Name: At_Drought_Soil_Dry_P Parameter: Timepoint (day) Value: 14
  misc_feature: MA Experiment 20001560 PARAMETER Experiment Name: At_Drought_Soil_Dry_P Parameter: Treatment Value: Drought vs. No Drought
acaccacccgagaacacacgattattctccaaagagaaagagaaaaatcaataacctcatagtgtcgacatgggttgccaagacgaacaattggtgcaaacaatatgcgatctctacgaaaagatctcaaagcttgagagtctaaaaccatccgaagatgtcaacattctcttcaagcagctcgtttccacatgcataccaccaaaccctaacatcgatgtcaccaagatgtgtgacagagtccaagagattcgacttaatctcatcaagatttgtggtctagccgaaggtcacttagaaaaccatttctcttcgatcttgacctcttaccaagacaacccacttcatcatttaaacattttcccttattacaacaactatttgaaactcggaaagctcgagttcgacctcctcgaacaaaacctaaatggctttgtcccaaagagtgtggctttcattggatctggtcctcttcctctcacttccatcgttcttgcttcattccatctcaaagacacaatctttcacaactttgacatcgacccatcagcgaactcactcgcttctcttctggtttcctctgatccagacatctctcaacgcatgttcttccacaccgttgatataatggacgtgacagagagcttaaagagctttgatgtcgtgtttctagctgctcttgttggaatgaacaaagaggagaaagttaaagtgatcgagcatctgcagaaacacatggctcctggtgctgtgctcatgcttaggagtgctcatggtccgagagcgtttctttatccgatcgttgagccgtgtgatcttcaggggttcgaggttttgtctatttatcacccaacagatgatgttatcaactccgtggtgatctctaaaaagcatccagttgtttcaattgggaatgttggtggtcctaattcatgcttgctcaagccttgcaactgttccaagacccacgcgaaaatgaacaagaacatgatgatcgaggagttcggagctagggaggaacagttgtcttaaggaggacgtttcttgtttcctaattctctatcttatggaagcttcctaattatgatttgtgtctttgtgttgtgtgttggtgtcttttctcaattgttctttgtttgttttatttttctttctatattcctagaaatggatttgtttcgcgcgacactgttgggctgaaacagaacacgat

SEQ ID NO: 100844 - protein, 320 aa, Arabidopsis thaliana; identical to SEQ ID NO: 23804
  peptide (1)..(320): Ceres Seq. ID no. 13606183
  misc_feature (3)..(280): Pfam Name: Nicotianamine synthase protein Pfam Description: Nicotianamine synthase protein
  misc_feature (1)..(320): Homolog of NCBI NO: 15217462 NR Description: nicotianamine synthase, putative [Arabidopsis
  misc_feature (1)..(320): Homolog of NCBI NO: 40782199 NR Description: putative nicotianamine synthase [Arabidopsis
  misc_feature (1)..(320): Homolog of NCBI NO: 27528464 NR Description: nicotianamine synthase [Thlaspi caerulescens]
  misc_feature (1)..(320): Homolog of NCBI NO: 15223535 NR Description: nicotianamine synthase, putative [Arabidopsis
  misc_feature (1)..(316): Homolog of NCBI NO: 15238376 NR Description: nicotianamine synthase, putative [Arabidopsis
  misc_feature (1)..(316): Homolog of NCBI NO: 4220612 NR Description: nicotianamine synthase [Arabidopsis thaliana]
  misc_feature (1)..(316): Homolog of NCBI NO: 4220614 NR Description: nicotianamine synathase [Arabidopsis thaliana]
  misc_feature (1)..(316): Homolog of NCBI NO: 15241120 NR Description: nicotianamine synthase, putative [Arabidopsis
  misc_feature (1)..(316): Homolog of NCBI NO: 27151627 NR Description: Nicotianamine synthase
  misc_feature (8)..(301): Homolog of NCBI NO: 19911064 NR Description: ZmNAS2 [Zea mays]

SEQ ID NO: 100845 - protein, 267 aa, Arabidopsis thaliana; identical to SEQ ID NO: 23805
  peptide (1)..(267): Ceres Seq. ID no. 13606184
  misc_feature (1)..(227): Pfam Name: Nicotianamine synthase protein Pfam Description: Nicotianamine synthase protein
  misc_feature (1)..(267): Homolog of NCBI NO: 15217462 NR Description: nicotianamine synthase, putative [Arabidopsis
  misc_feature (1)..(267): Homolog of NCBI NO: 40782199 NR Description: putative nicotianamine synthase [Arabidopsis
  misc_feature (1)..(267): Homolog of NCBI NO: 27528464 NR Description: nicotianamine synthase [Thlaspi caerulescens]
  misc_feature (1)..(267): Homolog of NCBI NO: 15223535 NR Description: nicotianamine synthase, putative [Arabidopsis
  misc_feature (1)..(263): Homolog of NCBI NO: 15238376 NR Description: nicotianamine synthase, putative [Arabidopsis
  misc_feature (1)..(263): Homolog of NCBI NO: 4220612 NR Description: nicotianamine synthase [Arabidopsis thaliana]
  misc_feature (1)..(263): Homolog of NCBI NO: 4220614 NR Description: nicotianamine synathase [Arabidopsis thaliana]
  misc_feature (1)..(263): Homolog of NCBI NO: 15241120 NR Description: nicotianamine synthase, putative [Arabidopsis
  misc_feature (1)..(263): Homolog of NCBI NO: 27151627 NR Description: Nicotianamine synthase
  misc_feature (1)..(248): Homolog of NCBI NO: 19911064 NR Description: ZmNAS2 [Zea mays]

SEQ ID NO: 100846 - DNA, 951 bp, Arabidopsis thaliana
  misc_feature (1)..(951): Ceres Seq. ID no. 13606185
  misc_feature: MA Experiment ID: 108434 Result: Up-regulated in Transcription
  misc_feature: MA Experiment 108434 PARAMETER Experiment Name: At_Root_Tips_cDNA_P Parameter: Tissue Value: Root Tips
  misc_feature: MA Experiment ID: 108464 Result: Up-regulated in Transcription
  misc_feature: MA Experiment 108464 PARAMETER Experiment Name: At_Germinating_Seeds_cDNA_P Parameter: Age (day) Value: 4 vs. 0
  misc_feature: MA Experiment 108464 PARAMETER Experiment Name: At_Germinating_Seeds_cDNA_P Parameter: Tissue Value: Germinating Seeds
  misc_feature: MA Experiment ID: 108488 Result: Down-regulated in Transcription
  misc_feature: MA Experiment ID: 108577 Result: Down-regulated in Transcription
  misc_feature: MA Experiment 108577 PARAMETER Experiment Name: At_42deg_Heat_cDNA_P Parameter: Temperature (deg C) Value: 42 vs. 22
  misc_feature: MA Experiment 108577 PARAMETER Experiment Name: At_42deg_Heat_cDNA_P Parameter: Timepoint (hr) Value: 6
  misc_feature: MA Experiment 108577 PARAMETER Experiment Name: At_42deg_Heat_cDNA_P Parameter: Tissue Value: Aerial
  misc_feature: MA Experiment ID: 108579 Result: Down-regulated in Transcription
  misc_feature: MA Experiment 108579 PARAMETER Experiment Name: At_4deg_Cold_cDNA_P Parameter: Temperature (deg C) Value: 4 vs. 22
  misc_feature: MA Experiment 108579 PARAMETER Experiment Name: At_4deg_Cold_cDNA_P Parameter: Timepoint (hr) Value: 6
  misc_feature: MA Experiment 108579 PARAMETER Experiment Name: At_4deg_Cold_cDNA_P Parameter: Tissue Value: Aerial
  misc_feature: MA Experiment ID: 108605 Result: Down-regulated in Transcription
  misc_feature: MA Experiment 108605 PARAMETER Experiment Name: At_100uM_ABA_cDNA_P Parameter: Timepoint (hr) Value: 6
  misc_feature: MA Experiment 108605 PARAMETER Experiment Name: At_100uM_ABA_cDNA_P Parameter: Tissue Value: Aerial
  misc_feature: MA Experiment 108605 PARAMETER Experiment Name: At_100uM_ABA_cDNA_P Parameter: Treatment Value: 100uM ABA vs. No Treatment
  misc_feature: MA Experiment ID: 108609 Result: Down-regulated in Transcription
  misc_feature: MA Experiment 108609 PARAMETER Experiment Name: At_100uM_ABA_cDNA_P Parameter: Timepoint (hr) Value: 24
  misc_feature: MA Experiment 108609 PARAMETER Experiment Name: At_100uM_ABA_cDNA_P Parameter: Tissue Value: Aerial
  misc_feature: MA Experiment 108609 PARAMETER Experiment Name: At_100uM_ABA_cDNA_P Parameter: Treatment Value: 100uM ABA vs. No Treatment
  misc_feature: MA Experiment ID: 20000069 Result: Down-regulated in Transcription
  misc_feature: MA Experiment 20000069 PARAMETER Experiment Name: At_100uM_ABA_Mutants_cDNA_P Parameter: Plant Line Value: CS23
  misc_feature: MA Experiment 20000069 PARAMETER Experiment Name: At_100uM_ABA_Mutants_cDNA_P Parameter: Timepoint (hr) Value: 6
  misc_feature: MA Experiment 20000069 PARAMETER Experiment Name: At_100uM_ABA_Mutants_cDNA_P Parameter: Tissue Value: Aerial
  misc_feature: MA Experiment 20000069 PARAMETER Experiment Name: At_100uM_ABA_Mutants_cDNA_P Parameter: Treatment Value: 100uM ABA vs. No Treatment
  misc_feature: MA Experiment ID: 20000070 Result: Down-regulated in Transcription
  misc_feature: MA Experiment 20000070 PARAMETER Experiment Name: At_100uM_ABA_Mutants_cDNA_P Parameter: Plant Line Value: CS24
  misc_feature: MA Experiment 20000070 PARAMETER Experiment Name: At_100uM_ABA_Mutants_cDNA_P Parameter: Timepoint (hr) Value: 6
  misc_feature: MA Experiment 20000070 PARAMETER Experiment Name: At_100uM_ABA_Mutants_cDNA_P Parameter: Tissue Value: Aerial
  misc_feature: MA Experiment 20000070 PARAMETER Experiment Name: At_100uM_ABA_Mutants_cDNA_P Parameter: Treatment Value: 100uM ABA vs. No Treatment
  misc_feature: MA Experiment ID: 20000071 Result: Down-regulated in Transcription
  misc_feature: MA Experiment 20000071 PARAMETER Experiment Name: At_100uM_ABA_Mutants_cDNA_P Parameter: Plant Line Value: CS8104
  misc_feature: MA Experiment 20000071 PARAMETER Experiment Name: At_100uM_ABA_Mutants_cDNA_P Parameter: Timepoint (hr) Value: 6
  misc_feature: MA Experiment 20000071 PARAMETER Experiment Name: At_100uM_ABA_Mutants_cDNA_P Parameter: Tissue Value: Aerial
  misc_feature: MA Experiment 20000071 PARAMETER Experiment Name: At_100uM_ABA_Mutants_cDNA_P Parameter: Treatment Value: 100uM ABA vs. No Treatment
  misc_feature: MA Experiment ID: 20000088 Result: Down-regulated in Transcription
  misc_feature: MA Experiment 20000088 PARAMETER Experiment Name: At_100uM_ABA_Mutants_cDNA_P Parameter: Plant Line Value: Landsberg
  misc_feature: MA Experiment 20000088 PARAMETER Experiment Name: At_100uM_ABA_Mutants_cDNA_P Parameter: Timepoint (hr) Value: 6
  misc_feature: MA Experiment 20000088 PARAMETER Experiment Name: At_100uM_ABA_Mutants_cDNA_P Parameter: Tissue Value: Aerial
  misc_feature: MA Experiment 20000088 PARAMETER Experiment Name: At_100uM_ABA_Mutants_cDNA_P Parameter: Treatment Value: 100uM ABA vs. No Treatment
  misc_feature: MA Experiment ID: 20000093 Result: Down-regulated in Transcription
  misc_feature: MA Experiment 20000093 PARAMETER Experiment Name: At_42deg_Heat_cDNA_P Parameter: Temperature (deg C) Value: 42 vs. 22
  misc_feature: MA Experiment 20000093 PARAMETER Experiment Name: At_42deg_Heat_cDNA_P Parameter: Timepoint (hr) Value: 0.5
  misc_feature: MA Experiment 20000093 PARAMETER Experiment Name: At_42deg_Heat_cDNA_P Parameter: Tissue Value: Aerial
  misc_feature: MA Experiment ID: 20000111 Result: Down-regulated in Transcription
  misc_feature: MA Experiment 20000111 PARAMETER Experiment Name: At_42deg_Heat_cDNA_P Parameter: Temperature (deg C) Value: 42 vs. 22
  misc_feature: MA Experiment 20000111 PARAMETER Experiment Name: At_42deg_Heat_cDNA_P Parameter: Timepoint (hr) Value: 6
  misc_feature: MA Experiment 20000111 PARAMETER Experiment Name: At_42deg_Heat_cDNA_P Parameter: Tissue Value: Aerial
  misc_feature: MA Experiment ID: 20000112 Result: Down-regulated in Transcription
  misc_feature: MA Experiment 20000112 PARAMETER Experiment Name: At_42deg_Heat_cDNA_P Parameter: Temperature (deg C) Value: 42 vs. 22
  misc_feature: MA Experiment 20000112 PARAMETER Experiment Name: At_42deg_Heat_cDNA_P Parameter: Timepoint (hr) Value: 2
  misc_feature: MA Experiment 20000112 PARAMETER Experiment Name: At_42deg_Heat_cDNA_P Parameter: Tissue Value: Aerial
  misc_feature: MA Experiment ID: 20000117 Result: Down-regulated in Transcription
  misc_feature: MA Experiment 20000117 PARAMETER Experiment Name: At_100uM_ABA_Mutants_cDNA_P Parameter: Plant Line Value: Columbia
  misc_feature: MA Experiment 20000117 PARAMETER Experiment Name: At_100uM_ABA_Mutants_cDNA_P Parameter: Timepoint (hr) Value: 6
  misc_feature: MA Experiment 20000117 PARAMETER Experiment Name: At_100uM_ABA_Mutants_cDNA_P Parameter: Tissue Value: Aerial
  misc_feature: MA Experiment 20000117 PARAMETER Experiment Name: At_100uM_ABA_Mutants_cDNA_P Parameter: Treatment Value: 100uM ABA vs. No Treatment
  misc_feature: MA Experiment ID: 20000144 Result: Down-regulated in Transcription
  misc_feature: MA Experiment 20000144 PARAMETER Experiment Name: At_42deg_Heat_cDNA_P Parameter: Temperature (deg C) Value: 42 vs. 22
  misc_feature: MA Experiment 20000144 PARAMETER Experiment Name: At_42deg_Heat_cDNA_P Parameter: Timepoint (hr) Value: 1
  misc_feature: MA Experiment 20000144 PARAMETER Experiment Name: At_42deg_Heat_cDNA_P Parameter: Tissue Value: Aerial
  misc_feature: MA Experiment ID: 20000171 Result: Down-regulated in Transcription
  misc_feature: MA Experiment 20000171 PARAMETER Experiment Name: At_42deg_Heat_P Parameter: Age (day) Value: 14
  misc_feature: MA Experiment 20000171 PARAMETER Experiment Name: At_42deg_Heat_P Parameter: Organism Value: A. thaliana
  misc_feature: MA Experiment 20000171 PARAMETER Experiment Name: At_42deg_Heat_P Parameter: Plant Line Value: WS
  misc_feature: MA Experiment 20000171 PARAMETER Experiment Name: At_42deg_Heat_P Parameter: Temperature (deg C) Value: 42 vs. 22
  misc_feature: MA Experiment 20000171 PARAMETER Experiment Name: At_42deg_Heat_P Parameter: Timepoint (hr) Value: 1
  misc_feature: MA Experiment 20000171 PARAMETER Experiment Name: At_42deg_Heat_P Parameter: Tissue Value: Aerial
  misc_feature: MA Experiment ID: 20000173 Result: Down-regulated in Transcription
  misc_feature: MA Experiment 20000173 PARAMETER Experiment Name: At_42deg_Heat_P Parameter: Age (day) Value: 14
  misc_feature: MA Experiment 20000173 PARAMETER Experiment Name: At_42deg_Heat_P Parameter: Organism Value: A. thaliana
  misc_feature: MA Experiment 20000173 PARAMETER Experiment Name: At_42deg_Heat_P Parameter: Plant Line Value: WS
  misc_feature: MA Experiment 20000173 PARAMETER Experiment Name: At_42deg_Heat_P Parameter: Temperature (deg C) Value: 42 vs. 22
  misc_feature: MA Experiment 20000173 PARAMETER Experiment Name: At_42deg_Heat_P Parameter: Timepoint (hr) Value: 6
  misc_feature: MA Experiment 20000173 PARAMETER Experiment Name: At_42deg_Heat_P Parameter: Tissue Value: Aerial
  misc_feature: MA Experiment ID: 20000184 Result: Up-regulated in Transcription
  misc_feature: MA Experiment 20000184 PARAMETER Experiment Name: At_Shoots__P Parameter: Age (day) Value: 7
  misc_feature: MA Experiment 20000184 PARAMETER Experiment Name: At_Shoots__P Parameter: Tissue Value: Shoots vs. Whole Plant
  misc_feature: MA Experiment ID: 20000224 Result: Down-regulated in Transcription
  misc_feature: MA Experiment ID: 20000453 Result: Down-regulated in Transcription
  misc_feature: MA Experiment 20000453 PARAMETER Experiment Name: At_100uM_ABA_P Parameter: Age (day) Value: 15
  misc_feature: MA Experiment 20000453 PARAMETER Experiment Name: At_100uM_ABA_P Parameter: Organism Value: A. thaliana
  misc_feature: MA Experiment 20000453 PARAMETER Experiment Name: At_100uM_ABA_P Parameter: Plant Line Value: WS
  misc_feature: MA Experiment 20000453 PARAMETER Experiment Name: At_100uM_ABA_P Parameter: Timepoint (hr) Value: 24
  misc_feature: MA Experiment 20000453 PARAMETER Experiment Name: At_100uM_ABA_P Parameter: Tissue Value: Aerial
  misc_feature: MA Experiment 20000453 PARAMETER Experiment Name: At_100uM_ABA_P Parameter: Treatment Value: 100uM ABA vs. No Treatment
  misc_feature: MA Experiment ID: 20001248 Result: Up-regulated in Transcription
  misc_feature: MA Experiment 20001248 PARAMETER Experiment Name: At_Far-red-induction_P Parameter: Age (day) Value: 7
  misc_feature: MA Experiment 20001248 PARAMETER Experiment Name: At_Far-red-induction_P Parameter: Light Value: Far-red vs. White
  misc_feature: MA Experiment 20001248 PARAMETER Experiment Name: At_Far-red-induction_P Parameter: Organism Value: A. thaliana
  misc_feature: MA Experiment 20001248 PARAMETER Experiment Name: At_Far-red-induction_P Parameter: Plant Line Value: Columbia
  misc_feature: MA Experiment 20001248 PARAMETER Experiment Name: At_Far-red-induction_P Parameter: Timepoint (hr) Value: 4
  misc_feature: MA Experiment 20001248 PARAMETER Experiment Name: At_Far-red-induction_P Parameter: Tissue Value: Whole Plant
  misc_feature: MA Experiment ID: 20001450 Result: Up-regulated in Transcription
  misc_feature: MA Experiment 20001450 PARAMETER Experiment Name: At_Far-red-induction_P Parameter: Age (day) Value: 7
  misc_feature: MA Experiment 20001450 PARAMETER Experiment Name: At_Far-red-induction_P Parameter: Light Value: Far-red vs. White
  misc_feature: MA Experiment 20001450 PARAMETER Experiment Name: At_Far-red-induction_P Parameter: Organism Value: A. thaliana
  misc_feature: MA Experiment 20001450 PARAMETER Experiment Name: At_Far-red-induction_P Parameter: Plant Line Value: Columbia
  misc_feature: MA Experiment 20001450 PARAMETER Experiment Name: At_Far-red-induction_P Parameter: Timepoint (hr) Value: 8
  misc_feature: MA Experiment 20001450 PARAMETER Experiment Name: At_Far-red-induction_P Parameter: Tissue Value: Whole Plant
  misc_feature: MA Experiment ID: 20001451 Result: Up-regulated in Transcription
  misc_feature: MA Experiment 20001451 PARAMETER Experiment Name: At_Far-red-induction_P Parameter: Age (day) Value: 7
  misc_feature: MA Experiment 20001451 PARAMETER Experiment Name: At_Far-red-induction_P Parameter: Light Value: Far-red vs. White
  misc_feature: MA Experiment 20001451 PARAMETER Experiment Name: At_Far-red-induction_P Parameter: Organism Value: A. thaliana
  misc_feature: MA Experiment 20001451 PARAMETER Experiment Name: At_Far-red-induction_P Parameter: Plant Line Value: Columbia
  misc_feature: MA Experiment 20001451 PARAMETER Experiment Name: At_Far-red-induction_P Parameter: Timepoint (hr) Value: 24
  misc_feature: MA Experiment 20001451 PARAMETER Experiment Name: At_Far-red-induction_P Parameter: Tissue Value: Whole Plant
  misc_feature: MA Experiment ID: 20001554 Result: Down-regulated in Transcription
  misc_feature: MA Experiment 20001554 PARAMETER Experiment Name: At_Drought_Soil_Dry_P Parameter: Age (day) Value: 21
  misc_feature: MA Experiment 20001554 PARAMETER Experiment Name: At_Drought_Soil_Dry_P Parameter: Organism Value: A. thaliana
  misc_feature: MA Experiment 20001554 PARAMETER Experiment Name: At_Drought_Soil_Dry_P Parameter: Plant Line Value: WS
  misc_feature: MA Experiment 20001554 PARAMETER Experiment Name: At_Drought_Soil_Dry_P Parameter: Post Timepoint (hr) Value: None
  misc_feature: MA Experiment 20001554 PARAMETER Experiment Name: At_Drought_Soil_Dry_P Parameter: Post-Treatment Value: None
  misc_feature: MA Experiment 20001554 PARAMETER Experiment Name: At_Drought_Soil_Dry_P Parameter: Timepoint (day) Value: 7
  misc_feature: MA Experiment 20001554 PARAMETER Experiment Name: At_Drought_Soil_Dry_P Parameter: Treatment Value: Drought vs. No Drought
  misc_feature: MA Experiment ID: 20001556 Result: Down-regulated in Transcription
  misc_feature: MA Experiment 20001556 PARAMETER Experiment Name: At_Drought_Soil_Dry_P Parameter: Age (day) Value: 26
  misc_feature: MA Experiment 20001556 PARAMETER Experiment Name: At_Drought_Soil_Dry_P Parameter: Organism Value: A. thaliana
  misc_feature: MA Experiment 20001556 PARAMETER Experiment Name: At_Drought_Soil_Dry_P Parameter: Plant Line Value: WS
  misc_feature: MA Experiment 20001556 PARAMETER Experiment Name: At_Drought_Soil_Dry_P Parameter: Post Timepoint (hr) Value: None
  misc_feature: MA Experiment 20001556 PARAMETER Experiment Name: At_Drought_Soil_Dry_P Parameter: Post-Treatment Value: None
  misc_feature: MA Experiment 20001556 PARAMETER Experiment Name: At_Drought_Soil_Dry_P Parameter: Timepoint (day) Value: 12
  misc_feature: MA Experiment 20001556 PARAMETER Experiment Name: At_Drought_Soil_Dry_P Parameter: Treatment Value: Drought vs. No Drought
  misc_feature: MA Experiment ID: 20001559 Result: Down-regulated in Transcription
  misc_feature: MA Experiment 20001559 PARAMETER Experiment Name: At_Drought_Soil_Dry_P Parameter: Age (day) Value: 28
  misc_feature: MA Experiment 20001559 PARAMETER Experiment Name: At_Drought_Soil_Dry_P Parameter: Organism Value: A. thaliana
  misc_feature: MA Experiment 20001559 PARAMETER Experiment Name: At_Drought_Soil_Dry_P Parameter: Plant Line Value: WS
  misc_feature: MA Experiment 20001559 PARAMETER Experiment Name: At_Drought_Soil_Dry_P Parameter: Post Timepoint (hr) Value: 29
  misc_feature: MA Experiment 20001559 PARAMETER Experiment Name: At_Drought_Soil_Dry_P Parameter: Post-Treatment Value: Re-Water vs. No Drought
  misc_feature: MA Experiment 20001559 PARAMETER Experiment Name: At_Drought_Soil_Dry_P Parameter: Timepoint (day) Value: 14
  misc_feature: MA Experiment 20001559 PARAMETER Experiment Name: At_Drought_Soil_Dry_P Parameter: Treatment Value: Drought vs. No Drought
gagagagagagagaaagagagactctcagaatctgaagaagaagaagagattgttgtttttgccttttatcatcggtttctttgaatctctggttttaaatcggatttaatggtggagtctctgttcccgagcatcgaaaacacaggtgaatcgtctcgaagaaagaagccgaggatatcagagacggcggaggcggagatagaggcacgacgtgtcaacgaagaaagcttgaagagatggaaaacgaatcgtgtgcaacagatctacgcttgtaagctcgtcgaagctttacgccgagttcgtcagagatcttccaccaccagcaacaacgagaccgataaactcgtctccggcgcggcgagggagatacgtgatacggcggatcgagttctagctgcgtccgctcgtggtacgactcggtggagcagagcgattttagcgagtcgcgtccgagcgaagctgaagaaacatagaaaggcgaaaaagtcaacgggaaattgtaaatcgagaaaaggtctcacggagacgaatcggattaagttaccggcggttgagagaaaactgaagattcttggccgtttggttcctggttgccggaaagtctctgtaccgaatcttttagatgaagcgaccgattacatcgcagcgttagagatgcaggttcgagccatggaggctctcgccgaacttttaaccgcagccgcaccacggacgacgttgaccggaacttaacggcggcagttagtttgtcagttgttaattagcttttcttttacctttttacccctttattttggcttcaagtgttttttttttctcgtcgacgcgattttaatttattaaattcatgtattttatttgtatacatcatcacttctttttttttgtatccattttgatctttctttgttttttcgttagataatcaaagttatctaaacaataacaac

SEQ ID NO: 100847 - protein, 207 aa, Arabidopsis thaliana
  peptide (1)..(207): Ceres Seq. ID no. 13606186
  misc_feature (1)..(207): Homolog of NCBI NO: 18390998 NR Description: bHLH protein [Arabidopsis thaliana]
  misc_feature (1)..(200): Homolog of NCBI NO: 18397627 NR Description: bHLH protein [Arabidopsis thaliana]
  misc_feature (1)..(200): Homolog of NCBI NO: 21618012 NR Description: unknown [Arabidopsis thaliana]
  misc_feature (12)..(203): Homolog of NCBI NO: 18401374 NR Description: bHLH protein [Arabidopsis thaliana] bHLH protein [Arabidopsis thaliana] >gi|7670034|dbj|BAA94988.1|
  misc_feature (42)..(204): Homolog of NCBI NO: 18397368 NR Description: bHLH protein [Arabidopsis thaliana] hypothetical protein [Arabidopsis thaliana]
  misc_feature (43)..(200): Homolog of NCBI NO: 34898122 NR Description: bHLH protein-like [Oryza sativa (japonica
  misc_feature (79)..(198): Homolog of NCBI NO: 34904544 NR Description: B1066G12.17 [Oryza sativa (japonica
  misc_feature (78)..(196): Homolog of NCBI NO: 34912942 NR Description: OSJNBb0035I14.10 [Oryza sativa (japonica
MVESLFPSIENTGESSRRKKPRISETAEAEIEARRVNEESLKRWKTNRVQQIYACKLVEALRRVRQRSSTTSNNETDKLVSGAAREIRDTADRVLAASARGTTRWSRAILASRVRAKLKKHRKAKKSTGNCKSRKGLTETNRIKLPAVERKLKILGRLVPGCRKVSVPNLLDEATDYIAALEMQVRAMEALAELLTAAAPRTTLTGT

SEQ ID NO: 100848 - DNA, 1564 bp, Arabidopsis thaliana
  misc_feature (1)..(1564): Ceres Seq. ID no. 13606187
  misc_feature: MA Experiment ID: 108462 Result: Down-regulated in Transcription
  misc_feature: MA Experiment 108462 PARAMETER Experiment Name: At_Germinating_Seeds_cDNA_P Parameter: Age (day) Value: 2 vs. 0
  misc_feature: MA Experiment 108462 PARAMETER Experiment Name: At_Germinating_Seeds_cDNA_P Parameter: Tissue Value: Germinating Seeds
  misc_feature: MA Experiment ID: 108463 Result: Down-regulated in Transcription
  misc_feature: MA Experiment 108463 PARAMETER Experiment Name: At_Germinating_Seeds_cDNA_P Parameter: Age (day) Value: 3 vs. 0
  misc_feature: MA Experiment 108463 PARAMETER Experiment Name: At_Germinating_Seeds_cDNA_P Parameter: Tissue Value: Germinating Seeds
  misc_feature: MA Experiment ID: 108464 Result: Down-regulated in Transcription
  misc_feature: MA Experiment 108464 PARAMETER Experiment Name: At_Germinating_Seeds_cDNA_P Parameter: Age (day) Value: 4 vs. 0
  misc_feature: MA Experiment 108464 PARAMETER Experiment Name: At_Germinating_Seeds_cDNA_P Parameter: Tissue Value: Germinating Seeds
  misc_feature: MA Experiment ID: 108474 Result: Down-regulated in Transcription
  misc_feature: MA Experiment 108474 PARAMETER Experiment Name: At_Drought_Flowers_cDNA_P Parameter: Timepoint (hr) Value: null
  misc_feature: MA Experiment 108474 PARAMETER Experiment Name: At_Drought_Flowers_cDNA_P Parameter: Treatment Value: Drought vs. No Drought
  misc_feature: MA Experiment ID: 20000171 Result: Up-regulated in Transcription
  misc_feature: MA Experiment 20000171 PARAMETER Experiment Name: At_42deg_Heat_P Parameter: Age (day) Value: 14
  misc_feature: MA Experiment 20000171 PARAMETER Experiment Name: At_42deg_Heat_P Parameter: Organism Value: A. thaliana
  misc_feature: MA Experiment 20000171 PARAMETER Experiment Name: At_42deg_Heat_P Parameter: Plant Line Value: WS
  misc_feature: MA Experiment 20000171 PARAMETER Experiment Name: At_42deg_Heat_P Parameter: Temperature (deg C) Value: 42 vs. 22
  misc_feature: MA Experiment 20000171 PARAMETER Experiment Name: At_42deg_Heat_P Parameter: Timepoint (hr) Value: 1
  misc_feature: MA Experiment 20000171 PARAMETER Experiment Name: At_42deg_Heat_P Parameter: Tissue Value: Aerial
  misc_feature: MA Experiment ID: 20000173 Result: Up-regulated in Transcription
  misc_feature: MA Experiment 20000173 PARAMETER Experiment Name: At_42deg_Heat_P Parameter: Age (day) Value: 14
  misc_feature: MA Experiment 20000173 PARAMETER Experiment Name: At_42deg_Heat_P Parameter: Organism Value: A. thaliana
  misc_feature: MA Experiment 20000173 PARAMETER Experiment Name: At_42deg_Heat_P Parameter: Plant Line Value: WS
  misc_feature: MA Experiment 20000173 PARAMETER Experiment Name: At_42deg_Heat_P Parameter: Temperature (deg C) Value: 42 vs. 22
  misc_feature: MA Experiment 20000173 PARAMETER Experiment Name: At_42deg_Heat_P Parameter: Timepoint (hr) Value: 6
  misc_feature: MA Experiment 20000173 PARAMETER Experiment Name: At_42deg_Heat_P Parameter: Tissue Value: Aerial
  misc_feature: MA Experiment ID: 20000180 Result: Down-regulated in Transcription
  misc_feature: MA Experiment 20000180 PARAMETER Experiment Name: At_Germinating_Seeds_P Parameter: Age (hr) Value: 24 vs. 0
  misc_feature: MA Experiment 20000180 PARAMETER Experiment Name: At_Germinating_Seeds_P Parameter: Tissue Value: Germinating Seeds
  misc_feature: MA Experiment ID: 20001556 Result: Up-regulated in Transcription
  misc_feature: MA Experiment 20001556 PARAMETER Experiment Name: At_Drought_Soil_Dry_P Parameter: Age (day) Value: 26
  misc_feature: MA Experiment 20001556 PARAMETER Experiment Name: At_Drought_Soil_Dry_P Parameter: Organism Value: A. thaliana
  misc_feature: MA Experiment 20001556 PARAMETER Experiment Name: At_Drought_Soil_Dry_P Parameter: Plant Line Value: WS
  misc_feature: MA Experiment 20001556 PARAMETER Experiment Name: At_Drought_Soil_Dry_P Parameter: Post Timepoint (hr) Value: None
  misc_feature: MA Experiment 20001556 PARAMETER Experiment Name: At_Drought_Soil_Dry_P Parameter: Post-Treatment Value: None
  misc_feature: MA Experiment 20001556 PARAMETER Experiment Name: At_Drought_Soil_Dry_P Parameter: Timepoint (day) Value: 12
  misc_feature: MA Experiment 20001556 PARAMETER Experiment Name: At_Drought_Soil_Dry_P Parameter: Treatment Value: Drought vs. No Drought
  misc_feature: MA Experiment ID: 20001558 Result: Up-regulated in Transcription
  misc_feature: MA Experiment 20001558 PARAMETER Experiment Name: At_Drought_Soil_Dry_P Parameter: Age (day) Value: 27
  misc_feature: MA Experiment 20001558 PARAMETER Experiment Name: At_Drought_Soil_Dry_P Parameter: Organism Value: A. thaliana
  misc_feature: MA Experiment 20001558 PARAMETER Experiment Name: At_Drought_Soil_Dry_P Parameter: Plant Line Value: WS
  misc_feature: MA Experiment 20001558 PARAMETER Experiment Name: At_Drought_Soil_Dry_P Parameter: Post Timepoint (hr) Value: 6
  misc_feature: MA Experiment 20001558 PARAMETER Experiment Name: At_Drought_Soil_Dry_P Parameter: Post-Treatment Value: Re-Water vs. No Drought
  misc_feature: MA Experiment 20001558 PARAMETER Experiment Name: At_Drought_Soil_Dry_P Parameter: Timepoint (day) Value: 13
  misc_feature: MA Experiment 20001558 PARAMETER Experiment Name: At_Drought_Soil_Dry_P Parameter: Treatment Value: Drought vs. No Drought
  misc_feature: MA Experiment ID: 20001904 Result: Up-regulated in Transcription
  misc_feature: MA Experiment 20001904 PARAMETER Experiment Name: At_Drought_Reproduction_P Parameter: Age (day) Value: 37
  misc_feature: MA Experiment 20001904 PARAMETER Experiment Name: At_Drought_Reproduction_P Parameter: Organism Value: A. thaliana
  misc_feature: MA Experiment 20001904 PARAMETER Experiment Name: At_Drought_Reproduction_P Parameter: Plant Line Value: WS
  misc_feature: MA Experiment 20001904 PARAMETER Experiment Name: At_Drought_Reproduction_P Parameter: Timepoint (day) Value: 7
  misc_feature: MA Experiment 20001904 PARAMETER Experiment Name: At_Drought_Reproduction_P Parameter: Tissue Value: Rosettes
  misc_feature: MA Experiment 20001904 PARAMETER Experiment Name: At_Drought_Reproduction_P Parameter: Treatment Value: Drought vs. No Drought
  misc_feature: MA Experiment ID: 20001906 Result: Up-regulated in Transcription
  misc_feature: MA Experiment 20001906 PARAMETER Experiment Name: At_Drought_Reproduction_P Parameter: Age (day) Value: 35
  misc_feature: MA Experiment 20001906 PARAMETER Experiment Name: At_Drought_Reproduction_P Parameter: Organism Value: A. thaliana
  misc_feature: MA Experiment 20001906 PARAMETER Experiment Name: At_Drought_Reproduction_P Parameter: Plant Line Value: WS
  misc_feature: MA Experiment 20001906 PARAMETER Experiment Name: At_Drought_Reproduction_P Parameter: Timepoint (day) Value: 5
  misc_feature: MA Experiment 20001906 PARAMETER Experiment Name: At_Drought_Reproduction_P Parameter: Tissue Value: Siliques
  misc_feature: MA Experiment 20001906 PARAMETER Experiment Name: At_Drought_Reproduction_P Parameter: Treatment Value: Drought vs. No Drought
ataaatgtgtgtatatatacatctttggctataaatataaggtcgaaccaaaataaaatatagatttggggaaactaataaatgatatagagaatccacctctctcccttatttttttttcttggtttcttgacctattattattgattagtaatagtgagagaggcatattttggagatacacataaacacataaattggaagaataaaataaaagagagtgagagatggctaaatcagatatgttgccgttcttggcgatggtgttggtgcaaatcggctacgcaggcatgaacattacgtcgaagatggctatggaggccggtatgaagccactcatcctggtcgcttatcgtcagatatttgccactatcgccacttttccggtcgcattttttctcgaacggaagacaagaccgaagatcacacttaggattcttgtccaagtcttcttctgctccattactggtgcgactggaaaccaagtgctatatttcgtaggacttcagaattcatctccgaccattgcttgtgccttaactaatctcttaccagcggtcactttcctcctcgccgcaatattcagacaagaaaccgtggggatcaagaaggcatcaggacaagccaaagtgatagggacgctagtatgtgtgatcggagccatggttctctccttctaccatggtcacaccatcggcattggagaatccaagatccattgggcctacgctgaaaacatcacgaaacatggttccagttctggccattctaatttcttcttgggaccttttcttattatggctgctgccgtttcttgggccgcttggttcattatccagacgaagatgagtgaaacatttgcagcaccgtacacgagcacactactaatgtgtttgatgggaagtatccaatgtggagccattgctttgatctccgatcatacaatctctgattggtctctcagctctcctctccgcttcatatccgccctttatgccggagtggtggcgtctgcgttagctttctgcctaatgtcatgggctatgcagaggaaaggtcctctgtacgtctctgttttcagccctttacttctcgtagttgtcgccattttcagctgggctcttcttgaagagaaactctacaccggcacgtttatgggatcagcacttgtggttattggtctctatggcgtattgtgggggaaagacagagaggtgagtgagaaggaagaagaaagggagaaggtgaaacaacaaaaccataaagtcaagagtgaaagtaatgaagatattgaatcgagattaccggtagcaagtagtggaaatggttccacaaggtctacatcgccttaaaatggtgattgcttcttcatcatatataagtatgagctatggaagaaccttttgggatttcttgttatctaagttactgcaactaaattggattttcggagtgtttaattttgtatcccattttgaggctaatgatggagtgttgatttgtgtgttcatcctatggacaacaaatatcacctgtttgatctctatatatattcagtattctt

SEQ ID NO: 100849 - protein, 374 aa, Arabidopsis thaliana; identical to SEQ ID NO: 25010
  peptide (1)..(374): Ceres Seq. ID no. 13606188
  misc_feature (195)..(324): Pfam Name: Integral membrane protein DUF6 Pfam Description: Integral membrane protein DUF6
  misc_feature (1)..(374): Homolog of NCBI NO: 15217505 NR Description: nodulin N21 family protein [Arabidopsis thaliana] putative nodulin protein N21 [Arabidopsis thaliana]
  misc_feature (12)..(374): Homolog of NCBI NO: 21593499 NR Description: putative nodulin protein, N21 [Arabidopsis
  misc_feature (1)..(374): Homolog of NCBI NO: 25402543 NR Description: hypothetical protein [imported] - Arabidopsis >gi|3482913|gb|AAC33198.1| Similar to MtN21, gi|2598575, Megicago
  misc_feature (4)..(370): Homolog of NCBI NO: 28932880 NR Description: nodulin-like protein [Gossypium hirsutum]
  misc_feature (4)..(367): Homolog of NCBI NO: 28932732 NR Description: putative nodulin protein [Gossypium hirsutum]
  misc_feature (5)..(335): Homolog of NCBI NO: 34894456 NR Description: putative MtN21 [Oryza sativa (japonica
  misc_feature (8)..(372): Homolog of NCBI NO: 15240683 NR Description: nodulin MtN21 family protein [Arabidopsis
  misc_feature (8)..(347): Homolog of NCBI NO: 38345836 NR Description: OSJNBa0070M12.19 [Oryza sativa (japonica
  misc_feature (8)..(332): Homolog of NCBI NO: 2598575 NR Description: MtN21 [Medicago truncatula]
  misc_feature (8)..(334): Homolog of NCBI NO: 34908998 NR Description: nodulin-like protein [Oryza sativa (japonica

SEQ ID NO: 100850 - protein, 369 aa, Arabidopsis thaliana; identical to SEQ ID NO: 25011
  peptide (1)..(369): Ceres Seq. ID no. 13606189
  misc_feature (190)..(319): Pfam Name: Integral membrane protein DUF6 Pfam Description: Integral membrane protein DUF6
  misc_feature (1)..(369): Homolog of NCBI NO: 15217505 NR Description: nodulin N21 family protein [Arabidopsis thaliana] putative nodulin protein N21 [Arabidopsis thaliana]
  misc_feature (7)..(369): Homolog of NCBI NO: 21593499 NR Description: putative nodulin protein, N21 [Arabidopsis
  misc_feature (1)..(369): Homolog of NCBI NO: 25402543 NR Description: hypothetical protein [imported] - Arabidopsis >gi|3482913|gb|AAC33198.1| Similar to MtN21, gi|2598575, Megicago
  misc_feature (1)..(365): Homolog of NCBI NO: 28932880 NR Description: nodulin-like protein [Gossypium hirsutum]
  misc_feature (1)..(362): Homolog of NCBI NO: 28932732 NR Description: putative nodulin protein [Gossypium hirsutum]
  misc_feature (1)..(330): Homolog of NCBI NO: 34894456 NR Description: putative MtN21 [Oryza sativa (japonica
  misc_feature (3)..(367): Homolog of NCBI NO: 15240683 NR Description: nodulin MtN21 family protein [Arabidopsis
  misc_feature (3)..(342): Homolog of NCBI NO: 38345836 NR Description: OSJNBa0070M12.19 [Oryza sativa (japonica
  misc_feature (3)..(327): Homolog of NCBI NO: 2598575 NR Description: MtN21 [Medicago truncatula]
  misc_feature (3)..(329): Homolog of NCBI NO: 34908998 NR Description: nodulin-like protein [Oryza sativa (japonica

SEQ ID NO: 100851 - protein, 363 aa, Arabidopsis thaliana; identical to SEQ ID NO: 25012
  peptide (1)..(363): Ceres Seq. ID no. 13606190
  misc_feature (184)..(313): Pfam Name: Integral membrane protein DUF6 Pfam Description: Integral membrane protein DUF6
  misc_feature (1)..(363): Homolog of NCBI NO: 15217505 NR Description: nodulin N21 family protein [Arabidopsis thaliana] putative nodulin protein N21 [Arabidopsis thaliana]
  misc_feature (1)..(363): Homolog of NCBI NO: 21593499 NR Description: putative nodulin protein, N21 [Arabidopsis
  misc_feature (1)..(363): Homolog of NCBI NO: 25402543 NR Description: hypothetical protein [imported] - Arabidopsis >gi|3482913|gb|AAC33198.1| Similar to MtN21, gi|2598575, Megicago
  misc_feature (1)..(359): Homolog of NCBI NO: 28932880 NR Description: nodulin-like protein [Gossypium hirsutum]
  misc_feature (1)..(356): Homolog of NCBI NO: 28932732 NR Description: putative nodulin protein [Gossypium hirsutum]
  misc_feature (1)..(324): Homolog of NCBI NO: 34894456 NR Description: putative MtN21 [Oryza sativa (japonica
  misc_feature (1)..(361): Homolog of NCBI NO: 15240683 NR Description: nodulin MtN21 family protein [Arabidopsis
  misc_feature (1)..(336): Homolog of NCBI NO: 38345836 NR Description: OSJNBa0070M12.19 [Oryza sativa (japonica
  misc_feature (1)..(321): Homolog of NCBI NO: 2598575 NR Description: MtN21 [Medicago truncatula]
  misc_feature (1)..(323): Homolog of NCBI NO: 34908998 NR Description: nodulin-like protein [Oryza sativa (japonica

SEQ ID NO: 100852 - DNA, 1129 bp, Arabidopsis thaliana
  misc_feature (1)..(1129): Ceres Seq. ID no. 13606191
  misc_feature: MA Experiment ID: 108488 Result: Down-regulated in Transcription
  misc_feature: MA Experiment ID: 108561 Result: Up-regulated in Transcription
  misc_feature: MA Experiment 108561 PARAMETER Experiment Name: At_100uM_ABA_cDNA_P Parameter: Timepoint (hr) Value: 6
  misc_feature: MA Experiment 108561 PARAMETER Experiment Name: At_100uM_ABA_cDNA_P Parameter: Tissue Value: Aerial
  misc_feature: MA Experiment 108561 PARAMETER Experiment Name: At_100uM_ABA_cDNA_P Parameter: Treatment Value: 100uM ABA vs. No Treatment
  misc_feature: MA Experiment ID: 108572 Result: Up-regulated in Transcription
  misc_feature: MA Experiment 108572 PARAMETER Experiment Name: At_Drought_cDNA_P Parameter: Timepoint (hr) Value: 1
  misc_feature: MA Experiment 108572 PARAMETER Experiment Name: At_Drought_cDNA_P Parameter: Tissue Value: Aerial
  misc_feature: MA Experiment 108572 PARAMETER Experiment Name: At_Drought_cDNA_P Parameter: Treatment Value: Drought vs. No Drought
  misc_feature: MA Experiment ID: 108573 Result: Up-regulated in Transcription
  misc_feature: MA Experiment 108573 PARAMETER Experiment Name: At_Drought_cDNA_P Parameter: Timepoint (hr) Value: 6
  misc_feature: MA Experiment 108573 PARAMETER Experiment Name: At_Drought_cDNA_P Parameter: Tissue Value: Aerial
  misc_feature: MA Experiment 108573 PARAMETER Experiment Name: At_Drought_cDNA_P Parameter: Treatment Value: Drought vs. No Drought
  misc_feature: MA Experiment ID: 108577 Result: Down-regulated in Transcription
  misc_feature: MA Experiment 108577 PARAMETER Experiment Name: At_42deg_Heat_cDNA_P Parameter: Temperature (deg C) Value: 42 vs. 22
  misc_feature: MA Experiment 108577 PARAMETER Experiment Name: At_42deg_Heat_cDNA_P Parameter: Timepoint (hr) Value: 6
  misc_feature: MA Experiment 108577 PARAMETER Experiment Name: At_42deg_Heat_cDNA_P Parameter: Tissue Value: Aerial
  misc_feature: MA Experiment ID: 108595 Result: Down-regulated in Transcription
  misc_feature: MA Experiment 108595 PARAMETER Experiment Name: At_Ler-pi_Ovule_cDNA_P Parameter: Plant Line Value: null
  misc_feature: MA Experiment ID: 108605 Result: Up-regulated in Transcription
  misc_feature: MA Experiment 108605 PARAMETER Experiment Name: At_100uM_ABA_cDNA_P Parameter: Timepoint (hr) Value: 6
  misc_feature: MA Experiment 108605 PARAMETER Experiment Name: At_100uM_ABA_cDNA_P Parameter: Tissue Value: Aerial
  misc_feature: MA Experiment 108605 PARAMETER Experiment Name: At_100uM_ABA_cDNA_P Parameter: Treatment Value: 100uM ABA vs. No Treatment
  misc_feature: MA Experiment ID: 108607 Result: Up-regulated in Transcription
  misc_feature: MA Experiment 108607 PARAMETER Experiment Name: At_100uM_ABA_cDNA_P Parameter: Timepoint (hr) Value: 4
  misc_feature: MA Experiment 108607 PARAMETER Experiment Name: At_100uM_ABA_cDNA_P Parameter: Tissue Value: Aerial
  misc_feature: MA Experiment 108607 PARAMETER Experiment Name: At_100uM_ABA_cDNA_P Parameter: Treatment Value: 100uM ABA vs. No Treatment
  misc_feature: MA Experiment ID: 20000069 Result: Up-regulated in Transcription
  misc_feature: MA Experiment 20000069 PARAMETER Experiment Name: At_100uM_ABA_Mutants_cDNA_P Parameter: Plant Line Value: CS23
  misc_feature: MA Experiment 20000069 PARAMETER Experiment Name: At_100uM_ABA_Mutants_cDNA_P Parameter: Timepoint (hr) Value: 6
  misc_feature: MA Experiment 20000069 PARAMETER Experiment Name: At_100uM_ABA_Mutants_cDNA_P Parameter: Tissue Value: Aerial
  misc_feature: MA Experiment 20000069 PARAMETER Experiment Name: At_100uM_ABA_Mutants_cDNA_P Parameter: Treatment Value: 100uM ABA vs. No Treatment
  misc_feature: MA Experiment ID: 20000070 Result: Up-regulated in Transcription
  misc_feature: MA Experiment 20000070 PARAMETER Experiment Name: At_100uM_ABA_Mutants_cDNA_P Parameter: Plant Line Value: CS24
  misc_feature: MA Experiment 20000070 PARAMETER Experiment Name: At_100uM_ABA_Mutants_cDNA_P Parameter: Timepoint (hr) Value: 6
  misc_feature: MA Experiment 20000070 PARAMETER Experiment Name: At_100uM_ABA_Mutants_cDNA_P Parameter: Tissue Value: Aerial
  misc_feature: MA Experiment 20000070 PARAMETER Experiment Name: At_100uM_ABA_Mutants_cDNA_P Parameter: Treatment Value: 100uM ABA vs. No Treatment
  misc_feature: MA Experiment ID: 20000071 Result: Up-regulated in Transcription
  misc_feature: MA Experiment 20000071 PARAMETER Experiment Name: At_100uM_ABA_Mutants_cDNA_P Parameter: Plant Line Value: CS8104
  misc_feature: MA Experiment 20000071 PARAMETER Experiment Name: At_100uM_ABA_Mutants_cDNA_P Parameter: Timepoint (hr) Value: 6
  misc_feature: MA Experiment 20000071 PARAMETER Experiment Name: At_100uM_ABA_Mutants_cDNA_P Parameter: Tissue Value: Aerial
  misc_feature: MA Experiment 20000071 PARAMETER Experiment Name: At_100uM_ABA_Mutants_cDNA_P Parameter: Treatment Value: 100uM ABA vs. No Treatment
  misc_feature: MA Experiment ID: 20000086 Result: Up-regulated in Transcription
  misc_feature: MA Experiment 20000086 PARAMETER Experiment Name: At_100uM_ABA_Mutants_cDNA_P Parameter: Plant Line Value: CS22
  misc_feature: MA Experiment 20000086 PARAMETER Experiment Name: At_100uM_ABA_Mutants_cDNA_P Parameter: Timepoint (hr) Value: 6
  misc_feature: MA Experiment 20000086 PARAMETER Experiment Name: At_100uM_ABA_Mutants_cDNA_P Parameter: Tissue Value: Aerial
  misc_feature: MA Experiment 20000086 PARAMETER Experiment Name: At_100uM_ABA_Mutants_cDNA_P Parameter: Treatment Value: 100uM ABA vs. No Treatment
  misc_feature: MA Experiment ID: 20000088 Result: Up-regulated in Transcription
  misc_feature: MA Experiment 20000088 PARAMETER Experiment Name: At_100uM_ABA_Mutants_cDNA_P Parameter: Plant Line Value: Landsberg
  misc_feature: MA Experiment 20000088 PARAMETER Experiment Name: At_100uM_ABA_Mutants_cDNA_P Parameter: Timepoint (hr) Value: 6
  misc_feature: MA Experiment 20000088 PARAMETER Experiment Name: At_100uM_ABA_Mutants_cDNA_P Parameter: Tissue Value: Aerial
  misc_feature: MA Experiment 20000088 PARAMETER Experiment Name: At_100uM_ABA_Mutants_cDNA_P Parameter: Treatment Value: 100uM ABA vs. No Treatment
  misc_feature: MA Experiment ID: 20000111 Result: Down-regulated in Transcription
  misc_feature: MA Experiment 20000111 PARAMETER Experiment Name: At_42deg_Heat_cDNA_P Parameter: Temperature (deg C) Value: 42 vs. 22
  misc_feature: MA Experiment 20000111 PARAMETER Experiment Name: At_42deg_Heat_cDNA_P Parameter: Timepoint (hr) Value: 6
  misc_feature: MA Experiment 20000111 PARAMETER Experiment Name: At_42deg_Heat_cDNA_P Parameter: Tissue Value: Aerial
  misc_feature: MA Experiment ID: 20000224 Result: Down-regulated in Transcription
  misc_feature: MA Experiment ID: 20000314 Result: Down-regulated in Transcription
  misc_feature: MA Experiment 20000314 PARAMETER Experiment Name: At_14day_Shoots-Roots_Sub_P Parameter: Age (day) Value: 14
  misc_feature: MA Experiment 20000314 PARAMETER Experiment Name: At_14day_Shoots-Roots_Sub_P Parameter: Organism Value: A. thaliana
  misc_feature: MA Experiment 20000314 PARAMETER Experiment Name: At_14day_Shoots-Roots_Sub_P Parameter: Plant Line Value: WS
  misc_feature: MA Experiment 20000314 PARAMETER Experiment Name: At_14day_Shoots-Roots_Sub_P Parameter: Tissue Value: Roots vs. Whole Plant
  misc_feature: MA Experiment ID: 20000328 Result: Down-regulated in Transcription
  misc_feature: MA Experiment 20000328 PARAMETER Experiment Name: At_42deg_Heat_Sub_P Parameter: Age (day) Value: 14
  misc_feature: MA Experiment 20000328 PARAMETER Experiment Name: At_42deg_Heat_Sub_P Parameter: Organism Value: A. thaliana
  misc_feature: MA Experiment 20000328 PARAMETER Experiment Name: At_42deg_Heat_Sub_P Parameter: Plant Line Value: WS
  misc_feature: MA Experiment 20000328 PARAMETER Experiment Name: At_42deg_Heat_Sub_P Parameter: Temperature (deg C) Value: 42 vs. 22
  misc_feature: MA Experiment 20000328 PARAMETER Experiment Name: At_42deg_Heat_Sub_P Parameter: Timepoint (hr) Value: 6
  misc_feature: MA Experiment 20000328 PARAMETER Experiment Name: At_42deg_Heat_Sub_P Parameter: Tissue Value: Aerial
  misc_feature: MA Experiment ID: 20000355 Result: Down-regulated in Transcription
  misc_feature: MA Experiment 20000355 PARAMETER Experiment Name: At_Siliques_Sub_P Parameter: Age (day) Value: 21
  misc_feature: MA Experiment 20000355 PARAMETER Experiment Name: At_Siliques_Sub_P Parameter: Organism Value: A. thaliana
  misc_feature: MA Experiment 20000355 PARAMETER Experiment Name: At_Siliques_Sub_P Parameter: Plant Line Value: WS
  misc_feature: MA Experiment 20000355 PARAMETER Experiment Name: At_Siliques_Sub_P Parameter: Tissue Value: Less Than 5mm Siliques vs. Whole Plant
aaaacaattattttcagacacagagagactcagacaggagatatgaactgcggaggaaaggtggtctgcgttaccggagcttccggctacatagcgtcttggattgtcaagcttttgctcctccgtggctacaccgtcaatgccactgttcgagatccaaaggacaagaagaaaacagaacatcttcttgcactagacggtgcaaaagaaagactcaaattgttcaaagcagatcttttggaagaatcttcttttgatcaagctatcgatggttgtgatgctgtcttccacactgcttctccagttctattcactgtcacagatcctcagactgagctgattgatccagccttaaagggtactattaacgtccttaatacatgcaaacaagtttcttctgtcaagagggtcattctgacatcttccacggctgcggttctctctcgtcagcctcctattgggccaaacgacctggtggacgagactttcttctccgatccaagtctatgcagggagacaaagaattggtattcactctccaagattttggccgagaatgcagcgtggcaatttgccaaagacaatggaatcgacatggttgtgttgaatcctggatttatttgcggaccactcttgcaaccaactcttaacatgtcggtagagctaattgtggatttcataaatggtaagaaccctttcaataaaagatactacaggttctcggacgtaagagatgtcgccttggttcatatcaaagcgttggagactccttcagccaatggcagatacatcatcgatggtccaaatatgagtgtaaacgacattatagacattcttcggaagctgttcccagatttgtctattgctgatacgaatgaagaaagtgagatgaatgagatgatatgccaagtgtgtgtggagaaagtgaaaaatttgggagtagagttcactcctatgaaatcaagccttagagacactattgttagcctcaaggagaaatgtcttttatgattctgttcgtatatttgtaactattatgtgtatttttattttgttagtattactaattcaagtggtttaagttgttgagactctttaaaatctaagcattttataaacaataatatat

SEQ ID NO: 100853 - protein, 336 aa, Arabidopsis thaliana
  peptide (1)..(336): Ceres Seq. ID no. 13606192
  misc_feature (24)..(287): Pfam Name: 3-beta hydroxysteroid dehydrogenase/isomerase family Pfam Description: 3-beta hydroxysteroid dehydrogenase/isomerase
  misc_feature (15)..(336): Homolog of NCBI NO: 15217529 NR Description: cinnamyl-alcohol dehydrogenase (CAD) family
  misc_feature (7)..(336): Homolog of NCBI NO: 15217528 NR Description: cinnamyl-alcohol dehydrogenase (CAD) family
  misc_feature (15)..(336): Homolog of NCBI NO: 25284016 NR Description: hypothetical protein [imported] - Arabidopsis >gi|3482923|gb|AAC33208.1| Highly similar to cinnamyl alcohol
  misc_feature (18)..(336): Homolog of NCBI NO: 15217530 NR Description: cinnamyl-alcohol dehydrogenase (CAD) family
  misc_feature (18)..(336): Homolog of NCBI NO: 15217531 NR Description: cinnamyl-alcohol dehydrogenase (CAD) family
  misc_feature (15)..(336): Homolog of NCBI NO: 30697406 NR Description: cinnamyl-alcohol dehydrogenase (CAD) family
  misc_feature (15)..(336): Homolog of NCBI NO: 12597772 NR Description: cinnamyl alcohol dehydrogenase, putative
  misc_feature (53)..(336): Homolog of NCBI NO: 16648726 NR Description: At1g09500/F14J9_16 [Arabidopsis thaliana]
  misc_feature (53)..(336): Homolog of NCBI NO: 30681183 NR Description: cinnamyl-alcohol dehydrogenase (CAD) family
  misc_feature (16)..(333): Homolog of NCBI NO: 15239741 NR Description: cinnamyl-alcohol dehydrogenase (CAD), putative
KTIIFRHRETQTGDMNCGGKVVCVTGASGYIASWIVKLLLLRGYTVNATVRDPKDKKKTEHLLALDGAKERLKLFKADLLEESSFDQAIDGCDAVFHTASPVLFTVTDPQTELIDPALKGTINVLNTCKQVSSVKRVILTSSTAAVLSRQPPIGPNDLVDETFFSDPSLCRETKNWYSLSKILAENAAWQFAKDNGIDMVVLNPGFICGPLLQPTLNMSVELIVDFINGKNPFNKRYYRFSDVRDVALVHIKALETPSANGRYIIDGPNMSVNDIIDILRKLFPDLSIADTNEESEMNEMICQVCVEKVKNLGVEFTPMKSSLRDTIVSLKEKCLL

SEQ ID NO: 100854 - protein, 322 aa, Arabidopsis thaliana; identical to SEQ ID NO: 22010
  peptide (1)..(322): Ceres Seq. ID no. 13606193
  misc_feature (10)..(273): Pfam Name: 3-beta hydroxysteroid dehydrogenase/isomerase family Pfam Description: 3-beta hydroxysteroid dehydrogenase/isomerase
  misc_feature (1)..(322): Homolog of NCBI NO: 15217529 NR Description: cinnamyl-alcohol dehydrogenase (CAD) family
  misc_feature (1)..(322): Homolog of NCBI NO: 15217528 NR Description: cinnamyl-alcohol dehydrogenase (CAD) family
  misc_feature (1)..(322): Homolog of NCBI NO: 25284016 NR Description: hypothetical protein [imported] - Arabidopsis >gi|3482923|gb|AAC33208.1| Highly similar to cinnamyl alcohol
  misc_feature (4)..(322): Homolog of NCBI NO: 15217530 NR Description: cinnamyl-alcohol dehydrogenase (CAD) family
  misc_feature (4)..(322): Homolog of NCBI NO: 15217531 NR Description: cinnamyl-alcohol dehydrogenase (CAD) family
  misc_feature (1)..(322): Homolog of NCBI NO: 30697406 NR Description: cinnamyl-alcohol dehydrogenase (CAD) family
  misc_feature (1)..(322): Homolog of NCBI NO: 12597772 NR Description: cinnamyl alcohol dehydrogenase, putative
  misc_feature (39)..(322): Homolog of NCBI NO: 16648726 NR Description: At1g09500/F14J9_16 [Arabidopsis thaliana]
  misc_feature (39)..(322): Homolog of NCBI NO: 30681183 NR Description: cinnamyl-alcohol dehydrogenase (CAD) family
  misc_feature (2)..(319): Homolog of NCBI NO: 15239741 NR Description: cinnamyl-alcohol dehydrogenase (CAD), putative

SEQ ID NO: 100855 - DNA, 2402 bp, Arabidopsis thaliana
  misc_feature (1)..(2402): Ceres Seq. ID no. 13606194
  misc_feature: MA Experiment ID: 108433 Result: Down-regulated in Transcription
  misc_feature: MA Experiment 108433 PARAMETER Experiment Name: At_rhl_Mutant2_cDNA_P Parameter: Age (day) Value: 7
  misc_feature: MA Experiment 108433 PARAMETER Experiment Name: At_rhl_Mutant2_cDNA_P Parameter: Organism Value: A. thaliana
  misc_feature: MA Experiment 108433 PARAMETER Experiment Name: At_rhl_Mutant2_cDNA_P Parameter: Plant Line Value: rhl Mutant vs. wt landsburg
  misc_feature: MA Experiment 108433 PARAMETER Experiment Name: At_rhl_Mutant2_cDNA_P Parameter: Tissue Value: Roots
  misc_feature: MA Experiment ID: 108434 Result: Up-regulated in Transcription
  misc_feature: MA Experiment 108434 PARAMETER Experiment Name: At_Root_Tips_cDNA_P Parameter: Tissue Value: Root Tips
  misc_feature: MA Experiment ID: 108461 Result: Down-regulated in Transcription
  misc_feature: MA Experiment 108461 PARAMETER Experiment Name: At_Germinating_Seeds_cDNA_P Parameter: Age (day) Value: 1 vs. 0
  misc_feature: MA Experiment 108461 PARAMETER Experiment Name: At_Germinating_Seeds_cDNA_P Parameter: Tissue Value: Germinating Seeds
  misc_feature: MA Experiment ID: 108462 Result: Down-regulated in Transcription
  misc_feature: MA Experiment 108462 PARAMETER Experiment Name: At_Germinating_Seeds_cDNA_P Parameter: Age (day) Value: 2 vs. 0
  misc_feature: MA Experiment 108462 PARAMETER Experiment Name: At_Germinating_Seeds_cDNA_P Parameter: Tissue Value: Germinating Seeds
  misc_feature: MA Experiment ID: 108463 Result: Down-regulated in Transcription
  misc_feature: MA Experiment 108463 PARAMETER Experiment Name: At_Germinating_Seeds_cDNA_P Parameter: Age (day) Value: 3 vs. 0
  misc_feature: MA Experiment 108463 PARAMETER Experiment Name: At_Germinating_Seeds_cDNA_P Parameter: Tissue Value: Germinating Seeds
  misc_feature: MA Experiment ID: 108464 Result: Down-regulated in Transcription
  misc_feature: MA Experiment 108464 PARAMETER Experiment Name: At_Germinating_Seeds_cDNA_P Parameter: Age (day) Value: 4 vs. 0
  misc_feature: MA Experiment 108464 PARAMETER Experiment Name: At_Germinating_Seeds_cDNA_P Parameter: Tissue Value: Germinating Seeds
  misc_feature: MA Experiment ID: 20000089 Result: Up-regulated in Transcription
  misc_feature: MA Experiment ID: 20000090 Result: Up-regulated in Transcription
  misc_feature: MA Experiment ID: 20000111 Result: Down-regulated in Transcription
  misc_feature: MA Experiment 20000111 PARAMETER Experiment Name: At_42deg_Heat_cDNA_P Parameter: Temperature (deg C) Value: 42 vs. 22
  misc_feature: MA Experiment 20000111 PARAMETER Experiment Name: At_42deg_Heat_cDNA_P Parameter: Timepoint (hr) Value: 6
  misc_feature: MA Experiment 20000111 PARAMETER Experiment Name: At_42deg_Heat_cDNA_P Parameter: Tissue Value: Aerial
  misc_feature: MA Experiment ID: 20000113 Result: Down-regulated in Transcription
  misc_feature: MA Experiment 20000113 PARAMETER Experiment Name: At_42deg_Heat_cDNA_P Parameter: Temperature (deg C) Value: 42 vs. 22
  misc_feature: MA Experiment 20000113 PARAMETER Experiment Name: At_42deg_Heat_cDNA_P Parameter: Timepoint (hr) Value: 8
  misc_feature: MA Experiment 20000113 PARAMETER Experiment Name: At_42deg_Heat_cDNA_P Parameter: Tissue Value: Aerial
  misc_feature: MA Experiment ID: 20000224 Result: Up-regulated in Transcription
  misc_feature: MA Experiment ID: 20000307 Result: Down-regulated in Transcription
  misc_feature: MA Experiment 20000307 PARAMETER Experiment Name: At_Germinating_Seeds_Sub_P Parameter: Age (hr) Value: 24 vs. 0
  misc_feature: MA Experiment 20000307 PARAMETER Experiment Name: At_Germinating_Seeds_Sub_P Parameter: Organism Value: A. thaliana
  misc_feature: MA Experiment 20000307 PARAMETER Experiment Name: At_Germinating_Seeds_Sub_P Parameter: Plant Line Value: WS
  misc_feature: MA Experiment 20000307 PARAMETER Experiment Name: At_Germinating_Seeds_Sub_P Parameter: Tissue Value: Germinating Seeds
  misc_feature: MA Experiment ID: 20000327 Result: Down-regulated in Transcription
  misc_feature: MA Experiment 20000327 PARAMETER Experiment Name: At_42deg_Heat_Sub_P Parameter: Age (day) Value: 14
  misc_feature: MA Experiment 20000327 PARAMETER Experiment Name: At_42deg_Heat_Sub_P Parameter: Organism Value: A. thaliana
  misc_feature: MA Experiment 20000327 PARAMETER Experiment Name: At_42deg_Heat_Sub_P Parameter: Plant Line Value: WS
  misc_feature: MA Experiment 20000327 PARAMETER Experiment Name: At_42deg_Heat_Sub_P Parameter: Temperature (deg C) Value: 42 vs. 22
  misc_feature: MA Experiment 20000327 PARAMETER Experiment Name: At_42deg_Heat_Sub_P Parameter: Timepoint (hr) Value: 1
  misc_feature: MA Experiment 20000327 PARAMETER Experiment Name: At_42deg_Heat_Sub_P Parameter: Tissue Value: Aerial
  misc_feature: MA Experiment ID: 20000328 Result: Down-regulated in Transcription
  misc_feature: MA Experiment 20000328 PARAMETER Experiment Name: At_42deg_Heat_Sub_P Parameter: Age (day) Value: 14
  misc_feature: MA Experiment 20000328 PARAMETER Experiment Name: At_42deg_Heat_Sub_P Parameter: Organism Value: A. thaliana
  misc_feature: MA Experiment 20000328 PARAMETER Experiment Name: At_42deg_Heat_Sub_P Parameter: Plant Line Value: WS
  misc_feature: MA Experiment 20000328 PARAMETER Experiment Name: At_42deg_Heat_Sub_P Parameter: Temperature (deg C) Value: 42 vs. 22
  misc_feature: MA Experiment 20000328 PARAMETER Experiment Name: At_42deg_Heat_Sub_P Parameter: Timepoint (hr) Value: 6
  misc_feature: MA Experiment 20000328 PARAMETER Experiment Name: At_42deg_Heat_Sub_P Parameter: Tissue Value: Aerial
gtggccgtctttttcaaaaccttagacgatgagtatcatgctatcaatttcccggcgccggaactcttatattctgctcaaccattctcgattcctccgtcgtttttcatatgatgttgacccacggccggaaatcaaattggagagccaggaatttgtagtagtcaaatttgtgaaaactcttcaaaaaaccccgcaacatgattgggcgtcgagcgagtcgctaagtgcgcttgtcgtatcttcttcttctgcttctcctttagtattctcgcaaatcacgcggcggctaggatcgtattctctagcaatctcgttcttcgagtacctggatgcgaagtctcagtctctgaaacgccgtgaagaatctctctccttggcgcttcagtcggtcattgaattcgccggtagtgaaccggacccgcgtgataaacttctccgtctctacgagatcgccaaagagaagaacattcctcttactgtcgttgccactaatcttctgatccgatggtttgggcgtatgggtatggtgaatcagtcggttcttgtatacgaaagactcgattcgaatatgaaaaactcgcaggttcgtaatgttgtggtagacgtcttgctaagaaatggacttgtggatgatgccttcaaggtgctcgacgaaatgcttcagaaagaatctgtttttcctcctaatagaatcacagcggatattgtgttacacgaggtttggaagggaaggcttttgacagaagaaaagataattgctttgatttcaagatttagctctcatggtgtctccccaaactctgtttggttgactcggtttatatcaagtctatgcaaaaatgctcgcgccaatgctgcttgggatattttgagcgacctgatgaagaacaaaaccccacttgaagctcctcccttcaatgcgcttttgtcttgcttaggaaggaatatggacattagtagaatgaatgatttagtcttgaagatggatgaggtgaaaatccggcctgatgttgtgactttagggattcttattaacactttatgcaaatcaagaagggtagatgaagctctcgaagtttttgaaaaaatgcgtggaaagagaactgatgatggaaatgtgattaaagctgattcgattcattttaatactctcattgacgggctctgcaaggtggggaggttgaaagaagcagaggagttattggtaaggatgaaactggaagagagatgtgcgcccaatgcagttacttacaattgcttgattgatgggtattgcagagctggaaagcttgagacggctaaagaagtcgtttctcggatgaaagaggacgagattaaacctaatgtggtaactgttaatacaatcgttggtgggatgtgcaggcaccatggattgaacatggcggttgtattctttatggatatggaaaaggaaggcgtgaaagggaatgtggttacttatatgacattgattcatgcttgttgcagcgtcagtaatgtagagaaggctatgtattggtatgaaaaaatgttggaagctggttgttctcctgatgcaaagatctattatgctttgatctctggattgtgccaagttagacgggatcatgacgccattagagtggtggagaaactgaaagaaggagggttttctcttgacttattggcttacaacatgcttattgggttgttttgtgataagaataatacagagaaagtctatgagatgctaaccgatatggaaaaagaagggaagaaacctgattccatcacttacaacactctgatttcgtttttcggtaaacacaaggacttcgagagtgttgagagaatgatggagcagatgagagaagacgggttagacccgactgtcacgacatatggagcggtgattgacgcttattgctcagtcggcgaattagacgaagcattgaagctctttaaggacatgggtttgcactcaaaggtcaatccgaacactgtaatatacaacattctcataaacgcattttctaagctggggaatttcgggcaagcgctctctctgaaagaggaaatgaagatgaagatggtgagacctaatgttgaaacttacaatgccttgtttaagtgtcttaacgagaaaacccaaggagagacattacttaaactgatggatgagatggtcgaacagtcttgtgaaccaaatcagatcacaatggagattctaatggagcgtctctcaggttctgatgagttagttaagctgaggaagtttatgcaaggctactctgttgcttcgccgaccgagaaagcttcacctttcgatgtctttagcttgggataatgttcgtttagatacagtaaccattactataatgtttttaataatttcttgattatgcattttatataattac

SEQ ID NO: 100856 - protein, 766 aa, Arabidopsis thaliana
  peptide (1)..(766): Ceres Seq. ID no. 13606195
  misc_feature (477)..(511): Pfam Name: PPR repeat Pfam Description: PPR repeat
  misc_feature (297)..(761): Homolog of NCBI NO: 15242446 NR Description: pentatricopeptide (PPR) repeat-containing protein
  misc_feature (162)..(730): Homolog of NCBI NO: 15221300 NR Description: pentatricopeptide (PPR) repeat-containing protein
  misc_feature (189)..(744): Homolog of NCBI NO: 15237662 NR Description: pentatricopeptide (PPR) repeat-containing protein
  misc_feature (179)..(766): Homolog of NCBI NO: 34394343 NR Description: putative fertility restorer homologue [Oryza
  misc_feature (75)..(681): Homolog of NCBI NO: 37572999 NR Description: putative fertility restorer homologue [Oryza
  misc_feature (196)..(756): Homolog of NCBI NO: 11994279 NR Description: gb|AAD43616.1~gene_id:F16J14.3~strong similarity
  misc_feature (196)..(756): Homolog of NCBI NO: 15228763 NR Description: pentatricopeptide (PPR) repeat-containing protein
  misc_feature (327)..(733): Homolog of NCBI NO: 15218325 NR Description: pentatricopeptide (PPR) repeat-containing protein
  misc_feature (266)..(728): Homolog of NCBI NO: 15234269 NR Description: hypothetical protein [Arabidopsis thaliana]
  misc_feature (188)..(737): Homolog of NCBI NO: 25518293 NR Description: hypothetical protein F13K23.2 - Arabidopsis >gi|8698724|gb|AAF78482.1|AC012187_2 Contains similarity to an protein F16M19.7 gi|6598837 from Arabidopsis thaliana BAC
MSIMLSISRRRNSYILLNHSRFLRRFSYDVDPRPEIKLESQEFVVVKFVKTLQKTPQHDWASSESLSALVVSSSSASPLVFSQITRRLGSYSLAISFFEYLDAKSQSLKRREESLSLALQSVIEFAGSEPDPRDKLLRLYEIAKEKNIPLTVVATNLLIRWFGRMGMVNQSVLVYERLDSNMKNSQVRNVVVDVLLRNGLVDDAFKVLDEMLQKESVFPPNRITADIVLHEVWKGRLLTEEKIIALISRFSSHGVSPNSVWLTRFISSLCKNARANAAWDILSDLMKNKTPLEAPPFNALLSCLGRNMDISRMNDLVLKMDEVKIRPDVVTLGILINTLCKSRRVDEALEVFEKMRGKRTDDGNVIKADSIHFNTLIDGLCKVGRLKEAEELLVRMKLEERCAPNAVTYNCLIDGYCRAGKLETAKEVVSRMKEDEIKPNVVTVNTIVGGMCRHHGLNMAVVFFMDMEKEGVKGNVVTYMTLIHACCSVSNVEKAMYWYEKMLEAGCSPDAKIYYALISGLCQVRRDHDAIRVVEKLKEGGFSLDLLAYNMLIGLFCDKNNTEKVYEMLTDMEKEGKKPDSITYNTLISFFGKHKDFESVERMMEQMREDGLDPTVTTYGAVIDAYCSVGELDEALKLFKDMGLHSKVNPNTVIYNILINAFSKLGNFGQALSLKEEMKMKMVRPNVETYNALFKCLNEKTQGETLLKLMDEMVEQSCEPNQITMEILMERLSGSDELVKLRKFMQGYSVASPTEKASPFDVFSLG

SEQ ID NO: 100857 - protein, 763 aa, Arabidopsis thaliana
  peptide (1)..(763): Ceres Seq. ID no. 13606196
  misc_feature (474)..(508): Pfam Name: PPR repeat Pfam Description: PPR repeat
  misc_feature (294)..(758): Homolog of NCBI NO: 15242446 NR Description: pentatricopeptide (PPR) repeat-containing protein
  misc_feature (159)..(727): Homolog of NCBI NO: 15221300 NR Description: pentatricopeptide (PPR) repeat-containing protein
  misc_feature (186)..(741): Homolog of NCBI NO: 15237662 NR Description: pentatricopeptide (PPR) repeat-containing protein
  misc_feature (176)..(763): Homolog of NCBI NO: 34394343 NR Description: putative fertility restorer homologue [Oryza
  misc_feature (72)..(678): Homolog of NCBI NO: 37572999 NR Description: putative fertility restorer homologue [Oryza
  misc_feature (193)..(753): Homolog of NCBI NO: 11994279 NR Description: gb|AAD43616.1~gene_id:F16J14.3~strong similarity
  misc_feature (193)..(753): Homolog of NCBI NO: 15228763 NR Description: pentatricopeptide (PPR) repeat-containing protein
  misc_feature (324)..(730): Homolog of NCBI NO: 15218325 NR Description: pentatricopeptide (PPR) repeat-containing protein
  misc_feature (263)..(725): Homolog of NCBI NO: 15234269 NR Description: hypothetical protein [Arabidopsis thaliana]
  misc_feature (185)..(734): Homolog of NCBI NO: 25518293 NR Description: hypothetical protein F13K23.2 - Arabidopsis >gi|8698724|gb|AAF78482.1|AC012187_2 Contains similarity to an protein F16M19.7 gi|6598837 from Arabidopsis thaliana BAC
MLSISRRRNSYILLNHSRFLRRFSYDVDPRPEIKLESQEFVVVKFVKTLQKTPQHDWASSESLSALVVSSSSASPLVFSQITRRLGSYSLAISFFEYLDAKSQSLKRREESLSLALQSVIEFAGSEPDPRDKLLRLYEIAKEKNIPLTVVATNLLIRWFGRMGMVNQSVLVYERLDSNMKNSQVRNVVVDVLLRNGLVDDAFKVLDEMLQKESVFPPNRITADIVLHEVWKGRLLTEEKIIALISRFSSHGVSPNSVWLTRFISSLCKNARANAAWDILSDLMKNKTPLEAPPFNALLSCLGRNMDISRMNDLVLKMDEVKIRPDVVTLGILINTLCKSRRVDEALEVFEKMRGKRTDDGNVIKADSIHFNTLIDGLCKVGRLKEAEELLVRMKLEERCAPNAVTYNCLIDGYCRAGKLETAKEVVSRMKEDEIKPNVVTVNTIVGGMCRHHGLNMAVVFFMDMEKEGVKGNVVTYMTLIHACCSVSNVEKAMYWYEKMLEAGCSPDAKIYYALISGLCQVRRDHDAIRVVEKLKEGGFSLDLLAYNMLIGLFCDKNNTEKVYEMLTDMEKEGKKPDSITYNTLISFFGKHKDFESVERMMEQMREDGLDPTVTTYGAVIDAYCSVGELDEALKLFKDMGLHSKVNPNTVIYNILINAFSKLGNFGQALSLKEEMKMKMVRPNVETYNALFKCLNEKTQGETLLKLMDEMVEQSCEPNQITMEILMERLSGSDELVKLRKFMQGYSVASPTEKASPFDVFSLG

SEQ ID NO: 100858 - protein, 602 aa, Arabidopsis thaliana
  peptide (1)..(602): Ceres Seq. ID no. 13606197
  misc_feature (313)..(347): Pfam Name: PPR repeat Pfam Description: PPR repeat
  misc_feature (133)..(597): Homolog of NCBI NO: 15242446 NR Description: pentatricopeptide (PPR) repeat-containing protein
  misc_feature (1)..(566): Homolog of NCBI NO: 15221300 NR Description: pentatricopeptide (PPR) repeat-containing protein
  misc_feature (25)..(580): Homolog of NCBI NO: 15237662 NR Description: pentatricopeptide (PPR) repeat-containing protein
  misc_feature (15)..(602): Homolog of NCBI NO: 34394343 NR Description: putative fertility restorer homologue [Oryza
  misc_feature (1)..(517): Homolog of NCBI NO: 37572999 NR Description: putative fertility restorer homologue [Oryza
  misc_feature (32)..(592): Homolog of NCBI NO: 11994279 NR Description: gb|AAD43616.1~gene_id:F16J14.3~strong similarity
  misc_feature (32)..(592): Homolog of NCBI NO: 15228763 NR Description: pentatricopeptide (PPR) repeat-containing protein
  misc_feature (163)..(569): Homolog of NCBI NO: 15218325 NR Description: pentatricopeptide (PPR) repeat-containing protein
  misc_feature (102)..(564): Homolog of NCBI NO: 15234269 NR Description: hypothetical protein [Arabidopsis thaliana]
  misc_feature (24)..(573): Homolog of NCBI NO: 25518293 NR Description: hypothetical protein F13K23.2 - Arabidopsis >gi|8698724|gb|AAF78482.1|AC012187_2 Contains similarity to an protein F16M19.7 gi|6598837 from Arabidopsis thaliana BAC
MGMVNQSVLVYERLDSNMKNSQVRNVVVDVLLRNGLVDDAFKVLDEMLQKESVFPPNRITADIVLHEVWKGRLLTEEKIIALISRFSSHGVSPNSVWLTRFISSLCKNARANAAWDILSDLMKNKTPLEAPPFNALLSCLGRNMDISRMNDLVLKMDEVKIRPDVVTLGILINTLCKSRRVDEALEVFEKMRGKRTDDGNVIKADSIHFNTLIDGLCKVGRLKEAEELLVRMKLEERCAPNAVTYNCLIDGYCRAGKLETAKEVVSRMKEDEIKPNVVTVNTIVGGMCRHHGLNMAVVFFMDMEKEGVKGNVVTYMTLIHACCSVSNVEKAMYWYEKMLEAGCSPDAKIYYALISGLCQVRRDHDAIRVVEKLKEGGFSLDLLAYNMLIGLFCDKNNTEKVYEMLTDMEKEGKKPDSITYNTLISFFGKHKDFESVERMMEQMREDGLDPTVTTYGAVIDAYCSVGELDEALKLFKDMGLHSKVNPNTVIYNILINAFSKLGNFGQALSLKEEMKMKMVRPNVETYNALFKCLNEKTQGETLLKLMDEMVEQSCEPNQITMEILMERLSGSDELVKLRKFMQGYSVASPTEKASPFDVFSLG

SEQ ID NO: 100859 - DNA, 954 bp, Arabidopsis thaliana
  misc_feature (1)..(954): Ceres Seq. ID no. 13606198
  misc_feature: MA Experiment ID: 20000180 Result: Down-regulated in Transcription
  misc_feature: MA Experiment 20000180 PARAMETER Experiment Name: At_Germinating_Seeds_P Parameter: Age (hr) Value: 24 vs. 0
  misc_feature: MA Experiment 20000180 PARAMETER Experiment Name: At_Germinating_Seeds_P Parameter: Tissue Value: Germinating Seeds
  misc_feature: MA Experiment ID: 20000184 Result: Down-regulated in Transcription
  misc_feature: MA Experiment 20000184 PARAMETER Experiment Name: At_Shoots__P Parameter: Age (day) Value: 7
  misc_feature: MA Experiment 20000184 PARAMETER Experiment Name: At_Shoots__P Parameter: Tissue Value: Shoots vs. Whole Plant
  misc_feature: MA Experiment ID: 20000185 Result: Up-regulated in Transcription
  misc_feature: MA Experiment 20000185 PARAMETER Experiment Name: At_Roots__P Parameter: Age (day) Value: 7 vs. 21
  misc_feature: MA Experiment 20000185 PARAMETER Experiment Name: At_Roots__P Parameter: Organism Value: A. thaliana
  misc_feature: MA Experiment 20000185 PARAMETER Experiment Name: At_Roots__P Parameter: Tissue Value: Roots vs. Whole Plant
  misc_feature: MA Experiment ID: 20000234 Result: Up-regulated in Transcription
  misc_feature: MA Experiment 20000234 PARAMETER Experiment Name: At_Siliques_P Parameter: Age (day) Value: 21
  misc_feature: MA Experiment 20000234 PARAMETER Experiment Name: At_Siliques_P Parameter: Organism Value: A. thaliana
  misc_feature: MA Experiment 20000234 PARAMETER Experiment Name: At_Siliques_P Parameter: Plant Line Value: WS
  misc_feature: MA Experiment 20000234 PARAMETER Experiment Name: At_Siliques_P Parameter: Tissue Value: Less Than 5mm Siliques vs. Whole Plant
  misc_feature: MA Experiment ID: 20001558 Result: Up-regulated in Transcription
  misc_feature: MA Experiment 20001558 PARAMETER Experiment Name: At_Drought_Soil_Dry_P Parameter: Age (day) Value: 27
  misc_feature: MA Experiment 20001558 PARAMETER Experiment Name: At_Drought_Soil_Dry_P Parameter: Organism Value: A. thaliana
  misc_feature: MA Experiment 20001558 PARAMETER Experiment Name: At_Drought_Soil_Dry_P Parameter: Plant Line Value: WS
  misc_feature: MA Experiment 20001558 PARAMETER Experiment Name: At_Drought_Soil_Dry_P Parameter: Post Timepoint (hr) Value: 6
  misc_feature: MA Experiment 20001558 PARAMETER Experiment Name: At_Drought_Soil_Dry_P Parameter: Post-Treatment Value: Re-Water vs. No Drought
  misc_feature: MA Experiment 20001558 PARAMETER Experiment Name: At_Drought_Soil_Dry_P Parameter: Timepoint (day) Value: 13
  misc_feature: MA Experiment 20001558 PARAMETER Experiment Name: At_Drought_Soil_Dry_P Parameter: Treatment Value: Drought vs. No Drought
  misc_feature: MA Experiment ID: 20001560 Result: Up-regulated in Transcription
  misc_feature: MA Experiment 20001560 PARAMETER Experiment Name: At_Drought_Soil_Dry_P Parameter: Age (day) Value: 28
  misc_feature: MA Experiment 20001560 PARAMETER Experiment Name: At_Drought_Soil_Dry_P Parameter: Organism Value: A. thaliana
  misc_feature: MA Experiment 20001560 PARAMETER Experiment Name: At_Drought_Soil_Dry_P Parameter: Plant Line Value: WS
  misc_feature: MA Experiment 20001560 PARAMETER Experiment Name: At_Drought_Soil_Dry_P Parameter: Post Timepoint (hr) Value: None
  misc_feature: MA Experiment 20001560 PARAMETER Experiment Name: At_Drought_Soil_Dry_P Parameter: Post-Treatment Value: None
  misc_feature: MA Experiment 20001560 PARAMETER Experiment Name: At_Drought_Soil_Dry_P Parameter: Timepoint (day) Value: 14
  misc_feature: MA Experiment 20001560 PARAMETER Experiment Name: At_Drought_Soil_Dry_P Parameter: Treatment Value: Drought vs. No Drought
aatctttatgttgtcgacactctttcagttctctcgacgccgtccatcgccctccgtcatatcgccgccgctaaagtactggcagagagttcacaacaatggagtacgtaaaccctgaaggtcttcgattagatggtcgccgattcaacgagatgaggcaaatcgtagctgaagttggagttgtttctaaggctgacggttctgctgtcttcgagatgggtaataccaaagtaattgcagctgtttatggtccaagagagattcaaaacaagagccagcaaaagaagaacgaccatgcagtggtgttgtgtgagtatagtatggctcagtttagtactggtgatcgtagaagacagaaattcgacaggcgatcaacagagctatctcttgtcatccgtcagacaatggaagcttgcatattaaccgaattgatgcctcactctcagatcgatattttccttcaggttctacaagctgatggaggaacaagatcagcttgtatcaatgccgcgactctagctctagcagatgctggaattccaatgcgtgatctcgctgtttcctgtagtgctggatatttaaacagtactcctcttcttgatctgaactatgttgaagacagtgctggaggagctgatgtaaccgtcggtattctacctaaattagacaaagtgtcactccttcagatggatgccaagttaccgatggaaacatttgagacagtgtttgcattggcttctgaaggttgcaaggcaattgcagagagaatacgcgaggtacttcaagaaaacaccaaacagctagagtatcgccgagctgcataaactttagagttagagaaaaaaacgtaaagctccaagatttttgttaattagattttgctgttgtttgtggaagttgaggataaaaagctagtagtgcaaactctttttgggaaaaatgaatcaatttgat

SEQ ID NO: 100860 - protein, 241 aa, Arabidopsis thaliana
  peptide (1)..(241): Ceres Seq. ID no. 13606199
  misc_feature (18)..(148): Pfam Name: 3' exoribonuclease family, domain 1 Pfam Description: 3' exoribonuclease family, domain 1
  misc_feature (1)..(241): Homolog of NCBI NO: 15233167 NR Description: exonuclease RRP41 [Arabidopsis thaliana]
  misc_feature (1)..(234): Homolog of NCBI NO: 9506689 NR Description: exosome complex exonuclease RRP41; exosome
  misc_feature (1)..(234): Homolog of NCBI NO: 34866849 NR Description: similar to putative exosome complex exonuclease
  misc_feature (1)..(234): Homolog of NCBI NO: 29611663 NR Description: exosome complex exonuclease RRP41 [Mus musculus] Exosome complex exonuclease RRP41 (Ribosomal RNA processing
  misc_feature (1)..(230): Homolog of NCBI NO: 33411774 NR Description: putative exosome complex exonuclease RRP41 [Bos
  misc_feature (1)..(230): Homolog of NCBI NO: 18977940 NR Description: ribonuclease ph (rph) [Pyrococcus furiosus DSM >gi|29336822|sp|Q8U0L9|ECX1_PYRFU Probable exosome complex
  misc_feature (1)..(230): Homolog of NCBI NO: 14591333 NR Description: hypothetical protein [Pyrococcus horikoshii]
  misc_feature (4)..(230): Homolog of NCBI NO: 20093819 NR Description: Predicted exosome subunit, RNase PH [Methanopyrus AV19] >gi|29336819|sp|Q8TYC1|ECX1_METKA Probable exosome complex
  misc_feature (1)..(230): Homolog of NCBI NO: 14520826 NR Description: ribonuclease PH [Pyrococcus abyssi]
  misc_feature (2)..(235): Homolog of NCBI NO: 31240059 NR Description: ENSANGP00000017010 [Anopheles gambiae] ENSANGP00000009222 [Anopheles gambiae] ENSANGP00000017010 [Anopheles gambiae str. PEST]
MEYVNPEGLRLDGRRFNEMRQIVAEVGVVSKADGSAVFEMGNTKVIAAVYGPREIQNKSQQKKNDHAVVLCEYSMAQFSTGDRRRQKFDRRSTELSLVIRQTMEACILTELMPHSQIDIFLQVLQADGGTRSACINAATLALADAGIPMRDLAVSCSAGYLNSTPLLDLNYVEDSAGGADVTVGILPKLDKVSLLQMDAKLPMETFETVFALASEGCKAIAERIREVLQENTKQLEYRRAA

SEQ ID NO: 100861 - protein, 223 aa, Arabidopsis thaliana
  peptide (1)..(223): Ceres Seq. ID no. 13606200
  misc_feature (1)..(130): Pfam Name: 3' exoribonuclease family, domain 1 Pfam Description: 3' exoribonuclease family, domain 1
  misc_feature (1)..(223): Homolog of NCBI NO: 15233167 NR Description: exonuclease RRP41 [Arabidopsis thaliana]
  misc_feature (1)..(216): Homolog of NCBI NO: 9506689 NR Description: exosome complex exonuclease RRP41; exosome
  misc_feature (1)..(216): Homolog of NCBI NO: 34866849 NR Description: similar to putative exosome complex exonuclease
  misc_feature (1)..(216): Homolog of NCBI NO: 29611663 NR Description: exosome complex exonuclease RRP41 [Mus musculus] Exosome complex exonuclease RRP41 (Ribosomal RNA processing
  misc_feature (1)..(212): Homolog of NCBI NO: 33411774 NR Description: putative exosome complex exonuclease RRP41 [Bos
  misc_feature (1)..(212): Homolog of NCBI NO: 18977940 NR Description: ribonuclease ph (rph) [Pyrococcus furiosus DSM >gi|29336822|sp|Q8U0L9|ECX1_PYRFU Probable exosome complex
  misc_feature (1)..(212): Homolog of NCBI NO: 14591333 NR Description: hypothetical protein [Pyrococcus horikoshii]
  misc_feature (1)..(212): Homolog of NCBI NO: 20093819 NR Description: Predicted exosome subunit, RNase PH [Methanopyrus AV19] >gi|29336819|sp|Q8TYC1|ECX1_METKA Probable exosome complex
  misc_feature (1)..(212): Homolog of NCBI NO: 14520826 NR Description: ribonuclease PH [Pyrococcus abyssi]
  misc_feature (1)..(217): Homolog of NCBI NO: 31240059 NR Description: ENSANGP00000017010 [Anopheles gambiae] ENSANGP00000009222 [Anopheles gambiae] ENSANGP00000017010 [Anopheles gambiae str. PEST]
MRQIVAEVGVVSKADGSAVFEMGNTKVIAAVYGPREIQNKSQQKKNDHAVVLCEYSMAQFSTGDRRRQKFDRRSTELSLVIRQTMEACILTELMPHSQIDIFLQVLQADGGTRSACINAATLALADAGIPMRDLAVSCSAGYLNSTPLLDLNYVEDSAGGADVTVGILPKLDKVSLLQMDAKLPMETFETVFALASEGCKAIAERIREVLQENTKQLEYRRAA

SEQ ID NO: 100862 - protein, 202 aa, Arabidopsis thaliana
  peptide (1)..(202): Ceres Seq. ID no. 13606201
  misc_feature (1)..(109): Pfam Name: 3' exoribonuclease family, domain 1 Pfam Description: 3' exoribonuclease family, domain 1
  misc_feature (1)..(202): Homolog of NCBI NO: 15233167 NR Description: exonuclease RRP41 [Arabidopsis thaliana]
  misc_feature (1)..(195): Homolog of NCBI NO: 9506689 NR Description: exosome complex exonuclease RRP41; exosome
  misc_feature (1)..(195): Homolog of NCBI NO: 34866849 NR Description: similar to putative exosome complex exonuclease
  misc_feature (1)..(195): Homolog of NCBI NO: 29611663 NR Description: exosome complex exonuclease RRP41 [Mus musculus] Exosome complex exonuclease RRP41 (Ribosomal RNA processing
  misc_feature (1)..(191): Homolog of NCBI NO: 33411774 NR Description: putative exosome complex exonuclease RRP41 [Bos
  misc_feature (1)..(191): Homolog of NCBI NO: 18977940 NR Description: ribonuclease ph (rph) [Pyrococcus furiosus DSM >gi|29336822|sp|Q8U0L9|ECX1_PYRFU Probable exosome complex
  misc_feature (1)..(191): Homolog of NCBI NO: 14591333 NR Description: hypothetical protein [Pyrococcus horikoshii]
  misc_feature (1)..(191): Homolog of NCBI NO: 20093819 NR Description: Predicted exosome subunit, RNase PH [Methanopyrus AV19] >gi|29336819|sp|Q8TYC1|ECX1_METKA Probable exosome complex
  misc_feature (1)..(191): Homolog of NCBI NO: 14520826 NR Description: ribonuclease PH [Pyrococcus abyssi]
  misc_feature (1)..(196): Homolog of NCBI NO: 31240059 NR Description: ENSANGP00000017010 [Anopheles gambiae] ENSANGP00000009222 [Anopheles gambiae] ENSANGP00000017010 [Anopheles gambiae str. PEST]
MGNTKVIAAVYGPREIQNKSQQKKNDHAVVLCEYSMAQFSTGDRRRQKFDRRSTELSLVIRQTMEACILTELMPHSQIDIFLQVLQADGGTRSACINAATLALADAGIPMRDLAVSCSAGYLNSTPLLDLNYVEDSAGGADVTVGILPKLDKVSLLQMDAKLPMETFETVFALASEGCKAIAERIREVLQENTKQLEYRRAA

SEQ ID NO: 100863 - DNA, 1227 bp, Arabidopsis thaliana
  misc_feature (1)..(1227): Ceres Seq. ID no. 13606202
  misc_feature: MA Experiment ID: 108576 Result: Up-regulated in Transcription
  misc_feature: MA Experiment 108576 PARAMETER Experiment Name: At_42deg_Heat_cDNA_P Parameter: Temperature (deg C) Value: 42 vs. 22
  misc_feature: MA Experiment 108576 PARAMETER Experiment Name: At_42deg_Heat_cDNA_P Parameter: Timepoint (hr) Value: 1
  misc_feature: MA Experiment 108576 PARAMETER Experiment Name: At_42deg_Heat_cDNA_P Parameter: Tissue Value: Aerial
  misc_feature: MA Experiment ID: 108577 Result: Up-regulated in Transcription
  misc_feature: MA Experiment 108577 PARAMETER Experiment Name: At_42deg_Heat_cDNA_P Parameter: Temperature (deg C) Value: 42 vs. 22
  misc_feature: MA Experiment 108577 PARAMETER Experiment Name: At_42deg_Heat_cDNA_P Parameter: Timepoint (hr) Value: 6
  misc_feature: MA Experiment 108577 PARAMETER Experiment Name: At_42deg_Heat_cDNA_P Parameter: Tissue Value: Aerial
  misc_feature: MA Experiment ID: 20001906 Result: Down-regulated in Transcription
  misc_feature: MA Experiment 20001906 PARAMETER Experiment Name: At_Drought_Reproduction_P Parameter: Age (day) Value: 35
  misc_feature: MA Experiment 20001906 PARAMETER Experiment Name: At_Drought_Reproduction_P Parameter: Organism Value: A. thaliana
  misc_feature: MA Experiment 20001906 PARAMETER Experiment Name: At_Drought_Reproduction_P Parameter: Plant Line Value: WS
  misc_feature: MA Experiment 20001906 PARAMETER Experiment Name: At_Drought_Reproduction_P Parameter: Timepoint (day) Value: 5
  misc_feature: MA Experiment 20001906 PARAMETER Experiment Name: At_Drought_Reproduction_P Parameter: Tissue Value: Siliques
  misc_feature: MA Experiment 20001906 PARAMETER Experiment Name: At_Drought_Reproduction_P Parameter: Treatment Value: Drought vs. No Drought
cgttctattttcttctcctttttctatctttagcaatgaacatatcagtaaacggacagtcacaagtacctcctggctttaggtttcacccaaccgaggaagagctcttgaagtattacctccgcaagaaaatctctaacatcaagatcgatctcgatgttattcctgacattgatctcaacaagctcgagccttgggatattcaagagatgtgtaagattggaacgacgccgcaaaacgattggtacttttatagccataaggacaagaagtatcccaccgggactagaaccaacagagccaccacggtcggattttggaaagcgacgggacgtgacaagaccatatataccaatggtgatagaatcgggatgcgaaagacgcttgtcttctacaaaggtcgagcccctcatggtcagaaatccgattggatcatgcacgaatatagactcgacgagagtgtattaatctcctcgtgtggcgatcatgacgtcaacgtagaaacgtgtgatgtcataggaagtgacgaaggatgggtggtgtgtcgtgttttcaagaaaaataacctttgcaaaaacatgattagtagtagcccggcgagttcggtgaaaacgccgtcgttcaatgaggagactatcgagcaacttctcgaagttatggggcaatcttgtaaaggagagatagttttagaccctttcttaaaactccctaacctcgaatgccataacaacaccaccatcacgagttatcagtggttaatcgacgaccaagtcaacaactgccacgtcagcaaagttatggatcccagcttcatcactagctgggccgctttggatcggctcgttgcctcacagttaaatgggcccaactcgtattcaataccagccgttaatgagacttcacaatcaccgtatcatggactgaaccggtccggttgtaataccggtttaacaccagattactatataccggagattgatttatggaacgaggcagatttcgcgagaacgacatgccacttgttgaacggtagtggataacggaaatggaagagaggaagtgactaagtgagtgacataccaaaacattgtgtagaaagatataataatcatcataccatatatatagttgttgaaacttttacggtataaatggtcagattgtgataattacagtacgtagttatgtgatatcattacagaaaataaaagttctctatatctgtgt

SEQ ID NO: 100864 - protein, 345 aa, Arabidopsis thaliana
  peptide (1)..(345): Ceres Seq. ID no. 13606203
  misc_feature (22)..(151): Pfam Name: No apical meristem (NAM) protein Pfam Description: No apical meristem (NAM) protein
  misc_feature (12)..(345): Homolog of NCBI NO: 15228643 NR Description: No apical meristem (NAM) protein family
  misc_feature (12)..(345): Homolog of NCBI NO: 21536577 NR Description: NAM-like protein [Arabidopsis thaliana]
  misc_feature (8)..(299): Homolog of NCBI NO: 7485760 NR Description: NAM (no apical meristem)-like protein [imported] -
  misc_feature (8)..(299): Homolog of NCBI NO: 30690500 NR Description: No apical meristem (NAM) protein family
  misc_feature (8)..(299): Homolog of NCBI NO: 27754598 NR Description: putative NAM (no apical meristem) protein
  misc_feature (12)..(219): Homolog of NCBI NO: 15223299 NR Description: No apical meristem (NAM) protein family
  misc_feature (12)..(200): Homolog of NCBI NO: 6006373 NR Description: Similar to NAM like protein (AC005310) [Oryza
  misc_feature (12)..(204): Homolog of NCBI NO: 15235031 NR Description: No apical meristem (NAM) protein family
  misc_feature (15)..(251): Homolog of NCBI NO: 15217491 NR Description: No apical meristem (NAM) protein family
  misc_feature (14)..(188): Homolog of NCBI NO: 15219419 NR Description: NAM (no apical meristem) protein -related thaliana] >gi|7715611|gb|AAF68129.1|AC010793_24 F20B17.1
FYFLLLFLSLAMNISVNGQSQVPPGFRFHPTEEELLKYYLRKKISNIKIDLDVIPDIDLNKLEPWDIQEMCKIGTTPQNDWYFYSHKDKKYPTGTRTNRATTVGFWKATGRDKTIYTNGDRIGMRKTLVFYKGRAPHGQKSDWIMHEYRLDESVLISSCGDHDVNVETCDVIGSDEGWVVCRVFKKNNLCKNMISSSPASSVKTPSFNEETIEQLLEVMGQSCKGEIVLDPFLKLPNLECHNNTTITSYQWLIDDQVNNCHVSKVMDPSFITSWAALDRLVASQLNGPNSYSIPAVNETSQSPYHGLNRSGCNTGLTPDYYIPEIDLWNEADFARTTCHLLNGSG

SEQ ID NO: 100865 - protein, 334 aa, Arabidopsis thaliana
  peptide (1)..(334): Ceres Seq. ID no. 13606204
  misc_feature (11)..(140): Pfam Name: No apical meristem (NAM) protein Pfam Description: No apical meristem (NAM) protein
  misc_feature (1)..(334): Homolog of NCBI NO: 15228643 NR Description: No apical meristem (NAM) protein family
  misc_feature (1)..(334): Homolog of NCBI NO: 21536577 NR Description: NAM-like protein [Arabidopsis thaliana]
  misc_feature (1)..(288): Homolog of NCBI NO: 7485760 NR Description: NAM (no apical meristem)-like protein [imported] -
  misc_feature (1)..(288): Homolog of NCBI NO: 30690500 NR Description: No apical meristem (NAM) protein family
  misc_feature (1)..(288): Homolog of NCBI NO: 27754598 NR Description: putative NAM (no apical meristem) protein
  misc_feature (1)..(208): Homolog of NCBI NO: 15223299 NR Description: No apical meristem (NAM) protein family
  misc_feature (1)..(189): Homolog of NCBI NO: 6006373 NR Description: Similar to NAM like protein (AC005310) [Oryza
  misc_feature (1)..(193): Homolog of NCBI NO: 15235031 NR Description: No apical meristem (NAM) protein family
  misc_feature (4)..(240): Homolog of NCBI NO: 15217491 NR Description: No apical meristem (NAM) protein family
  misc_feature (3)..(177): Homolog of NCBI NO: 15219419 NR Description: NAM (no apical meristem) protein -related thaliana] >gi|7715611|gb|AAF68129.1|AC010793_24 F20B17.1
MNISVNGQSQVPPGFRFHPTEEELLKYYLRKKISNIKIDLDVIPDIDLNKLEPWDIQEMCKIGTTPQNDWYFYSHKDKKYPTGTRTNRATTVGFWKATGRDKTIYTNGDRIGMRKTLVFYKGRAPHGQKSDWIMHEYRLDESVLISSCGDHDVNVETCDVIGSDEGWVVCRVFKKNNLCKNMISSSPASSVKTPSFNEETIEQLLEVMGQSCKGEIVLDPFLKLPNLECHNNTTITSYQWLIDDQVNNCHVSKVMDPSFITSWAALDRLVASQLNGPNSYSIPAVNETSQSPYHGLNRSGCNTGLTPDYYIPEIDLWNEADFARTTCHLLNGSG

SEQ ID NO: 100866 - protein, 276 aa, Arabidopsis thaliana
  peptide (1)..(276): Ceres Seq. ID no. 13606205
  misc_feature (1)..(82): Pfam Name: No apical meristem (NAM) protein Pfam Description: No apical meristem (NAM) protein
  misc_feature (1)..(276): Homolog of NCBI NO: 15228643 NR Description: No apical meristem (NAM) protein family
  misc_feature (1)..(276): Homolog of NCBI NO: 21536577 NR Description: NAM-like protein [Arabidopsis thaliana]
  misc_feature (1)..(230): Homolog of NCBI NO: 7485760 NR Description: NAM (no apical meristem)-like protein [imported] -
  misc_feature (1)..(230): Homolog of NCBI NO: 30690500 NR Description: No apical meristem (NAM) protein family
  misc_feature (1)..(230): Homolog of NCBI NO: 27754598 NR Description: putative NAM (no apical meristem) protein
  misc_feature (1)..(150): Homolog of NCBI NO: 15223299 NR Description: No apical meristem (NAM) protein family
  misc_feature (1)..(131): Homolog of NCBI NO: 6006373 NR Description: Similar to NAM like protein (AC005310) [Oryza
  misc_feature (1)..(135): Homolog of NCBI NO: 15235031 NR Description: No apical meristem (NAM) protein family
  misc_feature (1)..(182): Homolog of NCBI NO: 15217491 NR Description: No apical meristem (NAM) protein family
  misc_feature (1)..(119): Homolog of NCBI NO: 15219419 NR Description: NAM (no apical meristem) protein -related thaliana] >gi|7715611|gb|AAF68129.1|AC010793_24 F20B17.1
MCKIGTTPQNDWYFYSHKDKKYPTGTRTNRATTVGFWKATGRDKTIYTNGDRIGMRKTLVFYKGRAPHGQKSDWIMHEYRLDESVLISSCGDHDVNVETCDVIGSDEGWVVCRVFKKNNLCKNMISSSPASSVKTPSFNEETIEQLLEVMGQSCKGEIVLDPFLKLPNLECHNNTTITSYQWLIDDQVNNCHVSKVMDPSFITSWAALDRLVASQLNGPNSYSIPAVNETSQSPYHGLNRSGCNTGLTPDYYIPEIDLWNEADFARTTCHLLNGSG

SEQ ID NO: 100867 - DNA, 1853 bp, Arabidopsis thaliana
  misc_feature (1)..(1853): Ceres Seq. ID no. 13606237
  misc_feature: MA Experiment ID: 20000180 Result: Down-regulated in Transcription
  misc_feature: MA Experiment 20000180 PARAMETER Experiment Name: At_Germinating_Seeds_P Parameter: Age (hr) Value: 24 vs. 0
  misc_feature: MA Experiment 20000180 PARAMETER Experiment Name: At_Germinating_Seeds_P Parameter: Tissue Value: Germinating Seeds
  misc_feature: MA Experiment ID: 20000184 Result: Down-regulated in Transcription
  misc_feature: MA Experiment 20000184 PARAMETER Experiment Name: At_Shoots__P Parameter: Age (day) Value: 7
  misc_feature: MA Experiment 20000184 PARAMETER Experiment Name: At_Shoots__P Parameter: Tissue Value: Shoots vs. Whole Plant
  misc_feature: MA Experiment ID: 20000227 Result: Up-regulated in Transcription
  misc_feature: MA Experiment 20000227 PARAMETER Experiment Name: At_Root-Tips-vs-Tops_P Parameter: Tissue Value: Root Tips vs. Root Tops
  misc_feature: MA Experiment ID: 20000234 Result: Up-regulated in Transcription
  misc_feature: MA Experiment 20000234 PARAMETER Experiment Name: At_Siliques_P Parameter: Age (day) Value: 21
  misc_feature: MA Experiment 20000234 PARAMETER Experiment Name: At_Siliques_P Parameter: Organism Value: A. thaliana
  misc_feature: MA Experiment 20000234 PARAMETER Experiment Name: At_Siliques_P Parameter: Plant Line Value: WS
  misc_feature: MA Experiment 20000234 PARAMETER Experiment Name: At_Siliques_P Parameter: Tissue Value: Less Than 5mm Siliques vs. Whole Plant
  misc_feature: MA Experiment ID: 20000437 Result: Down-regulated in Transcription
  misc_feature: MA Experiment 20000437 PARAMETER Experiment Name: At_Drought_P Parameter: Age (day) Value: 8
  misc_feature: MA Experiment 20000437 PARAMETER Experiment Name: At_Drought_P Parameter: Organism Value: A. thaliana
  misc_feature: MA Experiment 20000437 PARAMETER Experiment Name: At_Drought_P Parameter: Plant Line Value: WS
  misc_feature: MA Experiment 20000437 PARAMETER Experiment Name: At_Drought_P Parameter: Timepoint (hr) Value: 24
  misc_feature: MA Experiment 20000437 PARAMETER Experiment Name: At_Drought_P Parameter: Tissue Value: Whole Plant
  misc_feature: MA Experiment 20000437 PARAMETER Experiment Name: At_Drought_P Parameter: Treatment Value: Drought vs. No Drought
  misc_feature: MA Experiment ID: 20000452 Result: Down-regulated in Transcription
  misc_feature: MA Experiment 20000452 PARAMETER Experiment Name: At_CS6879_Shoots-Roots_P Parameter: Age (day) Value: 14
  misc_feature: MA Experiment 20000452 PARAMETER Experiment Name: At_CS6879_Shoots-Roots_P Parameter: Organism Value: A. thaliana
  misc_feature: MA Experiment 20000452 PARAMETER Experiment Name: At_CS6879_Shoots-Roots_P Parameter: Plant Line Value: CS6879 vs. WS
  misc_feature: MA Experiment 20000452 PARAMETER Experiment Name: At_CS6879_Shoots-Roots_P Parameter: Tissue Value: Shoots
  misc_feature: MA Experiment ID: 20000456 Result: Up-regulated in Transcription
  misc_feature: MA Experiment 20000456 PARAMETER Experiment Name: At_100uM_BA_P Parameter: Age (day) Value: 14
  misc_feature: MA Experiment 20000456 PARAMETER Experiment Name: At_100uM_BA_P Parameter: Organism Value: A. thaliana
  misc_feature: MA Experiment 20000456 PARAMETER Experiment Name: At_100uM_BA_P Parameter: Plant Line Value: WS
  misc_feature: MA Experiment 20000456 PARAMETER Experiment Name: At_100uM_BA_P Parameter: Timepoint (hr) Value: 6
  misc_feature: MA Experiment 20000456 PARAMETER Experiment Name: At_100uM_BA_P Parameter: Tissue Value: Aerial
  misc_feature: MA Experiment 20000456 PARAMETER Experiment Name: At_100uM_BA_P Parameter: Treatment Value: 100uM BA vs. No Treatment
  misc_feature: MA Experiment ID: 20000495 Result: Up-regulated in Transcription
  misc_feature: MA Experiment 20000495 PARAMETER Experiment Name: At_Guard_Cells_P Parameter: Harvest Date Value: 8/2/2002
  misc_feature: MA Experiment 20000495 PARAMETER Experiment Name: At_Guard_Cells_P Parameter: Organism Value: A. thaliana
  misc_feature: MA Experiment 20000495 PARAMETER Experiment Name: At_Guard_Cells_P Parameter: Tissue Value: Guard Cells vs. Leaves
  misc_feature: MA Experiment ID: 20001247 Result: Down-regulated in Transcription
  misc_feature: MA Experiment 20001247 PARAMETER Experiment Name: At_Far-red-induction_P Parameter: Age (day) Value: 7
  misc_feature: MA Experiment 20001247 PARAMETER Experiment Name: At_Far-red-induction_P Parameter: Light Value: Far-red vs. White
  misc_feature: MA Experiment 20001247 PARAMETER Experiment Name: At_Far-red-induction_P Parameter: Organism Value: A. thaliana
  misc_feature: MA Experiment 20001247 PARAMETER Experiment Name: At_Far-red-induction_P Parameter: Plant Line Value: Columbia
  misc_feature: MA Experiment 20001247 PARAMETER Experiment Name: At_Far-red-induction_P Parameter: Timepoint (hr) Value: 1
  misc_feature: MA Experiment 20001247 PARAMETER Experiment Name: At_Far-red-induction_P Parameter: Tissue Value: Whole Plant
  misc_feature: MA Experiment ID: 20001458 Result: Up-regulated in Transcription
  misc_feature: MA Experiment 20001458 PARAMETER Experiment Name: At_50mM_NH4NO3_L-to-H_P Parameter: Age (day) Value: Undefined
  misc_feature: MA Experiment 20001458 PARAMETER Experiment Name: At_50mM_NH4NO3_L-to-H_P Parameter: Organism Value: Undefined
  misc_feature: MA Experiment 20001458 PARAMETER Experiment Name: At_50mM_NH4NO3_L-to-H_P Parameter: Plant Line Value: Undefined
  misc_feature: MA Experiment 20001458 PARAMETER Experiment Name: At_50mM_NH4NO3_L-to-H_P Parameter: Timepoint (hr) Value: 2
  misc_feature: MA Experiment 20001458 PARAMETER Experiment Name: At_50mM_NH4NO3_L-to-H_P Parameter: Tissue Value: Siliques
  misc_feature: MA Experiment 20001458 PARAMETER Experiment Name: At_50mM_NH4NO3_L-to-H_P Parameter: Treatment Value: 50mM NH4NO3 vs. 100mM Manitol
  misc_feature: MA Experiment ID: 20001557 Result: Up-regulated in Transcription
  misc_feature: MA Experiment 20001557 PARAMETER Experiment Name: At_Drought_Soil_Dry_P Parameter: Age (day) Value: 27
  misc_feature: MA Experiment 20001557 PARAMETER Experiment Name: At_Drought_Soil_Dry_P Parameter: Organism Value: A. thaliana
  misc_feature: MA Experiment 20001557 PARAMETER Experiment Name: At_Drought_Soil_Dry_P Parameter: Plant Line Value: WS
  misc_feature: MA Experiment 20001557 PARAMETER Experiment Name: At_Drought_Soil_Dry_P Parameter: Post Timepoint (hr) Value: 3
  misc_feature: MA Experiment 20001557 PARAMETER Experiment Name: At_Drought_Soil_Dry_P Parameter: Post-Treatment Value: Re-Water vs. No Drought
  misc_feature: MA Experiment 20001557 PARAMETER Experiment Name: At_Drought_Soil_Dry_P Parameter: Timepoint (day) Value: 13
  misc_feature: MA Experiment 20001557 PARAMETER Experiment Name: At_Drought_Soil_Dry_P Parameter: Treatment Value: Drought vs. No Drought
  misc_feature: MA Experiment ID: 20001558 Result: Up-regulated in Transcription
  misc_feature: MA Experiment 20001558 PARAMETER Experiment Name: At_Drought_Soil_Dry_P Parameter: Age (day) Value: 27
  misc_feature: MA Experiment 20001558 PARAMETER Experiment Name: At_Drought_Soil_Dry_P Parameter: Organism Value: A. thaliana
  misc_feature: MA Experiment 20001558 PARAMETER Experiment Name: At_Drought_Soil_Dry_P Parameter: Plant Line Value: WS
  misc_feature: MA Experiment 20001558 PARAMETER Experiment Name: At_Drought_Soil_Dry_P Parameter: Post Timepoint (hr) Value: 6
  misc_feature: MA Experiment 20001558 PARAMETER Experiment Name: At_Drought_Soil_Dry_P Parameter: Post-Treatment Value: Re-Water vs. No Drought
  misc_feature: MA Experiment 20001558 PARAMETER Experiment Name: At_Drought_Soil_Dry_P Parameter: Timepoint (day) Value: 13
  misc_feature: MA Experiment 20001558 PARAMETER Experiment Name: At_Drought_Soil_Dry_P Parameter: Treatment Value: Drought vs. No Drought
  misc_feature: MA Experiment ID: 20001560 Result: Up-regulated in Transcription
  misc_feature: MA Experiment 20001560 PARAMETER Experiment Name: At_Drought_Soil_Dry_P Parameter: Age (day) Value: 28
  misc_feature: MA Experiment 20001560 PARAMETER Experiment Name: At_Drought_Soil_Dry_P Parameter: Organism Value: A. thaliana
  misc_feature: MA Experiment 20001560 PARAMETER Experiment Name: At_Drought_Soil_Dry_P Parameter: Plant Line Value: WS
  misc_feature: MA Experiment 20001560 PARAMETER Experiment Name: At_Drought_Soil_Dry_P Parameter: Post Timepoint (hr) Value: None
  misc_feature: MA Experiment 20001560 PARAMETER Experiment Name: At_Drought_Soil_Dry_P Parameter: Post-Treatment Value: None
  misc_feature: MA Experiment 20001560 PARAMETER Experiment Name: At_Drought_Soil_Dry_P Parameter: Timepoint (day) Value: 14
  misc_feature: MA Experiment 20001560 PARAMETER Experiment Name: At_Drought_Soil_Dry_P Parameter: Treatment Value: Drought vs. No Drought
  misc_feature: MA Experiment ID: 20001757 Result: Up-regulated in Transcription
  misc_feature: MA Experiment 20001757 PARAMETER Experiment Name: At_50mM_NH4NO3_L-to-H_P Parameter: Timepoint (hr) Value: 6
  misc_feature: MA Experiment 20001757 PARAMETER Experiment Name: At_50mM_NH4NO3_L-to-H_P Parameter: Tissue Value: Leaf
  misc_feature: MA Experiment 20001757 PARAMETER Experiment Name: At_50mM_NH4NO3_L-to-H_P Parameter: Treatment Value: 50mM NH4NO3 vs 100mM Mannitol
ccccccccccccccggcggctcctgattttagctctctctaaagctgtagttgtgcgttaaccctctaaggagcttgtaaaaatgctaatactgtttgagacgccaggtggttttgccatcttcaaagtattaaacgaaggaaagctctctaatgttgaggatttgggtaatgagttctcgaccgcaaagttagcccgaaagatggtgaagctagtagcttttgacaagtttgacaacacagctgaagctcttgaagcagtggctaaattgcttgagggaactccaagcaagggtctacgcaagtttttgaaagctaactgtgttggtgaaacattagctgttgctgattctaagcttggaaatatcatcaaggagaaactgaaaatagtctgtgttcacaacaatgctgttatggagctgttaagaggtatcagaagccagctaactgaacttatatctggattgggtgatcaagatctaggtccaatgagcttggggttgtctcacagccttgccagatataaactaaagttcagttccgacaaggtggataccatgataatccaagctattggtctgcttgatgatcttgacaaagagcttaacacttacgctatgagggttcgtgaatggtttggttggcattttcctgagcttgctaagatcgtacaggacaatatcttatatgccaaggctgttaaactaatggggaatcggattaatgctgcaaagctagacttctctgagatattggctgatgaaattgaagcagaactgaaagaggctgctgtgatatctatgggaactgaagtcagtgaccttgatttattgcacatccgagaactctgtgaccaggttctttctcttgccgagtacagagctcagctttatgactacttgaagagcagaatgaacacaattgcaccaaatctaactgcccttgtcggggagctagtcggtgctcgcttaatatctcacggtggtagtttgttgaacctcgcaaagcaacctggaagcacggttcagattcttggagctgaaaaagccttatttagagcccttaagaccaaacacgctactccaaagtatggtttaattttccatgcatctgttgttggccaagctgcaccgaagaacaagggtaaaatttcacggtcactagctgcaaaatctgttcttgctatccgttgtgatgctcttggtgactcccaagacaacactatgggagttgaaaaccgtttaaagcttgaagcacggttgagaactctcgaaggaaaagatttaggacgtctatctggctcagctaaaggcaaaccaaagattgaagtatatgacaaagataaaaagaaaggatccggaggtctgatcactcctgctaagacatacaacactgctgcagactctcttcttcaaactcccacagtggattcagagaacggtgtgaaagagaagaaagacaaaaagaagaagaagaaggctgatgatgaggaagaagccaaaactgaggagccctcaaagaagaaatcgaataagaagaagacagaagcagaacctgaaaccgccgaagagcctgcaaagaaggagaagaagaagaagagaaaacacgaggaagaggaaactgaaatgcctgctaagaagaaggaaaagagtgagaagaagaagaagaagaaaactgaggtctgaagagacctttaatatttttgcgtggtctagtttactttgttatcagaaacaaagaaaatcttttgtggcgttaggtgttaagtaaggtttttgttttgtttgaaacttaaaaaaaagaactactcttcgttttgtaaggttataatatgtttggtttagtccttatccc

SEQ ID NO: 100868 - protein, 533 aa, Arabidopsis thaliana
  peptide (1)..(533): Ceres Seq. ID no. 13606238
  misc_feature (251)..(399): Pfam Name: Putative snoRNA binding domain Pfam Description: Putative snoRNA binding domain
  misc_feature (1)..(533): Homolog of NCBI NO: 15240445 NR Description: SAR DNA-binding protein, putative [Arabidopsis
  misc_feature (1)..(530): Homolog of NCBI NO: 15229884 NR Description: SAR DNA-binding protein, putative [Arabidopsis
  misc_feature (1)..(433): Homolog of NCBI NO: 2811028 NR Description: Hypothetical protein At5g27120
  misc_feature (1)..(423): Homolog of NCBI NO: 25083410 NR Description: SAR DNA-binding protein - like [Arabidopsis
  misc_feature (1)..(530): Homolog of NCBI NO: 7451353 NR Description: SAR DNA-binding protein-1 - garden pea
  misc_feature (1)..(532): Homolog of NCBI NO: 13623892 NR Description: MAR-binding protein [Nicotiana tabacum]
  misc_feature (1)..(526): Homolog of NCBI NO: 7451352 NR Description: SAR DNA-binding protein 2 - garden pea
  misc_feature (1)..(485): Homolog of NCBI NO: 3288883 NR Description: SAR DNA binding protein [Oryza sativa]
  misc_feature (1)..(522): Homolog of NCBI NO: 27881868 NR Description: Unknown (protein for IMAGE:2639288) [Danio rerio]
  misc_feature (1)..(530): Homolog of NCBI NO: 26336274 NR Description: unnamed protein product [Mus musculus]
MLILFETPGGFAIFKVLNEGKLSNVEDLGNEFSTAKLARKMVKLVAFDKFDNTAEALEAVAKLLEGTPSKGLRKFLKANCVGETLAVADSKLGNIIKEKLKIVCVHNNAVMELLRGIRSQLTELISGLGDQDLGPMSLGLSHSLARYKLKFSSDKVDTMIIQAIGLLDDLDKELNTYAMRVREWFGWHFPELAKIVQDNILYAKAVKLMGNRINAAKLDFSEILADEIEAELKEAAVISMGTEVSDLDLLHIRELCDQVLSLAEYRAQLYDYLKSRMNTIAPNLTALVGELVGARLISHGGSLLNLAKQPGSTVQILGAEKALFRALKTKHATPKYGLIFHASVVGQAAPKNKGKISRSLAAKSVLAIRCDALGDSQDNTMGVENRLKLEARLRTLEGKDLGRLSGSAKGKPKIEVYDKDKKKGSGGLITPAKTYNTAADSLLQTPTVDSENGVKEKKDKKKKKKADDEEEAKTEEPSKKKSNKKKTEAEPETAEEPAKKEKKKKRKHEEEETEMPAKKKEKSEKKKKKKTEV

SEQ ID NO: 100869 - protein, 493 aa, Arabidopsis thaliana
  peptide (1)..(493): Ceres Seq. ID no. 13606239
  misc_feature (211)..(359): Pfam Name: Putative snoRNA binding domain Pfam Description: Putative snoRNA binding domain
  misc_feature (1)..(493): Homolog of NCBI NO: 15240445 NR Description: SAR DNA-binding protein, putative [Arabidopsis
  misc_feature (1)..(490): Homolog of NCBI NO: 15229884 NR Description: SAR DNA-binding protein, putative [Arabidopsis
  misc_feature (1)..(393): Homolog of NCBI NO: 2811028 NR Description: Hypothetical protein At5g27120
  misc_feature (1)..(383): Homolog of NCBI NO: 25083410 NR Description: SAR DNA-binding protein - like [Arabidopsis
  misc_feature (1)..(490): Homolog of NCBI NO: 7451353 NR Description: SAR DNA-binding protein-1 - garden pea
  misc_feature (1)..(492): Homolog of NCBI NO: 13623892 NR Description: MAR-binding protein [Nicotiana tabacum]
  misc_feature (1)..(486): Homolog of NCBI NO: 7451352 NR Description: SAR DNA-binding protein 2 - garden pea
  misc_feature (1)..(445): Homolog of NCBI NO: 3288883 NR Description: SAR DNA binding protein [Oryza sativa]
  misc_feature (1)..(482): Homolog of NCBI NO: 27881868 NR Description: Unknown (protein for IMAGE:2639288) [Danio rerio]
  misc_feature (1)..(490): Homolog of NCBI NO: 26336274 NR Description: unnamed protein product [Mus musculus]
MVKLVAFDKFDNTAEALEAVAKLLEGTPSKGLRKFLKANCVGETLAVADSKLGNIIKEKLKIVCVHNNAVMELLRGIRSQLTELISGLGDQDLGPMSLGLSHSLARYKLKFSSDKVDTMIIQAIGLLDDLDKELNTYAMRVREWFGWHFPELAKIVQDNILYAKAVKLMGNRINAAKLDFSEILADEIEAELKEAAVISMGTEVSDLDLLHIRELCDQVLSLAEYRAQLYDYLKSRMNTIAPNLTALVGELVGARLISHGGSLLNLAKQPGSTVQILGAEKALFRALKTKHATPKYGLIFHASVVGQAAPKNKGKISRSLAAKSVLAIRCDALGDSQDNTMGVENRLKLEARLRTLEGKDLGRLSGSAKGKPKIEVYDKDKKKGSGGLITPAKTYNTAADSLLQTPTVDSENGVKEKKDKKKKKKADDEEEAKTEEPSKKKSNKKKTEAEPETAEEPAKKEKKKKRKHEEEETEMPAKKKEKSEKKKKKKTEV

SEQ ID NO: 100870 - protein, 423 aa, Arabidopsis thaliana
  peptide (1)..(423): Ceres Seq. ID no. 13606240
  misc_feature (141)..(289): Pfam Name: Putative snoRNA binding domain Pfam Description: Putative snoRNA binding domain
  misc_feature (1)..(423): Homolog of NCBI NO: 15240445 NR Description: SAR DNA-binding protein, putative [Arabidopsis
  misc_feature (1)..(420): Homolog of NCBI NO: 15229884 NR Description: SAR DNA-binding protein, putative [Arabidopsis
  misc_feature (1)..(323): Homolog of NCBI NO: 2811028 NR Description: Hypothetical protein At5g27120
  misc_feature (1)..(313): Homolog of NCBI NO: 25083410 NR Description: SAR DNA-binding protein - like [Arabidopsis
  misc_feature (1)..(420): Homolog of NCBI NO: 7451353 NR Description: SAR DNA-binding protein-1 - garden pea
  misc_feature (1)..(422): Homolog of NCBI NO: 13623892 NR Description: MAR-binding protein [Nicotiana tabacum]
  misc_feature (1)..(416): Homolog of NCBI NO: 7451352 NR Description: SAR DNA-binding protein 2 - garden pea
  misc_feature (1)..(375): Homolog of NCBI NO: 3288883 NR Description: SAR DNA binding protein [Oryza sativa]
  misc_feature (1)..(412): Homolog of NCBI NO: 27881868 NR Description: Unknown (protein for IMAGE:2639288) [Danio rerio]
  misc_feature (1)..(420): Homolog of NCBI NO: 26336274 NR Description: unnamed protein product [Mus musculus]
MELLRGIRSQLTELISGLGDQDLGPMSLGLSHSLARYKLKFSSDKVDTMIIQAIGLLDDLDKELNTYAMRVREWFGWHFPELAKIVQDNILYAKAVKLMGNRINAAKLDFSEILADEIEAELKEAAVISMGTEVSDLDLLHIRELCDQVLSLAEYRAQLYDYLKSRMNTIAPNLTALVGELVGARLISHGGSLLNLAKQPGSTVQILGAEKALFRALKTKHATPKYGLIFHASVVGQAAPKNKGKISRSLAAKSVLAIRCDALGDSQDNTMGVENRLKLEARLRTLEGKDLGRLSGSAKGKPKIEVYDKDKKKGSGGLITPAKTYNTAADSLLQTPTVDSENGVKEKKDKKKKKKADDEEEAKTEEPSKKKSNKKKTEAEPETAEEPAKKEKKKKRKHEEEETEMPAKKKEKSEKKKKKKTEV

SEQ ID NO: 100871 - DNA, 1501 bp, Arabidopsis thaliana
  misc_feature (1)..(1501): Ceres Seq. ID no. 13606241
  misc_feature: MA Experiment ID: 20000214 Result: Down-regulated in Transcription
  misc_feature: MA Experiment 20000214 PARAMETER Experiment Name: At_4deg_Cold_P Parameter: Timepoint (hr) Value: 6
  misc_feature: MA Experiment ID: 20000227 Result: Down-regulated in Transcription
  misc_feature: MA Experiment 20000227 PARAMETER Experiment Name: At_Root-Tips-vs-Tops_P Parameter: Tissue Value: Root Tips vs. Root Tops
  misc_feature: MA Experiment ID: 20000234 Result: Down-regulated in Transcription
  misc_feature: MA Experiment 20000234 PARAMETER Experiment Name: At_Siliques_P Parameter: Age (day) Value: 21
  misc_feature: MA Experiment 20000234 PARAMETER Experiment Name: At_Siliques_P Parameter: Organism Value: A. thaliana
  misc_feature: MA Experiment 20000234 PARAMETER Experiment Name: At_Siliques_P Parameter: Plant Line Value: WS
  misc_feature: MA Experiment 20000234 PARAMETER Experiment Name: At_Siliques_P Parameter: Tissue Value: Less Than 5mm Siliques vs. Whole Plant
  misc_feature: MA Experiment ID: 20000235 Result: Down-regulated in Transcription
  misc_feature: MA Experiment 20000235 PARAMETER Experiment Name: At_Siliques_P Parameter: Age (day) Value: 21
  misc_feature: MA Experiment 20000235 PARAMETER Experiment Name: At_Siliques_P Parameter: Organism Value: A. thaliana
  misc_feature: MA Experiment 20000235 PARAMETER Experiment Name: At_Siliques_P Parameter: Plant Line Value: WS
  misc_feature: MA Experiment 20000235 PARAMETER Experiment Name: At_Siliques_P Parameter: Tissue Value: 5-10mm Siliques vs. Whole Plant
  misc_feature: MA Experiment ID: 20000265 Result: Down-regulated in Transcription
  misc_feature: MA Experiment 20000265 PARAMETER Experiment Name: At_Open_Flower_P Parameter: Age (day) Value: 21
  misc_feature: MA Experiment 20000265 PARAMETER Experiment Name: At_Open_Flower_P Parameter: Plant Line Value: WS
  misc_feature: MA Experiment 20000265 PARAMETER Experiment Name: At_Open_Flower_P Parameter: Tissue Value: Closed Flower vs. Whole Plant
  misc_feature: MA Experiment ID: 20000441 Result: Up-regulated in Transcription
  misc_feature: MA Experiment 20000441 PARAMETER Experiment Name: At_1uM_BR-BRZ__P Parameter: Tissue Value: Shoot Apices
  misc_feature: MA Experiment 20000441 PARAMETER Experiment Name: At_1uM_BR-BRZ__P Parameter: Treatment Value: 1uM BR vs. No Treatment
  misc_feature: MA Experiment ID: 20000443 Result: Up-regulated in Transcription
  misc_feature: MA Experiment 20000443 PARAMETER Experiment Name: At_1uM_BR-BRZ__P Parameter: Tissue Value: Shoot Apices
  misc_feature: MA Experiment 20000443 PARAMETER Experiment Name: At_1uM_BR-BRZ__P Parameter: Treatment Value: 1uM BRZ vs. No Treatment
  misc_feature: MA Experiment ID: 20001558 Result: Down-regulated in Transcription
  misc_feature: MA Experiment 20001558 PARAMETER Experiment Name: At_Drought_Soil_Dry_P Parameter: Age (day) Value: 27
  misc_feature: MA Experiment 20001558 PARAMETER Experiment Name: At_Drought_Soil_Dry_P Parameter: Organism Value: A. thaliana
  misc_feature: MA Experiment 20001558 PARAMETER Experiment Name: At_Drought_Soil_Dry_P Parameter: Plant Line Value: WS
  misc_feature: MA Experiment 20001558 PARAMETER Experiment Name: At_Drought_Soil_Dry_P Parameter: Post Timepoint (hr) Value: 6
  misc_feature: MA Experiment 20001558 PARAMETER Experiment Name: At_Drought_Soil_Dry_P Parameter: Post-Treatment Value: Re-Water vs. No Drought
  misc_feature: MA Experiment 20001558 PARAMETER Experiment Name: At_Drought_Soil_Dry_P Parameter: Timepoint (day) Value: 13
  misc_feature: MA Experiment 20001558 PARAMETER Experiment Name: At_Drought_Soil_Dry_P Parameter: Treatment Value: Drought vs. No Drought
aaaaaaaaaaaaactttactcatcgagactcgtttagtgattcgaaatttcccttctcggctcaaatcttcgatctgggctttcgtgtctttttgcgttttgattggtaataaaaagaagctttttaaaaactttttccatggctggaagtgaagaagttaatcttattgagagcaagacagtggttcctctcaatacatgggttctaatatccaactttaagctagcttacaatctcctgcgtcgccctgacggaacttttaaccgtcatctcgcagagtttctagaccggaaagtccctgcaaatgccaaccctgttaatggggtcttctcttttgatgtgatcatcgatcgccaaactaatttgcttagcagagtttacagaccagctgatgctggcacttcaccaagtattactgatctacagaatcctgttgatggtgaaatagtgcctgttattgtcttctttcatggtggaagctttgcacattcttctgcaaacagtgctatttatgatactctttgtcgtaggcttgttggtttgtgtggtgctgttgttgtctctgtgaattatcgtcgtgcaccagagaatcgatacccttgtgcttatgatgatggatgggctgttttgaaatgggtcaactcgagttcttggcttagaagcaagaaagactcaaaggttcgtattttcttggcgggtgatagctctgggggtaacattgtgcataatgtcgcggtaagagcggttgagtcaaggatcgatgttttggggaacattttgcttaaccctatgtttggagggaccgaaagaacggaatctgagaaacgtttggatgggaagtactttgttacggttagagaccgagattggtattggagagcgtttcttcctgagggtgaagacagagagcatccagcgtgtagcccgtttggcccgagaagcaagagtctagaagggttgagtttccccaagagtcttgtcgttgtagcgggtttagatttgattcaagattggcaattgaagtacgcggaagggctcaagaaagcgggtcaagaggtgaagcttctttacttggagcaagccactattggcttctacttattgcctaacaacaatcacttccataccgttatggatgagatagctgcatttgtaaacgcagaatgccaatgagaacactcttatctctcactgtaatctcttcactaacaaacgggtgatatccaccatggaaggtgaaagcccgagattctcgttttagaagctctttgtagtgagtcaaaagaacggcgtttaactactaccgcggtggtggtggctgcgtccgcgtttgtgaaccgtccaaagctggattctgaaagcaaagcaggaagaagaacagtgtagtcggtaattatgtttggctttctagcgttagcttttgactttaactagagctgagttttttcagcttgtggttaatagtaactttggttatgttactattatgatattttcggt

SEQ ID NO: 100872 - protein, 344 aa, Arabidopsis thaliana
  peptide (1)..(344): Ceres Seq. ID no. 13606242
  misc_feature (99)..(149): Pfam Name: Carboxylesterase Pfam Description: Carboxylesterase
  misc_feature (1)..(344): Homolog of NCBI NO: 15240483 NR Description: expressed protein [Arabidopsis thaliana] Unknown protein [Arabidopsis thaliana]
  misc_feature (1)..(343): Homolog of NCBI NO: 15229905 NR Description: expressed protein [Arabidopsis thaliana] unknown protein [Arabidopsis thaliana] unknown protein [Arabidopsis thaliana]
  misc_feature (1)..(341): Homolog of NCBI NO: 15229371 NR Description: expressed protein [Arabidopsis thaliana]
  misc_feature (17)..(339): Homolog of NCBI NO: 34904770 NR Description: similar to carboxylesterase [Oryza sativa
  misc_feature (13)..(340): Homolog of NCBI NO: 21618039 NR Description: unknown [Arabidopsis thaliana]
  misc_feature (13)..(340): Homolog of NCBI NO: 15237783 NR Description: expressed protein [Arabidopsis thaliana] contains similarity to unknown
  misc_feature (1)..(339): Homolog of NCBI NO: 34904760 NR Description: similar to carboxylesterase [Oryza sativa
  misc_feature (27)..(343): Homolog of NCBI NO: 34904772 NR Description: similar to carboxylesterase [Oryza sativa
  misc_feature (2)..(341): Homolog of NCBI NO: 34393714 NR Description: putative esterase [Oryza sativa (japonica
  misc_feature (2)..(341): Homolog of NCBI NO: 34904774 NR Description: similar to carboxylesterase [Oryza sativa
MAGSEEVNLIESKTVVPLNTWVLISNFKLAYNLLRRPDGTFNRHLAEFLDRKVPANANPVNGVFSFDVIIDRQTNLLSRVYRPADAGTSPSITDLQNPVDGEIVPVIVFFHGGSFAHSSANSAIYDTLCRRLVGLCGAVVVSVNYRRAPENRYPCAYDDGWAVLKWVNSSSWLRSKKDSKVRIFLAGDSSGGNIVHNVAVRAVESRIDVLGNILLNPMFGGTERTESEKRLDGKYFVTVRDRDWYWRAFLPEGEDREHPACSPFGPRSKSLEGLSFPKSLVVVAGLDLIQDWQLKYAEGLKKAGQEVKLLYLEQATIGFYLLPNNNHFHTVMDEIAAFVNAECQ

SEQ ID NO: 100873 - DNA, 2313 bp, Arabidopsis thaliana
  misc_feature (1)..(2313): Ceres Seq. ID no. 13606243
  misc_feature: MA Experiment ID: 20000173 Result: Down-regulated in Transcription
  misc_feature: MA Experiment 20000173 PARAMETER Experiment Name: At_42deg_Heat_P Parameter: Age (day) Value: 14
  misc_feature: MA Experiment 20000173 PARAMETER Experiment Name: At_42deg_Heat_P Parameter: Organism Value: A. thaliana
  misc_feature: MA Experiment 20000173 PARAMETER Experiment Name: At_42deg_Heat_P Parameter: Plant Line Value: WS
  misc_feature: MA Experiment 20000173 PARAMETER Experiment Name: At_42deg_Heat_P Parameter: Temperature (deg C) Value: 42 vs. 22
  misc_feature: MA Experiment 20000173 PARAMETER Experiment Name: At_42deg_Heat_P Parameter: Timepoint (hr) Value: 6
  misc_feature: MA Experiment 20000173 PARAMETER Experiment Name: At_42deg_Heat_P Parameter: Tissue Value: Aerial
  misc_feature: MA Experiment ID: 20000182 Result: Up-regulated in Transcription
  misc_feature: MA Experiment 20000182 PARAMETER Experiment Name: At_2mM_SA_P Parameter: Age (day) Value: 14
  misc_feature: MA Experiment 20000182 PARAMETER Experiment Name: At_2mM_SA_P Parameter: Organism Value: A. thaliana
  misc_feature: MA Experiment 20000182 PARAMETER Experiment Name: At_2mM_SA_P Parameter: Plant Line Value: WS
  misc_feature: MA Experiment 20000182 PARAMETER Experiment Name: At_2mM_SA_P Parameter: Timepoint (hr) Value: 6
  misc_feature: MA Experiment 20000182 PARAMETER Experiment Name: At_2mM_SA_P Parameter: Tissue Value: Aerial
  misc_feature: MA Experiment 20000182 PARAMETER Experiment Name: At_2mM_SA_P Parameter: Treatment Value: 2mM SA vs. No Treatment
  misc_feature: MA Experiment ID: 20000184 Result: Down-regulated in Transcription
  misc_feature: MA Experiment 20000184 PARAMETER Experiment Name: At_Shoots__P Parameter: Age (day) Value: 7
  misc_feature: MA Experiment 20000184 PARAMETER Experiment Name: At_Shoots__P Parameter: Tissue Value: Shoots vs. Whole Plant
atggaatttgcttcgccggaacaacgtcgtctcgaaaccattcgatctcacatcgatacttctccgaccaacgatcaatcatcatctctattcctcaacgccaccgcttcttctgcttcacctttctttaaagaggatagctacagtgttgtgcttccagaaaagcttgatactggaaaatggaatgtctacagatctaaaagatcgcctacgaaactcgttagtaggttcccggatcatcctgaaatcgggactttacatgacaattttgtacatgctgttgaaacatatgctgaaaacaagtatcttggtacacgagttcggtccgatggaaccattggagagtattcatggatgacatatggagaagcagcgtctgagcgacaagccattggttcaggactcttgtttcatggagttaaccaaggagattgcgttggactctattttattaacagaccagagtggttggttgtggatcatgcttgtgcagcatattcatttgtctctgttcctttatatgatacacttggtccagacgctgttaagtttgtggtgaatcatgctaatctgcaagctatattttgtgtaccacaaaccttgaatattttgctaagcttcctagcggaaatcccatccattcgtctcattgtggtggtgggaggggctgatgagcatttgccatcacttcctcgaggaactggagtcacaattgtatcataccaaaagctattgagtcagggtcgaagtagcttacatccattttcgcctccaaagccagaagacattgcaaccatatgctacacaagtggaaccacaggaacaccaaagggtgttgtgttgactcatggaaacttgatcgcgaatgtcgctggttccagtgtggaagcagaattctttccttcagatgtttacatatcatatcttcctttggcgcacatatatgaacgtgcaaatcagattatgggggtgtatggtggtgttgctgtcggtttctatcagggggatgtcttcaagctgatggatgattttgctgtgttaagaccaacaatattctgtagtgtccctcgcttatataatcgaatatatgatggcattacaagtgccgtaaaatcatctggggttgtgaaaaaaaggcttttcgaaattgcctataactcaaagaagcaagcgatcattaatgggcggactccttctgcattttgggacaagctggtgttcaacaaaataaaagaaaagcttggtggacgggttcggtttatggggtctggtgcttctcctttgtcacctgatgtcatggatttcttgagaatatgctttggatgttcggtgcgtgaagggtatggtatgaccgagacttcttgtgtcataagtgctatggatgatggtgacaatttatctggccatgtcggttcccctaatccagcttgcgaggtaaaacttgtggatgttcccgaaatgaattacacatcagacgatcaaccatacccacgtggtgaaatctgtgtaagaggaccaatcatcttcaaaggctactacaaagatgaagaacaaacgagagaaattcttgatggagatggctggctacacacaggagatatcgggttgtggttacctggtggtcggctcaagatcatagacaggaagaagaacatatttaagttggcgcaaggagaatatatagcaccagagaagatcgaaaatgtttataccaaatgtagattcgtttcgcagtgtttcattcacggtgatagcttcaattcctctctagtagctatagtttcagtcgaccccgaagttatgaaagattgggctgcatcagaaggcatcaagtatgagcatctaggacagctctgtaacgatccaagagtgcgaaagactgttcttgctgagatggatgaccttggaagagaagctcagttgagagggtttgagtttgcaaaggctgtgactttggtgccagaaccattcaccttggagaatggacttctcacaccaacattcaagataaagagacctcaagcaaaagcctactttgcagaagcaattagcaaaatgtatgcggaaatcgcagcctcgaaccccattccttctaaactgtgatgctttttgctttgcttaaaagtgtttctttttttttgtattacaaaggtaattgtagaactgttaaaagatcggattaggatgaggtagatcgatcatttgaaataaaacagattcatggtgtaattttctttgatactgttttccagaataaaggaagcagactatgtcctaatcctgaaatggatgatgagtgtggtcataagttcg

SEQ ID NO: 100874 - protein, 700 aa, Arabidopsis thaliana
  peptide (1)..(700): Ceres Seq. ID no. 13606244
  misc_feature (120)..(581): Pfam Name: AMP-binding enzyme Pfam Description: AMP-binding enzyme
  misc_feature (8)..(695): Homolog of NCBI NO: 13516481 NR Description: long-chain acyl-CoA synthetase [Arabidopsis
  misc_feature (8)..(695): Homolog of NCBI NO: 18397422 NR Description: AMP-binding protein, putative [Arabidopsis >gi|20453099|gb|AAM19792.1| AT3g05970/F2O10_9 [Arabidopsis >gi|24796992|gb|AAN64508.1| At3g05970/F2O10_9 [Arabidopsis
  misc_feature (8)..(695): Homolog of NCBI NO: 20805873 NR Description: long chain acyl-CoA synthetase 6 [Arabidopsis
  misc_feature (1)..(676): Homolog of NCBI NO: 7437846 NR Description: probable long-chain-fatty-acid-CoA ligase (EC
  misc_feature (38)..(640): Homolog of NCBI NO: 6671960 NR Description: putative long-chain-fatty-acid--CoA ligase
  misc_feature (80)..(688): Homolog of NCBI NO: 27882609 NR Description: similar to fatty acid Coenzyme A ligase [Xenopus
  misc_feature (80)..(688): Homolog of NCBI NO: 28436862 NR Description: similar to fatty acid Coenzyme A ligase [Xenopus
  misc_feature (116)..(688): Homolog of NCBI NO: 13431658 NR Description: LONG-CHAIN-FATTY-ACID--COA LIGASE 6 (LONG-CHAIN
  misc_feature (116)..(688): Homolog of NCBI NO: 17505198 NR Description: fatty-acid-Coenzyme A ligase, long-chain 6; long
  misc_feature (71)..(687): Homolog of NCBI NO: 21450203 NR Description: RIKEN cDNA A330035H04; long-chain acyl-CoA [Mus musculus] >gi|18605861|gb|AAH22959.1| RIKEN cDNA A330035H04
MEFASPEQRRLETIRSHIDTSPTNDQSSSLFLNATASSASPFFKEDSYSVVLPEKLDTGKWNVYRSKRSPTKLVSRFPDHPEIGTLHDNFVHAVETYAENKYLGTRVRSDGTIGEYSWMTYGEAASERQAIGSGLLFHGVNQGDCVGLYFINRPEWLVVDHACAAYSFVSVPLYDTLGPDAVKFVVNHANLQAIFCVPQTLNILLSFLAEIPSIRLIVVVGGADEHLPSLPRGTGVTIVSYQKLLSQGRSSLHPFSPPKPEDIATICYTSGTTGTPKGVVLTHGNLIANVAGSSVEAEFFPSDVYISYLPLAHIYERANQIMGVYGGVAVGFYQGDVFKLMDDFAVLRPTIFCSVPRLYNRIYDGITSAVKSSGVVKKRLFEIAYNSKKQAIINGRTPSAFWDKLVFNKIKEKLGGRVRFMGSGASPLSPDVMDFLRICFGCSVREGYGMTETSCVISAMDDGDNLSGHVGSPNPACEVKLVDVPEMNYTSDDQPYPRGEICVRGPIIFKGYYKDEEQTREILDGDGWLHTGDIGLWLPGGRLKIIDRKKNIFKLAQGEYIAPEKIENVYTKCRFVSQCFIHGDSFNSSLVAIVSVDPEVMKDWAASEGIKYEHLGQLCNDPRVRKTVLAEMDDLGREAQLRGFEFAKAVTLVPEPFTLENGLLTPTFKIKRPQAKAYFAEAISKMYAEIAASNPIPSKL

SEQ ID NO: 100875 - protein, 582 aa, Arabidopsis thaliana
  peptide (1)..(582): Ceres Seq. ID no. 13606245
  misc_feature (2)..(463): Pfam Name: AMP-binding enzyme Pfam Description: AMP-binding enzyme
  misc_feature (1)..(577): Homolog of NCBI NO: 13516481 NR Description: long-chain acyl-CoA synthetase [Arabidopsis
  misc_feature (1)..(577): Homolog of NCBI NO: 18397422 NR Description: AMP-binding protein, putative [Arabidopsis >gi|20453099|gb|AAM19792.1| AT3g05970/F2O10_9 [Arabidopsis >gi|24796992|gb|AAN64508.1| At3g05970/F2O10_9 [Arabidopsis
  misc_feature (1)..(577): Homolog of NCBI NO: 20805873 NR Description: long chain acyl-CoA synthetase 6 [Arabidopsis
  misc_feature (1)..(558): Homolog of NCBI NO: 7437846 NR Description: probable long-chain-fatty-acid-CoA ligase (EC
  misc_feature (1)..(522): Homolog of NCBI NO: 6671960 NR Description: putative long-chain-fatty-acid--CoA ligase
  misc_feature (1)..(570): Homolog of NCBI NO: 27882609 NR Description: similar to fatty acid Coenzyme A ligase [Xenopus
  misc_feature (1)..(570): Homolog of NCBI NO: 28436862 NR Description: similar to fatty acid Coenzyme A ligase [Xenopus
  misc_feature (1)..(570): Homolog of NCBI NO: 13431658 NR Description: LONG-CHAIN-FATTY-ACID--COA LIGASE 6 (LONG-CHAIN
  misc_feature (1)..(570): Homolog of NCBI NO: 17505198 NR Description: fatty-acid-Coenzyme A ligase, long-chain 6; long
  misc_feature (1)..(569): Homolog of NCBI NO: 21450203 NR Description: RIKEN cDNA A330035H04; long-chain acyl-CoA [Mus musculus] >gi|18605861|gb|AAH22959.1| RIKEN cDNA A330035H04
MTYGEAASERQAIGSGLLFHGVNQGDCVGLYFINRPEWLVVDHACAAYSFVSVPLYDTLGPDAVKFVVNHANLQAIFCVPQTLNILLSFLAEIPSIRLIVVVGGADEHLPSLPRGTGVTIVSYQKLLSQGRSSLHPFSPPKPEDIATICYTSGTTGTPKGVVLTHGNLIANVAGSSVEAEFFPSDVYISYLPLAHIYERANQIMGVYGGVAVGFYQGDVFKLMDDFAVLRPTIFCSVPRLYNRIYDGITSAVKSSGVVKKRLFEIAYNSKKQAIINGRTPSAFWDKLVFNKIKEKLGGRVRFMGSGASPLSPDVMDFLRICFGCSVREGYGMTETSCVISAMDDGDNLSGHVGSPNPACEVKLVDVPEMNYTSDDQPYPRGEICVRGPIIFKGYYKDEEQTREILDGDGWLHTGDIGLWLPGGRLKIIDRKKNIFKLAQGEYIAPEKIENVYTKCRFVSQCFIHGDSFNSSLVAIVSVDPEVMKDWAASEGIKYEHLGQLCNDPRVRKTVLAEMDDLGREAQLRGFEFAKAVTLVPEPFTLENGLLTPTFKIKRPQAKAYFAEAISKMYAEIAASNPIPSKL

SEQ ID NO: 100876 - protein, 379 aa, Arabidopsis thaliana
  peptide (1)..(379): Ceres Seq. ID no. 13606246
  misc_feature (1)..(260): Pfam Name: AMP-binding enzyme Pfam Description: AMP-binding enzyme
  misc_feature (1)..(374): Homolog of NCBI NO: 13516481 NR Description: long-chain acyl-CoA synthetase [Arabidopsis
  misc_feature (1)..(374): Homolog of NCBI NO: 18397422 NR Description: AMP-binding protein, putative [Arabidopsis >gi|20453099|gb|AAM19792.1| AT3g05970/F2O10_9 [Arabidopsis >gi|24796992|gb|AAN64508.1| At3g05970/F2O10_9 [Arabidopsis
  misc_feature (1)..(374): Homolog of NCBI NO: 20805873 NR Description: long chain acyl-CoA synthetase 6 [Arabidopsis
  misc_feature (1)..(355): Homolog of NCBI NO: 7437846 NR Description: probable long-chain-fatty-acid-CoA ligase (EC
  misc_feature (1)..(319): Homolog of NCBI NO: 6671960 NR Description: putative long-chain-fatty-acid--CoA ligase
  misc_feature (1)..(367): Homolog of NCBI NO: 27882609 NR Description: similar to fatty acid Coenzyme A ligase [Xenopus
  misc_feature (1)..(367): Homolog of NCBI NO: 28436862 NR Description: similar to fatty acid Coenzyme A ligase [Xenopus
  misc_feature (1)..(367): Homolog of NCBI NO: 13431658 NR Description: LONG-CHAIN-FATTY-ACID--COA LIGASE 6 (LONG-CHAIN
  misc_feature (1)..(367): Homolog of NCBI NO: 17505198 NR Description: fatty-acid-Coenzyme A ligase, long-chain 6; long
  misc_feature (1)..(366): Homolog of NCBI NO: 21450203 NR Description: RIKEN cDNA A330035H04; long-chain acyl-CoA [Mus musculus] >gi|18605861|gb|AAH22959.1| RIKEN cDNA A330035H04
MGVYGGVAVGFYQGDVFKLMDDFAVLRPTIFCSVPRLYNRIYDGITSAVKSSGVVKKRLFEIAYNSKKQAIINGRTPSAFWDKLVFNKIKEKLGGRVRFMGSGASPLSPDVMDFLRICFGCSVREGYGMTETSCVISAMDDGDNLSGHVGSPNPACEVKLVDVPEMNYTSDDQPYPRGEICVRGPIIFKGYYKDEEQTREILDGDGWLHTGDIGLWLPGGRLKIIDRKKNIFKLAQGEYIAPEKIENVYTKCRFVSQCFIHGDSFNSSLVAIVSVDPEVMKDWAASEGIKYEHLGQLCNDPRVRKTVLAEMDDLGREAQLRGFEFAKAVTLVPEPFTLENGLLTPTFKIKRPQAKAYFAEAISKMYAEIAASNPIPSKL

SEQ ID NO: 100877 - DNA, 851 bp, Arabidopsis thaliana
  misc_feature (1)..(851): Ceres Seq. ID no. 13606251
  misc_feature: MA Experiment ID: 108488 Result: Down-regulated in Transcription
  misc_feature: MA Experiment ID: 108668 Result: Up-regulated in Transcription
  misc_feature: MA Experiment 108668 PARAMETER Experiment Name: At_2mM_SA_cDNA_P Parameter: Plant Line Value: WS
  misc_feature: MA Experiment 108668 PARAMETER Experiment Name: At_2mM_SA_cDNA_P Parameter: Timepoint (hr) Value: 6
  misc_feature: MA Experiment 108668 PARAMETER Experiment Name: At_2mM_SA_cDNA_P Parameter: Treatment Value: 2mM SA vs. No Treatment
  misc_feature: MA Experiment ID: 20000090 Result: Up-regulated in Transcription
  misc_feature: MA Experiment ID: 20000182 Result: Up-regulated in Transcription
  misc_feature: MA Experiment 20000182 PARAMETER Experiment Name: At_2mM_SA_P Parameter: Age (day) Value: 14
  misc_feature: MA Experiment 20000182 PARAMETER Experiment Name: At_2mM_SA_P Parameter: Organism Value: A. thaliana
  misc_feature: MA Experiment 20000182 PARAMETER Experiment Name: At_2mM_SA_P Parameter: Plant Line Value: WS
  misc_feature: MA Experiment 20000182 PARAMETER Experiment Name: At_2mM_SA_P Parameter: Timepoint (hr) Value: 6
  misc_feature: MA Experiment 20000182 PARAMETER Experiment Name: At_2mM_SA_P Parameter: Tissue Value: Aerial
  misc_feature: MA Experiment 20000182 PARAMETER Experiment Name: At_2mM_SA_P Parameter: Treatment Value: 2mM SA vs. No Treatment
  misc_feature: MA Experiment ID: 20000224 Result: Down-regulated in Transcription
  misc_feature: MA Experiment ID: 20001451 Result: Up-regulated in Transcription
  misc_feature: MA Experiment 20001451 PARAMETER Experiment Name: At_Far-red-induction_P Parameter: Age (day) Value: 7
  misc_feature: MA Experiment 20001451 PARAMETER Experiment Name: At_Far-red-induction_P Parameter: Light Value: Far-red vs. White
  misc_feature: MA Experiment 20001451 PARAMETER Experiment Name: At_Far-red-induction_P Parameter: Organism Value: A. thaliana
  misc_feature: MA Experiment 20001451 PARAMETER Experiment Name: At_Far-red-induction_P Parameter: Plant Line Value: Columbia
  misc_feature: MA Experiment 20001451 PARAMETER Experiment Name: At_Far-red-induction_P Parameter: Timepoint (hr) Value: 24
  misc_feature: MA Experiment 20001451 PARAMETER Experiment Name: At_Far-red-induction_P Parameter: Tissue Value: Whole Plant
accgattcattagaaatccatccctctcactgtcaaaacccgagaagcagaaaaaagcaaaaaacagatttcgaagtttcgacgcctctctattcttcgatctctttcatatttgaatcgttcaccttcttgccgatcttcggagtatattacaaggttcttaacggatctctaaatcttctgatttaagaagatgcttcctctatcgctgcttaaaactgctcaagggcatcctatgctcgtggagcttaagaatggagagacatacaatgggcatttggtgaattgtgatacttggatgaacatccatctgcgtgaagtcatatgtacatcaaaggacggagatagattttggaggatgccggaatgttatatccgtggtaacacaatcaagtaccttcgagttccggatgaggtgattgataaagtacaggaggagaagacacgcacagatagaaaaccaccaggtgttggacgtggaagaggacgtggtgtggatgatggaggagccagaggcagaggcagaggaacttcaatggggaagatgggtggcaacagaggagcaggtcgcggccgtggttgatgcaacaagttttaaagactcgctgccaaatctgctaacttcccattgtggagaaaaccaaaagttacataagaagttggtctgttgttggttttctattaagtatgtaagggatagggagtgtgtttttcgattctccttgtgatcttttcgaaaaatgaaatttgtcttttgcctttttgtggtatatgtgaaattccaattgttttcatttgcgcttaaaaatgaatctttcaggtcttgaatttatataattgttagagaattt

SEQ ID NO: 100878 - protein, 129 aa, Arabidopsis thaliana
  peptide (1)..(129): Ceres Seq. ID no. 13606252
  misc_feature (5)..(71): Pfam Name: LSM domain Pfam Description: LSM domain
  misc_feature (1)..(129): Homolog of NCBI NO: 15241028 NR Description: glycine rich protein - like [Arabidopsis thaliana]
  misc_feature (1)..(129): Homolog of NCBI NO: 21593495 NR Description: glycine rich protein-like [Arabidopsis thaliana]
  misc_feature (1)..(129): Homolog of NCBI NO: 20260282 NR Description: unknown protein [Arabidopsis thaliana]
  misc_feature (1)..(129): Homolog of NCBI NO: 12230291 NR Description: Probable U6 snRNA-associated Sm-like protein LSm4
  misc_feature (1)..(129): Homolog of NCBI NO: 34902916 NR Description: unnamed protein product [Oryza sativa (japonica group)] >gi|6016876|dbj|BAA85219.1| unnamed protein product
  misc_feature (1)..(129): Homolog of NCBI NO: 12230258 NR Description: Probable U6 snRNA-associated Sm-like protein LSm4
  misc_feature (1)..(129): Homolog of NCBI NO: 12230329 NR Description: Probable U6 snRNA-associated Sm-like protein LSm4
  misc_feature (1)..(129): Homolog of NCBI NO: 37589787 NR Description: Unknown (protein for MGC:73057) [Danio rerio]
  misc_feature (2)..(129): Homolog of NCBI NO: 31232706 NR Description: ENSANGP00000016613 [Anopheles gambiae]
  misc_feature (1)..(128): Homolog of NCBI NO: 7657317 NR Description: U6 snRNA-associated SM-like protein 4 [Mus
MLPLSLLKTAQGHPMLVELKNGETYNGHLVNCDTWMNIHLREVICTSKDGDRFWRMPECYIRGNTIKYLRVPDEVIDKVQEEKTRTDRKPPGVGRGRGRGVDDGGARGRGRGTSMGKMGGNRGAGRGRG

SEQ ID NO: 100879 - protein, 115 aa, Arabidopsis thaliana; identical to SEQ ID NO: 24997
  peptide (1)..(115): Ceres Seq. ID no. 13606253
  misc_feature (1)..(57): Pfam Name: LSM domain Pfam Description: LSM domain
  misc_feature (1)..(115): Homolog of NCBI NO: 15241028 NR Description: glycine rich protein - like [Arabidopsis thaliana]
  misc_feature (1)..(115): Homolog of NCBI NO: 21593495 NR Description: glycine rich protein-like [Arabidopsis thaliana]
  misc_feature (1)..(115): Homolog of NCBI NO: 20260282 NR Description: unknown protein [Arabidopsis thaliana]
  misc_feature (1)..(115): Homolog of NCBI NO: 12230291 NR Description: Probable U6 snRNA-associated Sm-like protein LSm4
  misc_feature (1)..(115): Homolog of NCBI NO: 34902916 NR Description: unnamed protein product [Oryza sativa (japonica group)] >gi|6016876|dbj|BAA85219.1| unnamed protein product
  misc_feature (1)..(115): Homolog of NCBI NO: 12230258 NR Description: Probable U6 snRNA-associated Sm-like protein LSm4
  misc_feature (1)..(115): Homolog of NCBI NO: 12230329 NR Description: Probable U6 snRNA-associated Sm-like protein LSm4
  misc_feature (1)..(115): Homolog of NCBI NO: 37589787 NR Description: Unknown (protein for MGC:73057) [Danio rerio]
  misc_feature (1)..(115): Homolog of NCBI NO: 31232706 NR Description: ENSANGP00000016613 [Anopheles gambiae]
  misc_feature (1)..(114): Homolog of NCBI NO: 7657317 NR Description: U6 snRNA-associated SM-like protein 4 [Mus

SEQ ID NO: 100880 - protein, 94 aa, Arabidopsis thaliana; identical to SEQ ID NO: 24998
  peptide (1)..(94): Ceres Seq. ID no. 13606254
  misc_feature (1)..(94): Homolog of NCBI NO: 15241028 NR Description: glycine rich protein - like [Arabidopsis thaliana]
  misc_feature (1)..(94): Homolog of NCBI NO: 21593495 NR Description: glycine rich protein-like [Arabidopsis thaliana]
  misc_feature (1)..(94): Homolog of NCBI NO: 20260282 NR Description: unknown protein [Arabidopsis thaliana]
  misc_feature (1)..(94): Homolog of NCBI NO: 12230291 NR Description: Probable U6 snRNA-associated Sm-like protein LSm4
  misc_feature (1)..(94): Homolog of NCBI NO: 34902916 NR Description: unnamed protein product [Oryza sativa (japonica group)] >gi|6016876|dbj|BAA85219.1| unnamed protein product
  misc_feature (1)..(94): Homolog of NCBI NO: 12230258 NR Description: Probable U6 snRNA-associated Sm-like protein LSm4
  misc_feature (1)..(94): Homolog of NCBI NO: 12230329 NR Description: Probable U6 snRNA-associated Sm-like protein LSm4
  misc_feature (1)..(94): Homolog of NCBI NO: 37589787 NR Description: Unknown (protein for MGC:73057) [Danio rerio]
  misc_feature (1)..(94): Homolog of NCBI NO: 31232706 NR Description: ENSANGP00000016613 [Anopheles gambiae]
  misc_feature (1)..(93): Homolog of NCBI NO: 7657317 NR Description: U6 snRNA-associated SM-like protein 4 [Mus

SEQ ID NO: 100881 - DNA, 1871 bp, Arabidopsis thaliana
  misc_feature (1)..(1871): Ceres Seq. ID no. 13606271
  misc_feature: MA Experiment ID: 20000314 Result: Down-regulated in Transcription
  misc_feature: MA Experiment 20000314 PARAMETER Experiment Name: At_14day_Shoots-Roots_Sub_P Parameter: Age (day) Value: 14
  misc_feature: MA Experiment 20000314 PARAMETER Experiment Name: At_14day_Shoots-Roots_Sub_P Parameter: Organism Value: A. thaliana
  misc_feature: MA Experiment 20000314 PARAMETER Experiment Name: At_14day_Shoots-Roots_Sub_P Parameter: Plant Line Value: WS
  misc_feature: MA Experiment 20000314 PARAMETER Experiment Name: At_14day_Shoots-Roots_Sub_P Parameter: Tissue Value: Roots vs. Whole Plant
  misc_feature: MA Experiment ID: 20000315 Result: Down-regulated in Transcription
  misc_feature: MA Experiment 20000315 PARAMETER Experiment Name: At_14day_Shoots-Roots_Sub_P Parameter: Age (day) Value: 14
  misc_feature: MA Experiment 20000315 PARAMETER Experiment Name: At_14day_Shoots-Roots_Sub_P Parameter: Organism Value: A. thaliana
  misc_feature: MA Experiment 20000315 PARAMETER Experiment Name: At_14day_Shoots-Roots_Sub_P Parameter: Plant Line Value: WS
  misc_feature: MA Experiment 20000315 PARAMETER Experiment Name: At_14day_Shoots-Roots_Sub_P Parameter: Tissue Value: Shoots vs. Whole Plant
  misc_feature: MA Experiment ID: 20000327 Result: Down-regulated in Transcription
  misc_feature: MA Experiment 20000327 PARAMETER Experiment Name: At_42deg_Heat_Sub_P Parameter: Age (day) Value: 14
  misc_feature: MA Experiment 20000327 PARAMETER Experiment Name: At_42deg_Heat_Sub_P Parameter: Organism Value: A. thaliana
  misc_feature: MA Experiment 20000327 PARAMETER Experiment Name: At_42deg_Heat_Sub_P Parameter: Plant Line Value: WS
  misc_feature: MA Experiment 20000327 PARAMETER Experiment Name: At_42deg_Heat_Sub_P Parameter: Temperature (deg C) Value: 42 vs. 22
  misc_feature: MA Experiment 20000327 PARAMETER Experiment Name: At_42deg_Heat_Sub_P Parameter: Timepoint (hr) Value: 1
  misc_feature: MA Experiment 20000327 PARAMETER Experiment Name: At_42deg_Heat_Sub_P Parameter: Tissue Value: Aerial
  misc_feature: MA Experiment ID: 20000328 Result: Down-regulated in Transcription
  misc_feature: MA Experiment 20000328 PARAMETER Experiment Name: At_42deg_Heat_Sub_P Parameter: Age (day) Value: 14
  misc_feature: MA Experiment 20000328 PARAMETER Experiment Name: At_42deg_Heat_Sub_P Parameter: Organism Value: A. thaliana
  misc_feature: MA Experiment 20000328 PARAMETER Experiment Name: At_42deg_Heat_Sub_P Parameter: Plant Line Value: WS
  misc_feature: MA Experiment 20000328 PARAMETER Experiment Name: At_42deg_Heat_Sub_P Parameter: Temperature (deg C) Value: 42 vs. 22
  misc_feature: MA Experiment 20000328 PARAMETER Experiment Name: At_42deg_Heat_Sub_P Parameter: Timepoint (hr) Value: 6
  misc_feature: MA Experiment 20000328 PARAMETER Experiment Name: At_42deg_Heat_Sub_P Parameter: Tissue Value: Aerial
  misc_feature: MA Experiment ID: 20000347 Result: Up-regulated in Transcription
  misc_feature: MA Experiment 20000347 PARAMETER Experiment Name: At_2mM_SA_Sub_P Parameter: Age (day) Value: 14
  misc_feature: MA Experiment 20000347 PARAMETER Experiment Name: At_2mM_SA_Sub_P Parameter: Organism Value: A. thaliana
  misc_feature: MA Experiment 20000347 PARAMETER Experiment Name: At_2mM_SA_Sub_P Parameter: Plant Line Value: WS
  misc_feature: MA Experiment 20000347 PARAMETER Experiment Name: At_2mM_SA_Sub_P Parameter: Timepoint (hr) Value: 6
  misc_feature: MA Experiment 20000347 PARAMETER Experiment Name: At_2mM_SA_Sub_P Parameter: Tissue Value: Aerial
  misc_feature: MA Experiment 20000347 PARAMETER Experiment Name: At_2mM_SA_Sub_P Parameter: Treatment Value: 2mM SA vs. No Treatment
  misc_feature: MA Experiment ID: 20000355 Result: Down-regulated in Transcription
  misc_feature: MA Experiment 20000355 PARAMETER Experiment Name: At_Siliques_Sub_P Parameter: Age (day) Value: 21
  misc_feature: MA Experiment 20000355 PARAMETER Experiment Name: At_Siliques_Sub_P Parameter: Organism Value: A. thaliana
  misc_feature: MA Experiment 20000355 PARAMETER Experiment Name: At_Siliques_Sub_P Parameter: Plant Line Value: WS
  misc_feature: MA Experiment 20000355 PARAMETER Experiment Name: At_Siliques_Sub_P Parameter: Tissue Value: Less Than 5mm Siliques vs. Whole Plant
  misc_feature: MA Experiment ID: 20000440 Result: Down-regulated in Transcription
  misc_feature: MA Experiment 20000440 PARAMETER Experiment Name: At_Closed-Flower__Sub_P Parameter: Tissue Value: Closed Flower vs. Whole Plant
acagactacaatggacgtaactgctatcttcgccggtgatattttggtgcaatccagagagtatcttatccctaatgatgttgtggatgttgatggtggtattaaagcggtaagaccaccaataattcagccccctccgggaagaaaactacctcttattgactttccaggatcatcgtgggatttccttacgtattttgctccaagtaaaacagttaagcggcagagttcctcctcttctgataatacctctgataaagaggaagttgaaacggaagagacgcgaggtatgtttgtccagttgggggatacggctcatgaggcatgcccattcgctacaaacgaggctgactcctccagtacagtatccattatttcgccgagttatgcctctagaggttctatcgtcccttcttggctgaagaggaaatttctgggacgagtatcattaggttttgtgtatgaaggcagttcaggttcctccgttggttccgagtcgacttgttccttgatgacgccttctctggagttcccggatcgcatcagtttccggaaaaaggatttcagtgaaaaaggtcctagtcgacacgtttgggaaaagcgtaaattgacgcgtgccaagttgattgaaaatttttgcaatccggaggacattgaaccagtcacatcttggctgaagggtcaacttctaggagaagaatcatttgcctctgtgtatgaagccatttcagattcctctgttggttccgagtcgacttgttccttgatgacgccttctatggagttcccggatcgcatcagtttccgaaaaagggatttcagcgaagaaggtcctagtggacgtgttaaggaaaagcgtaaattgatgcgtaacaagttgattgagaattttcgtaagcctgaggatatcacgtcttggctgaagggtcaacttctaggacgaggatcatatgcctctgtgtatgaagccatttcagaagatggggacttctttgctgtcaaggaagtttcacttcttgataagggaattcaggcacaagaatgcattcaacaacttgagggggagattgcactacttagtcagcttcagcatcagaatattgtgcgatatcgtggcacagccaaggacgtgtcaaaattgtacatctttcttgagcttgtaacccaaggatccgttcaaaaactctacgaaagataccaacttagctacacagtagtctccttgtatacaagacaaattcttgctgggttgaattatctccacgataaaggctttgttcacagggacattaaatgtgcaaatatgttggtggacgctaatggcaccgtcaaacttgcagattttggattggcagaggcgtcaaagttcaacgacattatgtcttgcaagggaacattattttggatggctccggaggttattaaccgaaaggatagtgatggcaatggaagtccagctgatatatggagccttgggtgcactgtgctggaaatgtgtactggtcagatcccctactccgatctaaaacccattcaagccgcgtttaagattggaaggggtacgcttccagacgtacctgatactttatcactagacgctcggcatttcatacttacgtgtctcaaagtgaacccggaagagcggccaactgcagctgaactgctgcaccatccatttgttataaatctttgattcttacgctgaaacaatcaaactatgcaatagtatggcgaaaaccatttctttgattctggtcaaagccaagttaattgaagtgtgaagtgtctatataattcaacttgtttcccgttgaagagttatcgcaatgatggatttataaaacttattcgaaaggttttcgactccgtac

SEQ ID NO: 100882 - protein, 563 aa, Arabidopsis thaliana
  peptide (1)..(563): Ceres Seq. ID no. 13606272
  misc_feature (306)..(560): Pfam Name: Protein kinase domain Pfam Description: Protein kinase domain
  misc_feature (4)..(563): Homolog of NCBI NO: 15236509 NR Description: mitogen-activated protein kinase, putative
  misc_feature (4)..(563): Homolog of NCBI NO: 28393793 NR Description: putative mitogen-activated protein kinase
  misc_feature (4)..(563): Homolog of NCBI NO: 7446456 NR Description: serine/threonine-specific protein kinase ARA.KIN
  misc_feature (29)..(563): Homolog of NCBI NO: 11358511 NR Description: mitogen-activated protein kinase MAP3K beta - Arabidopsis thaliana (fragment) >gi|3688195|emb|CAA08996.1|
  misc_feature (303)..(560): Homolog of NCBI NO: 1255448 NR Description: mitogen-activated protein kinase [Arabidopsis
  misc_feature (303)..(560): Homolog of NCBI NO: 15236515 NR Description: mitogen-activated protein kinase kinase, putative
  misc_feature (15)..(159): Homolog of NCBI NO: 1255448 NR Description: mitogen-activated protein kinase [Arabidopsis
  misc_feature (15)..(159): Homolog of NCBI NO: 15236515 NR Description: mitogen-activated protein kinase kinase, putative
  misc_feature (303)..(560): Homolog of NCBI NO: 17064766 NR Description: Unknown protein [Arabidopsis thaliana]
  misc_feature (15)..(159): Homolog of NCBI NO: 17064766 NR Description: Unknown protein [Arabidopsis thaliana]
QTTMDVTAIFAGDILVQSREYLIPNDVVDVDGGIKAVRPPIIQPPPGRKLPLIDFPGSSWDFLTYFAPSKTVKRQSSSSSDNTSDKEEVETEETRGMFVQLGDTAHEACPFATNEADSSSTVSIISPSYASRGSIVPSWLKRKFLGRVSLGFVYEGSSGSSVGSESTCSLMTPSLEFPDRISFRKKDFSEKGPSRHVWEKRKLTRAKLIENFCNPEDIEPVTSWLKGQLLGEESFASVYEAISDSSVGSESTCSLMTPSMEFPDRISFRKRDFSEEGPSGRVKEKRKLMRNKLIENFRKPEDITSWLKGQLLGRGSYASVYEAISEDGDFFAVKEVSLLDKGIQAQECIQQLEGEIALLSQLQHQNIVRYRGTAKDVSKLYIFLELVTQGSVQKLYERYQLSYTVVSLYTRQILAGLNYLHDKGFVHRDIKCANMLVDANGTVKLADFGLAEASKFNDIMSCKGTLFWMAPEVINRKDSDGNGSPADIWSLGCTVLEMCTGQIPYSDLKPIQAAFKIGRGTLPDVPDTLSLDARHFILTCLKVNPEERPTAAELLHHPFVINL

SEQ ID NO: 100883 - protein, 560 aa, Arabidopsis thaliana
  peptide (1)..(560): Ceres Seq. ID no. 13606273
  misc_feature (303)..(557): Pfam Name: Protein kinase domain Pfam Description: Protein kinase domain
  misc_feature (1)..(560): Homolog of NCBI NO: 15236509 NR Description: mitogen-activated protein kinase, putative
  misc_feature (1)..(560): Homolog of NCBI NO: 28393793 NR Description: putative mitogen-activated protein kinase
  misc_feature (1)..(560): Homolog of NCBI NO: 7446456 NR Description: serine/threonine-specific protein kinase ARA.KIN
  misc_feature (26)..(560): Homolog of NCBI NO: 11358511 NR Description: mitogen-activated protein kinase MAP3K beta - Arabidopsis thaliana (fragment) >gi|3688195|emb|CAA08996.1|
  misc_feature (300)..(557): Homolog of NCBI NO: 1255448 NR Description: mitogen-activated protein kinase [Arabidopsis
  misc_feature (300)..(557): Homolog of NCBI NO: 15236515 NR Description: mitogen-activated protein kinase kinase, putative
  misc_feature (12)..(156): Homolog of NCBI NO: 1255448 NR Description: mitogen-activated protein kinase [Arabidopsis
  misc_feature (12)..(156): Homolog of NCBI NO: 15236515 NR Description: mitogen-activated protein kinase kinase, putative
  misc_feature (300)..(557): Homolog of NCBI NO: 17064766 NR Description: Unknown protein [Arabidopsis thaliana]
  misc_feature (12)..(156): Homolog of NCBI NO: 17064766 NR Description: Unknown protein [Arabidopsis thaliana]
MDVTAIFAGDILVQSREYLIPNDVVDVDGGIKAVRPPIIQPPPGRKLPLIDFPGSSWDFLTYFAPSKTVKRQSSSSSDNTSDKEEVETEETRGMFVQLGDTAHEACPFATNEADSSSTVSIISPSYASRGSIVPSWLKRKFLGRVSLGFVYEGSSGSSVGSESTCSLMTPSLEFPDRISFRKKDFSEKGPSRHVWEKRKLTRAKLIENFCNPEDIEPVTSWLKGQLLGEESFASVYEAISDSSVGSESTCSLMTPSMEFPDRISFRKRDFSEEGPSGRVKEKRKLMRNKLIENFRKPEDITSWLKGQLLGRGSYASVYEAISEDGDFFAVKEVSLLDKGIQAQECIQQLEGEIALLSQLQHQNIVRYRGTAKDVSKLYIFLELVTQGSVQKLYERYQLSYTVVSLYTRQILAGLNYLHDKGFVHRDIKCANMLVDANGTVKLADFGLAEASKFNDIMSCKGTLFWMAPEVINRKDSDGNGSPADIWSLGCTVLEMCTGQIPYSDLKPIQAAFKIGRGTLPDVPDTLSLDARHFILTCLKVNPEERPTAAELLHHPFVINL

SEQ ID NO: 100884 - protein, 467 aa, Arabidopsis thaliana
  peptide (1)..(467): Ceres Seq. ID no. 13606274
  misc_feature (210)..(464): Pfam Name: Protein kinase domain Pfam Description: Protein kinase domain
  misc_feature (1)..(467): Homolog of NCBI NO: 15236509 NR Description: mitogen-activated protein kinase, putative
  misc_feature (1)..(467): Homolog of NCBI NO: 28393793 NR Description: putative mitogen-activated protein kinase
  misc_feature (1)..(467): Homolog of NCBI NO: 7446456 NR Description: serine/threonine-specific protein kinase ARA.KIN
  misc_feature (1)..(467): Homolog of NCBI NO: 11358511 NR Description: mitogen-activated protein kinase MAP3K beta - Arabidopsis thaliana (fragment) >gi|3688195|emb|CAA08996.1|
  misc_feature (207)..(464): Homolog of NCBI NO: 1255448 NR Description: mitogen-activated protein kinase [Arabidopsis
  misc_feature (207)..(464): Homolog of NCBI NO: 15236515 NR Description: mitogen-activated protein kinase kinase, putative
  misc_feature (1)..(63): Homolog of NCBI NO: 1255448 NR Description: mitogen-activated protein kinase [Arabidopsis
  misc_feature (1)..(63): Homolog of NCBI NO: 15236515 NR Description: mitogen-activated protein kinase kinase, putative
  misc_feature (207)..(464): Homolog of NCBI NO: 17064766 NR Description: Unknown protein [Arabidopsis thaliana]
  misc_feature (1)..(63): Homolog of NCBI NO: 17064766 NR Description: Unknown protein [Arabidopsis thaliana]
MFVQLGDTAHEACPFATNEADSSSTVSIISPSYASRGSIVPSWLKRKFLGRVSLGFVYEGSSGSSVGSESTCSLMTPSLEFPDRISFRKKDFSEKGPSRHVWEKRKLTRAKLIENFCNPEDIEPVTSWLKGQLLGEESFASVYEAISDSSVGSESTCSLMTPSMEFPDRISFRKRDFSEEGPSGRVKEKRKLMRNKLIENFRKPEDITSWLKGQLLGRGSYASVYEAISEDGDFFAVKEVSLLDKGIQAQECIQQLEGEIALLSQLQHQNIVRYRGTAKDVSKLYIFLELVTQGSVQKLYERYQLSYTVVSLYTRQILAGLNYLHDKGFVHRDIKCANMLVDANGTVKLADFGLAEASKFNDIMSCKGTLFWMAPEVINRKDSDGNGSPADIWSLGCTVLEMCTGQIPYSDLKPIQAAFKIGRGTLPDVPDTLSLDARHFILTCLKVNPEERPTAAELLHHPFVINL

SEQ ID NO: 100885 - DNA, 1748 bp, Arabidopsis thaliana
  misc_feature (1)..(1748): Ceres Seq. ID no. 13606275
  misc_feature: MA Experiment ID: 108434 Result: Up-regulated in Transcription
  misc_feature: MA Experiment 108434 PARAMETER Experiment Name: At_Root_Tips_cDNA_P Parameter: Tissue Value: Root Tips
  misc_feature: MA Experiment ID: 108462 Result: Down-regulated in Transcription
  misc_feature: MA Experiment 108462 PARAMETER Experiment Name: At_Germinating_Seeds_cDNA_P Parameter: Age (day) Value: 2 vs. 0
  misc_feature: MA Experiment 108462 PARAMETER Experiment Name: At_Germinating_Seeds_cDNA_P Parameter: Tissue Value: Germinating Seeds
  misc_feature: MA Experiment ID: 108463 Result: Down-regulated in Transcription
  misc_feature: MA Experiment 108463 PARAMETER Experiment Name: At_Germinating_Seeds_cDNA_P Parameter: Age (day) Value: 3 vs. 0
  misc_feature: MA Experiment 108463 PARAMETER Experiment Name: At_Germinating_Seeds_cDNA_P Parameter: Tissue Value: Germinating Seeds
  misc_feature: MA Experiment ID: 108464 Result: Down-regulated in Transcription
  misc_feature: MA Experiment 108464 PARAMETER Experiment Name: At_Germinating_Seeds_cDNA_P Parameter: Age (day) Value: 4 vs. 0
  misc_feature: MA Experiment 108464 PARAMETER Experiment Name: At_Germinating_Seeds_cDNA_P Parameter: Tissue Value: Germinating Seeds
  misc_feature: MA Experiment ID: 108573 Result: Up-regulated in Transcription
  misc_feature: MA Experiment 108573 PARAMETER Experiment Name: At_Drought_cDNA_P Parameter: Timepoint (hr) Value: 6
  misc_feature: MA Experiment 108573 PARAMETER Experiment Name: At_Drought_cDNA_P Parameter: Tissue Value: Aerial
  misc_feature: MA Experiment 108573 PARAMETER Experiment Name: At_Drought_cDNA_P Parameter: Treatment Value: Drought vs. No Drought
  misc_feature: MA Experiment ID: 20000087 Result: Down-regulated in Transcription
  misc_feature: MA Experiment 20000087 PARAMETER Experiment Name: At_100uM_ABA_Mutants_cDNA_P Parameter: Plant Line Value: WS
  misc_feature: MA Experiment 20000087 PARAMETER Experiment Name: At_100uM_ABA_Mutants_cDNA_P Parameter: Timepoint (hr) Value: 6
  misc_feature: MA Experiment 20000087 PARAMETER Experiment Name: At_100uM_ABA_Mutants_cDNA_P Parameter: Tissue Value: Aerial
  misc_feature: MA Experiment 20000087 PARAMETER Experiment Name: At_100uM_ABA_Mutants_cDNA_P Parameter: Treatment Value: 100uM ABA vs. No Treatment
  misc_feature: MA Experiment ID: 20000224 Result: Down-regulated in Transcription
  misc_feature: MA Experiment ID: 20000794 Result: Down-regulated in Transcription
  misc_feature: MA Experiment 20000794 PARAMETER Experiment Name: At_Petals_P Parameter: Age (day) Value: 23-25 days
  misc_feature: MA Experiment 20000794 PARAMETER Experiment Name: At_Petals_P Parameter: Plant Line Value: WS
  misc_feature: MA Experiment 20000794 PARAMETER Experiment Name: At_Petals_P Parameter: Tissue Value: Petals vs. Whole plant
  misc_feature: MA Experiment ID: 20001557 Result: Up-regulated in Transcription
  misc_feature: MA Experiment 20001557 PARAMETER Experiment Name: At_Drought_Soil_Dry_P Parameter: Age (day) Value: 27
  misc_feature: MA Experiment 20001557 PARAMETER Experiment Name: At_Drought_Soil_Dry_P Parameter: Organism Value: A. thaliana
  misc_feature: MA Experiment 20001557 PARAMETER Experiment Name: At_Drought_Soil_Dry_P Parameter: Plant Line Value: WS
  misc_feature: MA Experiment 20001557 PARAMETER Experiment Name: At_Drought_Soil_Dry_P Parameter: Post Timepoint (hr) Value: 3
  misc_feature: MA Experiment 20001557 PARAMETER Experiment Name: At_Drought_Soil_Dry_P Parameter: Post-Treatment Value: Re-Water vs. No Drought
  misc_feature: MA Experiment 20001557 PARAMETER Experiment Name: At_Drought_Soil_Dry_P Parameter: Timepoint (day) Value: 13
  misc_feature: MA Experiment 20001557 PARAMETER Experiment Name: At_Drought_Soil_Dry_P Parameter: Treatment Value: Drought vs. No Drought
  misc_feature: MA Experiment ID: 20001558 Result: Up-regulated in Transcription
  misc_feature: MA Experiment 20001558 PARAMETER Experiment Name: At_Drought_Soil_Dry_P Parameter: Age (day) Value: 27
  misc_feature: MA Experiment 20001558 PARAMETER Experiment Name: At_Drought_Soil_Dry_P Parameter: Organism Value: A. thaliana
  misc_feature: MA Experiment 20001558 PARAMETER Experiment Name: At_Drought_Soil_Dry_P Parameter: Plant Line Value: WS
  misc_feature: MA Experiment 20001558 PARAMETER Experiment Name: At_Drought_Soil_Dry_P Parameter: Post Timepoint (hr) Value: 6
  misc_feature: MA Experiment 20001558 PARAMETER Experiment Name: At_Drought_Soil_Dry_P Parameter: Post-Treatment Value: Re-Water vs. No Drought
  misc_feature: MA Experiment 20001558 PARAMETER Experiment Name: At_Drought_Soil_Dry_P Parameter: Timepoint (day) Value: 13
  misc_feature: MA Experiment 20001558 PARAMETER Experiment Name: At_Drought_Soil_Dry_P Parameter: Treatment Value: Drought vs. No Drought
aacactcctttatagcttttctccgcctcaactttttgcttcttctctctcgatttgctctcacggaagattcttcagaatatctgatccgatatcagaagccccaagttcgcttgaattccgtctgagcaatggctttggtcttgcacacgtacaagggaaacaaaagtgctgagaaggcactcattgcagcagagtacgttggtgtgcagatcgatgtgccctctgactttcagatgggtgtcactaacaaaacccctgcgttcctcaagatgaaccctattggaaaggttcctgtacttgagactcccgagggttcagtatttgaaagcaacgcaattgcccgttatgtaagccgattgaatggtgacaactctttgaacggatcctccctgatcgaatatgcacaaattgagcaatggattgatttctcttcattggagatctatgcaagtatcttgaggtggttcggcccaagaatgggctttatgccatacagtgctccggctgaagaaggtgcgatctctacgttgaagagagcacttgatgctctgaacacacatctcacgtctaacacttaccttgtcggacactctattacccttgctgatatcatcactgtctgcaacttgaacttgggatttgctactgtcatgaccaagaaatttacctctgaatttcctcatgttgagaggtacttctggactgtggttaaccaaccaaacttcactaaagtgttgggtgatgtcaaacagactgaagctgtccctcctattgcttccaagaaagctgcccagcctgcaaagcccaaagaagagcctaagaaaaaggaagccccagtagcagaggcacctaagcttgctgaagaggaagaggcaccaaagcccaaagccaagaaccctcttgacttgctaccaccaagccctatggttctagatgattggaagaggctttactcaaacaccaaatctaacttccgcgaggttgctattaaaggattctgggacatgtatgacccagagggatactcactatggttctgtgactacaagtacaacgatgagaacatggtgtcatttgtcacgctcaacaaggttggtgggttccttcagcgtatggacttggcacgtaaatactcctttggaaagatgctgatttgtgggtcagagggtccgttcaaggtgaagggtttatggctgttccgtggaccagagatcccaaagttcataatggacgaggtgtacgacatggagctgtatgagtggactaaggttgatatctcagatgaagcccagaaggagcgtgttagccagatgattgaagacgcagagccatttgaaggtgaggctctcttggacgccaagtgcttcaagtgagaagagagaatggtttggtacttccatttacaggttttgcagctggggctttacatatctttctatctgtctgtctcacataggggttttgctctgtgacgtgtcgcatagactgtttttttcttttctaatcgagtgtcaaggacaagtctttttagttctttgttaatgtttcgcctccgtccagaattgtttactataccagttttcgaaatcctgaccggccagtctaccctggcaataggcaatacatggtctggtttatttgttttacggtaattttgccttgattgattttctttgacgcgtttcggtcaacttatatacattggtctttgagttgaacatttagtggtaaagtctttttggcac

SEQ ID NO: 100886 - protein, 414 aa, Arabidopsis thaliana
  peptide (1)..(414): Ceres Seq. ID no. 13606276
  misc_feature (253)..(361): Pfam Name: Elongation factor 1 gamma, conserved domain Pfam Description: Elongation factor 1 gamma, conserved domain
  misc_feature (1)..(414): Homolog of NCBI NO: 18391048 NR Description: elongation factor 1B-gamma, putative (eEF-1B [Arabidopsis thaliana] >gi|13626364|sp|O04487|EF1G_ARATH Probable
  misc_feature (1)..(414): Homolog of NCBI NO: 15223649 NR Description: elongation factor 1B-gamma, putative (eEF-1B [Arabidopsis thaliana] >gi|13626393|sp|Q9FVT2|EF1H_ARATH Probable
  misc_feature (1)..(414): Homolog of NCBI NO: 14334818 NR Description: putative elongation factor 1B gamma [Arabidopsis
  misc_feature (70)..(414): Homolog of NCBI NO: 19423960 NR Description: unknown protein [Arabidopsis thaliana]
  misc_feature (1)..(414): Homolog of NCBI NO: 13626515 NR Description: Elongation factor 1-gamma (EF-1-gamma) (eEF-1B >gi|3868758|dbj|BAA34206.1| elongation factor 1B gamma [Oryza
  misc_feature (1)..(414): Homolog of NCBI NO: 13626392 NR Description: Elongation factor 1-gamma (EF-1-gamma) (eEF-1B
  misc_feature (10)..(414): Homolog of NCBI NO: 29367403 NR Description: elongation factor 1 gamma-like protein [Oryza
MALVLHTYKGNKSAEKALIAAEYVGVQIDVPSDFQMGVTNKTPAFLKMNPIGKVPVLETPEGSVFESNAIARYVSRLNGDNSLNGSSLIEYAQIEQWIDFSSLEIYASILRWFGPRMGFMPYSAPAEEGAISTLKRALDALNTHLTSNTYLVGHSITLADIITVCNLNLGFATVMTKKFTSEFPHVERYFWTVVNQPNFTKVLGDVKQTEAVPPIASKKAAQPAKPKEEPKKKEAPVAEAPKLAEEEEAPKPKAKNPLDLLPPSPMVLDDWKRLYSNTKSNFREVAIKGFWDMYDPEGYSLWFCDYKYNDENMVSFVTLNKVGGFLQRMDLARKYSFGKMLICGSEGPFKVKGLWLFRGPEIPKFIMDEVYDMELYEWTKVDISDEAQKERVSQMIEDAEPFEGEALLDAKCFK

SEQ ID NO: 100887 - protein, 379 aa, Arabidopsis thaliana; identical to SEQ ID NO: 24982
  peptide (1)..(379): Ceres Seq. ID no. 13606277
  misc_feature (218)..(326): Pfam Name: Elongation factor 1 gamma, conserved domain Pfam Description: Elongation factor 1 gamma, conserved domain
  misc_feature (1)..(379): Homolog of NCBI NO: 18391048 NR Description: elongation factor 1B-gamma, putative (eEF-1B [Arabidopsis thaliana] >gi|13626364|sp|O04487|EF1G_ARATH Probable
  misc_feature (1)..(379): Homolog of NCBI NO: 15223649 NR Description: elongation factor 1B-gamma, putative (eEF-1B [Arabidopsis thaliana] >gi|13626393|sp|Q9FVT2|EF1H_ARATH Probable
  misc_feature (1)..(379): Homolog of NCBI NO: 14334818 NR Description: putative elongation factor 1B gamma [Arabidopsis
  misc_feature (35)..(379): Homolog of NCBI NO: 19423960 NR Description: unknown protein [Arabidopsis thaliana]
  misc_feature (1)..(379): Homolog of NCBI NO: 13626515 NR Description: Elongation factor 1-gamma (EF-1-gamma) (eEF-1B >gi|3868758|dbj|BAA34206.1| elongation factor 1B gamma [Oryza
  misc_feature (1)..(379): Homolog of NCBI NO: 13626392 NR Description: Elongation factor 1-gamma (EF-1-gamma) (eEF-1B
  misc_feature (1)..(379): Homolog of NCBI NO: 29367403 NR Description: elongation factor 1 gamma-like protein [Oryza

SEQ ID NO: 100888 - protein, 367 aa, Arabidopsis thaliana; identical to SEQ ID NO: 24983
  peptide (1)..(367): Ceres Seq. ID no. 13606278
  misc_feature (206)..(314): Pfam Name: Elongation factor 1 gamma, conserved domain Pfam Description: Elongation factor 1 gamma, conserved domain
  misc_feature (1)..(367): Homolog of NCBI NO: 18391048 NR Description: elongation factor 1B-gamma, putative (eEF-1B [Arabidopsis thaliana] >gi|13626364|sp|O04487|EF1G_ARATH Probable
  misc_feature (1)..(367): Homolog of NCBI NO: 15223649 NR Description: elongation factor 1B-gamma, putative (eEF-1B [Arabidopsis thaliana] >gi|13626393|sp|Q9FVT2|EF1H_ARATH Probable
  misc_feature (1)..(367): Homolog of NCBI NO: 14334818 NR Description: putative elongation factor 1B gamma [Arabidopsis
  misc_feature (23)..(367): Homolog of NCBI NO: 19423960 NR Description: unknown protein [Arabidopsis thaliana]
  misc_feature (1)..(367): Homolog of NCBI NO: 13626515 NR Description: Elongation factor 1-gamma (EF-1-gamma) (eEF-1B >gi|3868758|dbj|BAA34206.1| elongation factor 1B gamma [Oryza
  misc_feature (1)..(367): Homolog of NCBI NO: 13626392 NR Description: Elongation factor 1-gamma (EF-1-gamma) (eEF-1B
  misc_feature (1)..(367): Homolog of NCBI NO: 29367403 NR Description: elongation factor 1 gamma-like protein [Oryza

SEQ ID NO: 100889 - DNA, 1287 bp, Arabidopsis thaliana
  misc_feature (1)..(1287): Ceres Seq. ID no. 13606300
  misc_feature: MA Experiment ID: 20000184 Result: Down-regulated in Transcription
  misc_feature: MA Experiment 20000184 PARAMETER Experiment Name: At_Shoots__P Parameter: Age (day) Value: 7
  misc_feature: MA Experiment 20000184 PARAMETER Experiment Name: At_Shoots__P Parameter: Tissue Value: Shoots vs. Whole Plant
  misc_feature: MA Experiment ID: 20000794 Result: Down-regulated in Transcription
  misc_feature: MA Experiment 20000794 PARAMETER Experiment Name: At_Petals_P Parameter: Age (day) Value: 23-25 days
  misc_feature: MA Experiment 20000794 PARAMETER Experiment Name: At_Petals_P Parameter: Plant Line Value: WS
  misc_feature: MA Experiment 20000794 PARAMETER Experiment Name: At_Petals_P Parameter: Tissue Value: Petals vs. Whole plant
atgggtggtgagagtaatgaaggaggagagatgggctttaagcatggagatgatgagagtggtgggatctctagagttggaattacatcaatgcccttgtatgcaaaggcagatcctttcttctcttctgcagattgggatccagttgtcaatgctgctgctgctggcttctccagctctcattaccatccttccatggcgatggataatccagggatgagttgcttctctcattaccaacccggttctgtttccggttttgcagcagacatgcctgctagtcttcttccgtttggtgattgtggtggtggtcaaattggtcattttcttggttcagacaagaaaggggaaagattgatcagagctggagaatcatctcatgaggatcatcatcaggtttcagatgatgctgttcttggtgcttccccagttgggaaaagaaggctacctgaagccgaatcacaatggaacaagaaagctgtggaggaatttcaagaagaccctcaaaggggaaatgatcagagccagaagaagcataaaaatgatcagagtaaagagacggtgaacaaggagagctcacaaagtgaagaagcaccgaaagaaaactacattcatatgagggcaagaagaggtcaagccactaatagtcacagtcttgcagagcgggttagaagagaaaagatcagtgaaaggatgagattgcttcaagaacttgttcccggatgcaacaagatcaccggaaaagcggttatgctcgatgaaataatcaactatgttcagtcattgcaacagcaagttgagtttttgtctatgaaacttgcgacggtgaatccagagatcaatattgatatagacaggattctcgccaaagatcttctgcagtcaagagacagaaacactcctacactcgggctgaatccttttgccggttttcaagggaacataccaaacctttctgccaccacaaatccacaatacaacccactacctcagacaacactagagagtgaactacaaaacctttaccagatgggattcgtctcaaatccatcgactatgtccagtttctcacctaatggtcgattgaaacctgagctctagtacttcaaggacacggaaaatttgcagggagtttgtatagaagatggctttggttctaagtatcatatgtgttcgttcttccatattatttgttctaagcacaaggatttggattctcagttgttgttgtttttgcttttcctcaacgaagaatacatttattatatatggaaatcagatttatct

SEQ ID NO: 100890 - protein, 366 aa, Arabidopsis thaliana
  peptide (1)..(366): Ceres Seq. ID no. 13606301
  misc_feature (213)..(263): Pfam Name: Helix-loop-helix DNA-binding domain Pfam Description: Helix-loop-helix DNA-binding domain
  misc_feature (1)..(366): Homolog of NCBI NO: 30681559 NR Description: expressed protein [Arabidopsis thaliana]
  misc_feature (1)..(257): Homolog of NCBI NO: 7487488 NR Description: hypothetical protein T27I1.15 - Arabidopsis >gi|3540186|gb|AAC34336.1| Hypothetical protein [Arabidopsis
  misc_feature (48)..(360): Homolog of NCBI NO: 7487488 NR Description: hypothetical protein T27I1.15 - Arabidopsis >gi|3540186|gb|AAC34336.1| Hypothetical protein [Arabidopsis
  misc_feature (145)..(341): Homolog of NCBI NO: 20127044 NR Description: putative bHLH transcription factor [Arabidopsis
  misc_feature (146)..(341): Homolog of NCBI NO: 30697769 NR Description: DNA-binding protein -related [Arabidopsis
  misc_feature (145)..(341): Homolog of NCBI NO: 15221563 NR Description: DNA-binding protein -related [Arabidopsis
  misc_feature (113)..(307): Homolog of NCBI NO: 28273388 NR Description: putative Helix-loop-helix DNA-binding domain
  misc_feature (102)..(296): Homolog of NCBI NO: 34898690 NR Description: hypothetical protein [Oryza sativa (japonica group)] >gi|11862964|dbj|BAB19345.1| hypothetical protein [Oryza
  misc_feature (173)..(349): Homolog of NCBI NO: 15222679 NR Description: bHLH protein [Arabidopsis thaliana]
  misc_feature (102)..(295): Homolog of NCBI NO: 34906952 NR Description: DNA-binding protein-like protein [Oryza sativa
MGGESNEGGEMGFKHGDDESGGISRVGITSMPLYAKADPFFSSADWDPVVNAAAAGFSSSHYHPSMAMDNPGMSCFSHYQPGSVSGFAADMPASLLPFGDCGGGQIGHFLGSDKKGERLIRAGESSHEDHHQVSDDAVLGASPVGKRRLPEAESQWNKKAVEEFQEDPQRGNDQSQKKHKNDQSKETVNKESSQSEEAPKENYIHMRARRGQATNSHSLAERVRREKISERMRLLQELVPGCNKITGKAVMLDEIINYVQSLQQQVEFLSMKLATVNPEINIDIDRILAKDLLQSRDRNTPTLGLNPFAGFQGNIPNLSATTNPQYNPLPQTTLESELQNLYQMGFVSNPSTMSSFSPNGRLKPEL

SEQ ID NO: 100891 - protein, 356 aa, Arabidopsis thaliana
  peptide (1)..(356): Ceres Seq. ID no. 13606302
  misc_feature (203)..(253): Pfam Name: Helix-loop-helix DNA-binding domain Pfam Description: Helix-loop-helix DNA-binding domain
  misc_feature (1)..(356): Homolog of NCBI NO: 30681559 NR Description: expressed protein [Arabidopsis thaliana]
  misc_feature (1)..(247): Homolog of NCBI NO: 7487488 NR Description: hypothetical protein T27I1.15 - Arabidopsis >gi|3540186|gb|AAC34336.1| Hypothetical protein [Arabidopsis
  misc_feature (38)..(350): Homolog of NCBI NO: 7487488 NR Description: hypothetical protein T27I1.15 - Arabidopsis >gi|3540186|gb|AAC34336.1| Hypothetical protein [Arabidopsis
  misc_feature (135)..(331): Homolog of NCBI NO: 20127044 NR Description: putative bHLH transcription factor [Arabidopsis
  misc_feature (136)..(331): Homolog of NCBI NO: 30697769 NR Description: DNA-binding protein -related [Arabidopsis
  misc_feature (135)..(331): Homolog of NCBI NO: 15221563 NR Description: DNA-binding protein -related [Arabidopsis
  misc_feature (103)..(297): Homolog of NCBI NO: 28273388 NR Description: putative Helix-loop-helix DNA-binding domain
  misc_feature (92)..(286): Homolog of NCBI NO: 34898690 NR Description: hypothetical protein [Oryza sativa (japonica group)] >gi|11862964|dbj|BAB19345.1| hypothetical protein [Oryza
  misc_feature (163)..(339): Homolog of NCBI NO: 15222679 NR Description: bHLH protein [Arabidopsis thaliana]
  misc_feature (92)..(285): Homolog of NCBI NO: 34906952 NR Description: DNA-binding protein-like protein [Oryza sativa
MGFKHGDDESGGISRVGITSMPLYAKADPFFSSADWDPVVNAAAAGFSSSHYHPSMAMDNPGMSCFSHYQPGSVSGFAADMPASLLPFGDCGGGQIGHFLGSDKKGERLIRAGESSHEDHHQVSDDAVLGASPVGKRRLPEAESQWNKKAVEEFQEDPQRGNDQSQKKHKNDQSKETVNKESSQSEEAPKENYIHMRARRGQATNSHSLAERVRREKISERMRLLQELVPGCNKITGKAVMLDEIINYVQSLQQQVEFLSMKLATVNPEINIDIDRILAKDLLQSRDRNTPTLGLNPFAGFQGNIPNLSATTNPQYNPLPQTTLESELQNLYQMGFVSNPSTMSSFSPNGRLKPEL

SEQ ID NO: 100892 - protein, 336 aa, Arabidopsis thaliana
  peptide (1)..(336): Ceres Seq. ID no. 13606303
  misc_feature (183)..(233): Pfam Name: Helix-loop-helix DNA-binding domain Pfam Description: Helix-loop-helix DNA-binding domain
  misc_feature (1)..(336): Homolog of NCBI NO: 30681559 NR Description: expressed protein [Arabidopsis thaliana]
  misc_feature (1)..(227): Homolog of NCBI NO: 7487488 NR Description: hypothetical protein T27I1.15 - Arabidopsis >gi|3540186|gb|AAC34336.1| Hypothetical protein [Arabidopsis
  misc_feature (18)..(330): Homolog of NCBI NO: 7487488 NR Description: hypothetical protein T27I1.15 - Arabidopsis >gi|3540186|gb|AAC34336.1| Hypothetical protein [Arabidopsis
  misc_feature (115)..(311): Homolog of NCBI NO: 20127044 NR Description: putative bHLH transcription factor [Arabidopsis
  misc_feature (116)..(311): Homolog of NCBI NO: 30697769 NR Description: DNA-binding protein -related [Arabidopsis
  misc_feature (115)..(311): Homolog of NCBI NO: 15221563 NR Description: DNA-binding protein -related [Arabidopsis
  misc_feature (83)..(277): Homolog of NCBI NO: 28273388 NR Description: putative Helix-loop-helix DNA-binding domain
  misc_feature (72)..(266): Homolog of NCBI NO: 34898690 NR Description: hypothetical protein [Oryza sativa (japonica group)] >gi|11862964|dbj|BAB19345.1| hypothetical protein [Oryza
  misc_feature (143)..(319): Homolog of NCBI NO: 15222679 NR Description: bHLH protein [Arabidopsis thaliana]
  misc_feature (72)..(265): Homolog of NCBI NO: 34906952 NR Description: DNA-binding protein-like protein [Oryza sativa
MPLYAKADPFFSSADWDPVVNAAAAGFSSSHYHPSMAMDNPGMSCFSHYQPGSVSGFAADMPASLLPFGDCGGGQIGHFLGSDKKGERLIRAGESSHEDHHQVSDDAVLGASPVGKRRLPEAESQWNKKAVEEFQEDPQRGNDQSQKKHKNDQSKETVNKESSQSEEAPKENYIHMRARRGQATNSHSLAERVRREKISERMRLLQELVPGCNKITGKAVMLDEIINYVQSLQQQVEFLSMKLATVNPEINIDIDRILAKDLLQSRDRNTPTLGLNPFAGFQGNIPNLSATTNPQYNPLPQTTLESELQNLYQMGFVSNPSTMSSFSPNGRLKPEL

SEQ ID NO: 100893 - DNA, 1620 bp, Arabidopsis thaliana
  misc_feature (1)..(1620): Ceres Seq. ID no. 13606304
  misc_feature: MA Experiment ID: 20000234 Result: Down-regulated in Transcription
  misc_feature: MA Experiment 20000234 PARAMETER Experiment Name: At_Siliques_P Parameter: Age (day) Value: 21
  misc_feature: MA Experiment 20000234 PARAMETER Experiment Name: At_Siliques_P Parameter: Organism Value: A. thaliana
  misc_feature: MA Experiment 20000234 PARAMETER Experiment Name: At_Siliques_P Parameter: Plant Line Value: WS
  misc_feature: MA Experiment 20000234 PARAMETER Experiment Name: At_Siliques_P Parameter: Tissue Value: Less Than 5mm Siliques vs. Whole Plant
  misc_feature: MA Experiment ID: 20000235 Result: Down-regulated in Transcription
  misc_feature: MA Experiment 20000235 PARAMETER Experiment Name: At_Siliques_P Parameter: Age (day) Value: 21
  misc_feature: MA Experiment 20000235 PARAMETER Experiment Name: At_Siliques_P Parameter: Organism Value: A. thaliana
  misc_feature: MA Experiment 20000235 PARAMETER Experiment Name: At_Siliques_P Parameter: Plant Line Value: WS
  misc_feature: MA Experiment 20000235 PARAMETER Experiment Name: At_Siliques_P Parameter: Tissue Value: 5-10mm Siliques vs. Whole Plant
  misc_feature: MA Experiment ID: 20000574 Result: Down-regulated in Transcription
  misc_feature: MA Experiment 20000574 PARAMETER Experiment Name: At_100uM_ABA_Mutants__P Parameter: Organism Value: A. thaliana
  misc_feature: MA Experiment 20000574 PARAMETER Experiment Name: At_100uM_ABA_Mutants__P Parameter: Plant Line Value: CS23 vs. Ler wt
  misc_feature: MA Experiment 20000574 PARAMETER Experiment Name: At_100uM_ABA_Mutants__P Parameter: Timepoint (hr) Value: N/A
  misc_feature: MA Experiment 20000574 PARAMETER Experiment Name: At_100uM_ABA_Mutants__P Parameter: Tissue Value: Whole Plant
  misc_feature: MA Experiment 20000574 PARAMETER Experiment Name: At_100uM_ABA_Mutants__P Parameter: Treatment Value: None
  misc_feature: MA Experiment ID: 20001247 Result: Up-regulated in Transcription
  misc_feature: MA Experiment 20001247 PARAMETER Experiment Name: At_Far-red-induction_P Parameter: Age (day) Value: 7
  misc_feature: MA Experiment 20001247 PARAMETER Experiment Name: At_Far-red-induction_P Parameter: Light Value: Far-red vs. White
  misc_feature: MA Experiment 20001247 PARAMETER Experiment Name: At_Far-red-induction_P Parameter: Organism Value: A. thaliana
  misc_feature: MA Experiment 20001247 PARAMETER Experiment Name: At_Far-red-induction_P Parameter: Plant Line Value: Columbia
  misc_feature: MA Experiment 20001247 PARAMETER Experiment Name: At_Far-red-induction_P Parameter: Timepoint (hr) Value: 1
  misc_feature: MA Experiment 20001247 PARAMETER Experiment Name: At_Far-red-induction_P Parameter: Tissue Value: Whole Plant
  misc_feature: MA Experiment ID: 20001450 Result: Up-regulated in Transcription
  misc_feature: MA Experiment 20001450 PARAMETER Experiment Name: At_Far-red-induction_P Parameter: Age (day) Value: 7
  misc_feature: MA Experiment 20001450 PARAMETER Experiment Name: At_Far-red-induction_P Parameter: Light Value: Far-red vs. White
  misc_feature: MA Experiment 20001450 PARAMETER Experiment Name: At_Far-red-induction_P Parameter: Organism Value: A. thaliana
  misc_feature: MA Experiment 20001450 PARAMETER Experiment Name: At_Far-red-induction_P Parameter: Plant Line Value: Columbia
  misc_feature: MA Experiment 20001450 PARAMETER Experiment Name: At_Far-red-induction_P Parameter: Timepoint (hr) Value: 8
  misc_feature: MA Experiment 20001450 PARAMETER Experiment Name: At_Far-red-induction_P Parameter: Tissue Value: Whole Plant
  misc_feature: MA Experiment ID: 20001560 Result: Down-regulated in Transcription
  misc_feature: MA Experiment 20001560 PARAMETER Experiment Name: At_Drought_Soil_Dry_P Parameter: Age (day) Value: 28
  misc_feature: MA Experiment 20001560 PARAMETER Experiment Name: At_Drought_Soil_Dry_P Parameter: Organism Value: A. thaliana
  misc_feature: MA Experiment 20001560 PARAMETER Experiment Name: At_Drought_Soil_Dry_P Parameter: Plant Line Value: WS
  misc_feature: MA Experiment 20001560 PARAMETER Experiment Name: At_Drought_Soil_Dry_P Parameter: Post Timepoint (hr) Value: None
  misc_feature: MA Experiment 20001560 PARAMETER Experiment Name: At_Drought_Soil_Dry_P Parameter: Post-Treatment Value: None
  misc_feature: MA Experiment 20001560 PARAMETER Experiment Name: At_Drought_Soil_Dry_P Parameter: Timepoint (day) Value: 14
  misc_feature: MA Experiment 20001560 PARAMETER Experiment Name: At_Drought_Soil_Dry_P Parameter: Treatment Value: Drought vs. No Drought
attcatgttattatggtcaacaacagaatctgaatcccatttccccattttcggatcacaataactaacaaaccctagatttctatctatagtccttcgatctgtttctgtgtctccttaaagctgtgatttttgcaattggggtttgtgagattcgatcaattaattgtgtttgttgaatggaccttcttcgattgagagaaaagggtatatttttatctcagagaagaaggaaatggctgatttttatggcgatctctggagtttctggctatggagcttacaaggtttatcatttgccatctgttgccagaaaaaggaagcgtctttttaagcttttcggagccattgtctctgtagctgaattgatctctgattcagctgagaccttaagtatggtatcacgagacgtgaaggattttctcaattcagattcagatgaaatccctaacagcttgaagcagatcgcgaagatcacaacttcgaatgagtttacggattcgctttctagggtttctcaggctgtgactattggtgcctttcgtgggtacaaatccgaatcgtctattggtgattcaggaattgagaaatcatcagactcgagtgttgttgatagagtgattgataaggttttctcagaggctggaactggttttgtttcagttgttgttggtagctttgctaagaatcttgttcttggattttactctggtaaggtagagagtggtgtgaaatgtgagggttctgattcttctgagacacctagatgggtgactttgcttggtgatgacaagtgtagagagcttttagctgattgtattgagagattcaccagcactgcaattggtgtgtatcttgacaagacgatggatatcaatacttatgatcaaatctttgaaggcttgacgaatccgaaacatcaggatagtgtcaaggacgttcttgtttcggtttgtaacggtgctctcgagactattgttaggacatctcacgacgtgtttacatcttcaaggtctaagaatgtgatagaagagatcgaagatgatgatttcaagagtaatggttccgcgagaagcaagatggtttcggaatcaggagatggggtcaagagtaatgggtggactgaggctattgcaactacattggcagttccgagcaatcggaggtttatgtttgatgtaacaggaagagtaacactagaaacgacgagatcaatcatcgcatttataatggtgaagacatttcaagggttcagaaaaagtatcaatgtggttcatgaagaggttacagacagaggacgccaagcagttgaatatgttggagccaaatcttctgttataatcactgtatgccttgcgttgtacttgcacatcataagcggctgtgttcggaattctcccataggcgtaagccagcatttttagttcttcagatgaagaagagatcatcgatttggttggatataggataatatttgttaggtacacaagatttatcagctcgttgtttatagttggagctgagaatattgtaaagattgtgtgcgtgtattagcacaacttgattcttattgatggatcatggatcttatatatatatacatattgaaaaggttcttgg

SEQ ID NO: 100894 - protein, 414 aa, Arabidopsis thaliana
  peptide (1)..(414): Ceres Seq. ID no. 13606305
  misc_feature (1)..(414): Homolog of NCBI NO: 18391117 NR Description: expressed protein [Arabidopsis thaliana]
  misc_feature (1)..(414): Homolog of NCBI NO: 21554418 NR Description: unknown [Arabidopsis thaliana]
  misc_feature (1)..(299): Homolog of NCBI NO: 21553547 NR Description: unknown [Arabidopsis thaliana]
  misc_feature (289)..(414): Homolog of NCBI NO: 21553547 NR Description: unknown [Arabidopsis thaliana]
  misc_feature (1)..(299): Homolog of NCBI NO: 18406365 NR Description: expressed protein [Arabidopsis thaliana]
  misc_feature (289)..(414): Homolog of NCBI NO: 18406365 NR Description: expressed protein [Arabidopsis thaliana]
  misc_feature (1)..(299): Homolog of NCBI NO: 14475940 NR Description: unknown protein [Arabidopsis thaliana]
  misc_feature (289)..(407): Homolog of NCBI NO: 14475940 NR Description: unknown protein [Arabidopsis thaliana]
  misc_feature (57)..(412): Homolog of NCBI NO: 22093613 NR Description: hypothetical protein~similar to Arabidopsis
  misc_feature (11)..(282): Homolog of NCBI NO: 40539064 NR Description: expressed protein [Oryza sativa (japonica
MDLLRLREKGIFLSQRRRKWLIFMAISGVSGYGAYKVYHLPSVARKRKRLFKLFGAIVSVAELISDSAETLSMVSRDVKDFLNSDSDEIPNSLKQIAKITTSNEFTDSLSRVSQAVTIGAFRGYKSESSIGDSGIEKSSDSSVVDRVIDKVFSEAGTGFVSVVVGSFAKNLVLGFYSGKVESGVKCEGSDSSETPRWVTLLGDDKCRELLADCIERFTSTAIGVYLDKTMDINTYDQIFEGLTNPKHQDSVKDVLVSVCNGALETIVRTSHDVFTSSRSKNVIEEIEDDDFKSNGSARSKMVSESGDGVKSNGWTEAIATTLAVPSNRRFMFDVTGRVTLETTRSIIAFIMVKTFQGFRKSINVVHEEVTDRGRQAVEYVGAKSSVIITVCLALYLHIISGCVRNSPIGVSQHF

SEQ ID NO: 100895 - protein, 391 aa, Arabidopsis thaliana
  peptide (1)..(391): Ceres Seq. ID no. 13606306
  misc_feature (1)..(391): Homolog of NCBI NO: 18391117 NR Description: expressed protein [Arabidopsis thaliana]
  misc_feature (1)..(391): Homolog of NCBI NO: 21554418 NR Description: unknown [Arabidopsis thaliana]
  misc_feature (1)..(276): Homolog of NCBI NO: 21553547 NR Description: unknown [Arabidopsis thaliana]
  misc_feature (266)..(391): Homolog of NCBI NO: 21553547 NR Description: unknown [Arabidopsis thaliana]
  misc_feature (1)..(276): Homolog of NCBI NO: 18406365 NR Description: expressed protein [Arabidopsis thaliana]
  misc_feature (266)..(391): Homolog of NCBI NO: 18406365 NR Description: expressed protein [Arabidopsis thaliana]
  misc_feature (1)..(276): Homolog of NCBI NO: 14475940 NR Description: unknown protein [Arabidopsis thaliana]
  misc_feature (266)..(384): Homolog of NCBI NO: 14475940 NR Description: unknown protein [Arabidopsis thaliana]
  misc_feature (34)..(389): Homolog of NCBI NO: 22093613 NR Description: hypothetical protein~similar to Arabidopsis
  misc_feature (1)..(259): Homolog of NCBI NO: 40539064 NR Description: expressed protein [Oryza sativa (japonica
MAISGVSGYGAYKVYHLPSVARKRKRLFKLFGAIVSVAELISDSAETLSMVSRDVKDFLNSDSDEIPNSLKQIAKITTSNEFTDSLSRVSQAVTIGAFRGYKSESSIGDSGIEKSSDSSVVDRVIDKVFSEAGTGFVSVVVGSFAKNLVLGFYSGKVESGVKCEGSDSSETPRWVTLLGDDKCRELLADCIERFTSTAIGVYLDKTMDINTYDQIFEGLTNPKHQDSVKDVLVSVCNGALETIVRTSHDVFTSSRSKNVIEEIEDDDFKSNGSARSKMVSESGDGVKSNGWTEAIATTLAVPSNRRFMFDVTGRVTLETTRSIIAFIMVKTFQGFRKSINVVHEEVTDRGRQAVEYVGAKSSVIITVCLALYLHIISGCVRNSPIGVSQHF

SEQ ID NO: 100896 - protein, 342 aa, Arabidopsis thaliana
  peptide (1)..(342): Ceres Seq. ID no. 13606307
  misc_feature (1)..(342): Homolog of NCBI NO: 18391117 NR Description: expressed protein [Arabidopsis thaliana]
  misc_feature (1)..(342): Homolog of NCBI NO: 21554418 NR Description: unknown [Arabidopsis thaliana]
  misc_feature (1)..(227): Homolog of NCBI NO: 21553547 NR Description: unknown [Arabidopsis thaliana]
  misc_feature (217)..(342): Homolog of NCBI NO: 21553547 NR Description: unknown [Arabidopsis thaliana]
  misc_feature (1)..(227): Homolog of NCBI NO: 18406365 NR Description: expressed protein [Arabidopsis thaliana]
  misc_feature (217)..(342): Homolog of NCBI NO: 18406365 NR Description: expressed protein [Arabidopsis thaliana]
  misc_feature (1)..(227): Homolog of NCBI NO: 14475940 NR Description: unknown protein [Arabidopsis thaliana]
  misc_feature (217)..(335): Homolog of NCBI NO: 14475940 NR Description: unknown protein [Arabidopsis thaliana]
  misc_feature (1)..(340): Homolog of NCBI NO: 22093613 NR Description: hypothetical protein~similar to Arabidopsis
  misc_feature (1)..(210): Homolog of NCBI NO: 40539064 NR Description: expressed protein [Oryza sativa (japonica
MVSRDVKDFLNSDSDEIPNSLKQIAKITTSNEFTDSLSRVSQAVTIGAFRGYKSESSIGDSGIEKSSDSSVVDRVIDKVFSEAGTGFVSVVVGSFAKNLVLGFYSGKVESGVKCEGSDSSETPRWVTLLGDDKCRELLADCIERFTSTAIGVYLDKTMDINTYDQIFEGLTNPKHQDSVKDVLVSVCNGALETIVRTSHDVFTSSRSKNVIEEIEDDDFKSNGSARSKMVSESGDGVKSNGWTEAIATTLAVPSNRRFMFDVTGRVTLETTRSIIAFIMVKTFQGFRKSINVVHEEVTDRGRQAVEYVGAKSSVIITVCLALYLHIISGCVRNSPIGVSQHF

SEQ ID NO: 100897 - DNA, 958 bp, Arabidopsis thaliana
  misc_feature (1)..(958): Ceres Seq. ID no. 13606308
  misc_feature: MA Experiment ID: 108461 Result: Up-regulated in Transcription
  misc_feature: MA Experiment 108461 PARAMETER Experiment Name: At_Germinating_Seeds_cDNA_P Parameter: Age (day) Value: 1 vs. 0
  misc_feature: MA Experiment 108461 PARAMETER Experiment Name: At_Germinating_Seeds_cDNA_P Parameter: Tissue Value: Germinating Seeds
  misc_feature: MA Experiment ID: 108462 Result: Up-regulated in Transcription
  misc_feature: MA Experiment 108462 PARAMETER Experiment Name: At_Germinating_Seeds_cDNA_P Parameter: Age (day) Value: 2 vs. 0
  misc_feature: MA Experiment 108462 PARAMETER Experiment Name: At_Germinating_Seeds_cDNA_P Parameter: Tissue Value: Germinating Seeds
  misc_feature: MA Experiment ID: 108463 Result: Up-regulated in Transcription
  misc_feature: MA Experiment 108463 PARAMETER Experiment Name: At_Germinating_Seeds_cDNA_P Parameter: Age (day) Value: 3 vs. 0
  misc_feature: MA Experiment 108463 PARAMETER Experiment Name: At_Germinating_Seeds_cDNA_P Parameter: Tissue Value: Germinating Seeds
  misc_feature: MA Experiment ID: 108464 Result: Up-regulated in Transcription
  misc_feature: MA Experiment 108464 PARAMETER Experiment Name: At_Germinating_Seeds_cDNA_P Parameter: Age (day) Value: 4 vs. 0
  misc_feature: MA Experiment 108464 PARAMETER Experiment Name: At_Germinating_Seeds_cDNA_P Parameter: Tissue Value: Germinating Seeds
  misc_feature: MA Experiment ID: 108573 Result: Down-regulated in Transcription
  misc_feature: MA Experiment 108573 PARAMETER Experiment Name: At_Drought_cDNA_P Parameter: Timepoint (hr) Value: 6
  misc_feature: MA Experiment 108573 PARAMETER Experiment Name: At_Drought_cDNA_P Parameter: Tissue Value: Aerial
  misc_feature: MA Experiment 108573 PARAMETER Experiment Name: At_Drought_cDNA_P Parameter: Treatment Value: Drought vs. No Drought
  misc_feature: MA Experiment ID: 108577 Result: Down-regulated in Transcription
  misc_feature: MA Experiment 108577 PARAMETER Experiment Name: At_42deg_Heat_cDNA_P Parameter: Temperature (deg C) Value: 42 vs. 22
  misc_feature: MA Experiment 108577 PARAMETER Experiment Name: At_42deg_Heat_cDNA_P Parameter: Timepoint (hr) Value: 6
  misc_feature: MA Experiment 108577 PARAMETER Experiment Name: At_42deg_Heat_cDNA_P Parameter: Tissue Value: Aerial
  misc_feature: MA Experiment ID: 108579 Result: Down-regulated in Transcription
  misc_feature: MA Experiment 108579 PARAMETER Experiment Name: At_4deg_Cold_cDNA_P Parameter: Temperature (deg C) Value: 4 vs. 22
  misc_feature: MA Experiment 108579 PARAMETER Experiment Name: At_4deg_Cold_cDNA_P Parameter: Timepoint (hr) Value: 6
  misc_feature: MA Experiment 108579 PARAMETER Experiment Name: At_4deg_Cold_cDNA_P Parameter: Tissue Value: Aerial
  misc_feature: MA Experiment ID: 108585 Result: Down-regulated in Transcription
  misc_feature: MA Experiment 108585 PARAMETER Experiment Name: At_5mM_NaNP_cDNA_P Parameter: Timepoint (hr) Value: 6
  misc_feature: MA Experiment 108585 PARAMETER Experiment Name: At_5mM_NaNP_cDNA_P Parameter: Tissue Value: Aerial
  misc_feature: MA Experiment 108585 PARAMETER Experiment Name: At_5mM_NaNP_cDNA_P Parameter: Treatment Value: null
  misc_feature: MA Experiment ID: 20000069 Result: Up-regulated in Transcription
  misc_feature: MA Experiment 20000069 PARAMETER Experiment Name: At_100uM_ABA_Mutants_cDNA_P Parameter: Plant Line Value: CS23
  misc_feature: MA Experiment 20000069 PARAMETER Experiment Name: At_100uM_ABA_Mutants_cDNA_P Parameter: Timepoint (hr) Value: 6
  misc_feature: MA Experiment 20000069 PARAMETER Experiment Name: At_100uM_ABA_Mutants_cDNA_P Parameter: Tissue Value: Aerial
  misc_feature: MA Experiment 20000069 PARAMETER Experiment Name: At_100uM_ABA_Mutants_cDNA_P Parameter: Treatment Value: 100uM ABA vs. No Treatment
  misc_feature: MA Experiment ID: 20000070 Result: Up-regulated in Transcription
  misc_feature: MA Experiment 20000070 PARAMETER Experiment Name: At_100uM_ABA_Mutants_cDNA_P Parameter: Plant Line Value: CS24
  misc_feature: MA Experiment 20000070 PARAMETER Experiment Name: At_100uM_ABA_Mutants_cDNA_P Parameter: Timepoint (hr) Value: 6
  misc_feature: MA Experiment 20000070 PARAMETER Experiment Name: At_100uM_ABA_Mutants_cDNA_P Parameter: Tissue Value: Aerial
  misc_feature: MA Experiment 20000070 PARAMETER Experiment Name: At_100uM_ABA_Mutants_cDNA_P Parameter: Treatment Value: 100uM ABA vs. No Treatment
  misc_feature: MA Experiment ID: 20000071 Result: Up-regulated in Transcription
  misc_feature: MA Experiment 20000071 PARAMETER Experiment Name: At_100uM_ABA_Mutants_cDNA_P Parameter: Plant Line Value: CS8104
  misc_feature: MA Experiment 20000071 PARAMETER Experiment Name: At_100uM_ABA_Mutants_cDNA_P Parameter: Timepoint (hr) Value: 6
  misc_feature: MA Experiment 20000071 PARAMETER Experiment Name: At_100uM_ABA_Mutants_cDNA_P Parameter: Tissue Value: Aerial
  misc_feature: MA Experiment 20000071 PARAMETER Experiment Name: At_100uM_ABA_Mutants_cDNA_P Parameter: Treatment Value: 100uM ABA vs. No Treatment
  misc_feature: MA Experiment ID: 20000072 Result: Up-regulated in Transcription
  misc_feature: MA Experiment 20000072 PARAMETER Experiment Name: At_100uM_ABA_Mutants_cDNA_P Parameter: Plant Line Value: CS8105
  misc_feature: MA Experiment 20000072 PARAMETER Experiment Name: At_100uM_ABA_Mutants_cDNA_P Parameter: Timepoint (hr) Value: 6
  misc_feature: MA Experiment 20000072 PARAMETER Experiment Name: At_100uM_ABA_Mutants_cDNA_P Parameter: Tissue Value: Aerial
  misc_feature: MA Experiment 20000072 PARAMETER Experiment Name: At_100uM_ABA_Mutants_cDNA_P Parameter: Treatment Value: 100uM ABA vs. No Treatment
  misc_feature: MA Experiment ID: 20000087 Result: Up-regulated in Transcription
  misc_feature: MA Experiment 20000087 PARAMETER Experiment Name: At_100uM_ABA_Mutants_cDNA_P Parameter: Plant Line Value: WS
  misc_feature: MA Experiment 20000087 PARAMETER Experiment Name: At_100uM_ABA_Mutants_cDNA_P Parameter: Timepoint (hr) Value: 6
  misc_feature: MA Experiment 20000087 PARAMETER Experiment Name: At_100uM_ABA_Mutants_cDNA_P Parameter: Tissue Value: Aerial
  misc_feature: MA Experiment 20000087 PARAMETER Experiment Name: At_100uM_ABA_Mutants_cDNA_P Parameter: Treatment Value: 100uM ABA vs. No Treatment
  misc_feature: MA Experiment ID: 20000088 Result: Up-regulated in Transcription
  misc_feature: MA Experiment 20000088 PARAMETER Experiment Name: At_100uM_ABA_Mutants_cDNA_P Parameter: Plant Line Value: Landsberg
  misc_feature: MA Experiment 20000088 PARAMETER Experiment Name: At_100uM_ABA_Mutants_cDNA_P Parameter: Timepoint (hr) Value: 6
  misc_feature: MA Experiment 20000088 PARAMETER Experiment Name: At_100uM_ABA_Mutants_cDNA_P Parameter: Tissue Value: Aerial
  misc_feature: MA Experiment 20000088 PARAMETER Experiment Name: At_100uM_ABA_Mutants_cDNA_P Parameter: Treatment Value: 100uM ABA vs. No Treatment
  misc_feature: MA Experiment ID: 20000089 Result: Up-regulated in Transcription
  misc_feature: MA Experiment ID: 20000090 Result: Up-regulated in Transcription
  misc_feature: MA Experiment ID: 20000111 Result: Down-regulated in Transcription
  misc_feature: MA Experiment 20000111 PARAMETER Experiment Name: At_42deg_Heat_cDNA_P Parameter: Temperature (deg C) Value: 42 vs. 22
  misc_feature: MA Experiment 20000111 PARAMETER Experiment Name: At_42deg_Heat_cDNA_P Parameter: Timepoint (hr) Value: 6
  misc_feature: MA Experiment 20000111 PARAMETER Experiment Name: At_42deg_Heat_cDNA_P Parameter: Tissue Value: Aerial
  misc_feature: MA Experiment ID: 20000112 Result: Down-regulated in Transcription
  misc_feature: MA Experiment 20000112 PARAMETER Experiment Name: At_42deg_Heat_cDNA_P Parameter: Temperature (deg C) Value: 42 vs. 22
  misc_feature: MA Experiment 20000112 PARAMETER Experiment Name: At_42deg_Heat_cDNA_P Parameter: Timepoint (hr) Value: 2
  misc_feature: MA Experiment 20000112 PARAMETER Experiment Name: At_42deg_Heat_cDNA_P Parameter: Tissue Value: Aerial
  misc_feature: MA Experiment ID: 20000113 Result: Down-regulated in Transcription
  misc_feature: MA Experiment 20000113 PARAMETER Experiment Name: At_42deg_Heat_cDNA_P Parameter: Temperature (deg C) Value: 42 vs. 22
  misc_feature: MA Experiment 20000113 PARAMETER Experiment Name: At_42deg_Heat_cDNA_P Parameter: Timepoint (hr) Value: 8
  misc_feature: MA Experiment 20000113 PARAMETER Experiment Name: At_42deg_Heat_cDNA_P Parameter: Tissue Value: Aerial
  misc_feature: MA Experiment ID: 20000117 Result: Up-regulated in Transcription
  misc_feature: MA Experiment 20000117 PARAMETER Experiment Name: At_100uM_ABA_Mutants_cDNA_P Parameter: Plant Line Value: Columbia
  misc_feature: MA Experiment 20000117 PARAMETER Experiment Name: At_100uM_ABA_Mutants_cDNA_P Parameter: Timepoint (hr) Value: 6
  misc_feature: MA Experiment 20000117 PARAMETER Experiment Name: At_100uM_ABA_Mutants_cDNA_P Parameter: Tissue Value: Aerial
  misc_feature: MA Experiment 20000117 PARAMETER Experiment Name: At_100uM_ABA_Mutants_cDNA_P Parameter: Treatment Value: 100uM ABA vs. No Treatment
  misc_feature: MA Experiment ID: 20000173 Result: Down-regulated in Transcription
  misc_feature: MA Experiment 20000173 PARAMETER Experiment Name: At_42deg_Heat_P Parameter: Age (day) Value: 14
  misc_feature: MA Experiment 20000173 PARAMETER Experiment Name: At_42deg_Heat_P Parameter: Organism Value: A. thaliana
  misc_feature: MA Experiment 20000173 PARAMETER Experiment Name: At_42deg_Heat_P Parameter: Plant Line Value: WS
  misc_feature: MA Experiment 20000173 PARAMETER Experiment Name: At_42deg_Heat_P Parameter: Temperature (deg C) Value: 42 vs. 22
  misc_feature: MA Experiment 20000173 PARAMETER Experiment Name: At_42deg_Heat_P Parameter: Timepoint (hr) Value: 6
  misc_feature: MA Experiment 20000173 PARAMETER Experiment Name: At_42deg_Heat_P Parameter: Tissue Value: Aerial
  misc_feature: MA Experiment ID: 20000179 Result: Up-regulated in Transcription
  misc_feature: MA Experiment 20000179 PARAMETER Experiment Name: At_Germinating_Seeds_P Parameter: Age (hr) Value: 6 vs. 0
  misc_feature: MA Experiment 20000179 PARAMETER Experiment Name: At_Germinating_Seeds_P Parameter: Tissue Value: Germinating Seeds
  misc_feature: MA Experiment ID: 20000180 Result: Up-regulated in Transcription
  misc_feature: MA Experiment 20000180 PARAMETER Experiment Name: At_Germinating_Seeds_P Parameter: Age (hr) Value: 24 vs. 0
  misc_feature: MA Experiment 20000180 PARAMETER Experiment Name: At_Germinating_Seeds_P Parameter: Tissue Value: Germinating Seeds
  misc_feature: MA Experiment ID: 20000184 Result: Down-regulated in Transcription
  misc_feature: MA Experiment 20000184 PARAMETER Experiment Name: At_Shoots__P Parameter: Age (day) Value: 7
  misc_feature: MA Experiment 20000184 PARAMETER Experiment Name: At_Shoots__P Parameter: Tissue Value: Shoots vs. Whole Plant
  misc_feature: MA Experiment ID: 20000234 Result: Up-regulated in Transcription
  misc_feature: MA Experiment 20000234 PARAMETER Experiment Name: At_Siliques_P Parameter: Age (day) Value: 21
  misc_feature: MA Experiment 20000234 PARAMETER Experiment Name: At_Siliques_P Parameter: Organism Value: A. thaliana
  misc_feature: MA Experiment 20000234 PARAMETER Experiment Name: At_Siliques_P Parameter: Plant Line Value: WS
  misc_feature: MA Experiment 20000234 PARAMETER Experiment Name: At_Siliques_P Parameter: Tissue Value: Less Than 5mm Siliques vs. Whole Plant
  misc_feature: MA Experiment ID: 20000794 Result: Up-regulated in Transcription
  misc_feature: MA Experiment 20000794 PARAMETER Experiment Name: At_Petals_P Parameter: Age (day) Value: 23-25 days
  misc_feature: MA Experiment 20000794 PARAMETER Experiment Name: At_Petals_P Parameter: Plant Line Value: WS
  misc_feature: MA Experiment 20000794 PARAMETER Experiment Name: At_Petals_P Parameter: Tissue Value: Petals vs. Whole plant
  misc_feature: MA Experiment ID: 20001905 Result: Down-regulated in Transcription
  misc_feature: MA Experiment 20001905 PARAMETER Experiment Name: At_Drought_Reproduction_P Parameter: Age (day) Value: 40
  misc_feature: MA Experiment 20001905 PARAMETER Experiment Name: At_Drought_Reproduction_P Parameter: Organism Value: A. thaliana
  misc_feature: MA Experiment 20001905 PARAMETER Experiment Name: At_Drought_Reproduction_P Parameter: Plant Line Value: WS
  misc_feature: MA Experiment 20001905 PARAMETER Experiment Name: At_Drought_Reproduction_P Parameter: Timepoint (day) Value: 10
  misc_feature: MA Experiment 20001905 PARAMETER Experiment Name: At_Drought_Reproduction_P Parameter: Tissue Value: Rosettes
  misc_feature: MA Experiment 20001905 PARAMETER Experiment Name: At_Drought_Reproduction_P Parameter: Treatment Value: Drought vs. No Drought
  misc_feature: MA Experiment ID: 20001906 Result: Down-regulated in Transcription
  misc_feature: MA Experiment 20001906 PARAMETER Experiment Name: At_Drought_Reproduction_P Parameter: Age (day) Value: 35
  misc_feature: MA Experiment 20001906 PARAMETER Experiment Name: At_Drought_Reproduction_P Parameter: Organism Value: A. thaliana
  misc_feature: MA Experiment 20001906 PARAMETER Experiment Name: At_Drought_Reproduction_P Parameter: Plant Line Value: WS
  misc_feature: MA Experiment 20001906 PARAMETER Experiment Name: At_Drought_Reproduction_P Parameter: Timepoint (day) Value: 5
  misc_feature: MA Experiment 20001906 PARAMETER Experiment Name: At_Drought_Reproduction_P Parameter: Tissue Value: Siliques
  misc_feature: MA Experiment 20001906 PARAMETER Experiment Name: At_Drought_Reproduction_P Parameter: Treatment Value: Drought vs. No Drought
  misc_feature: MA Experiment ID: 20001908 Result: Down-regulated in Transcription
  misc_feature: MA Experiment 20001908 PARAMETER Experiment Name: At_Drought_Reproduction_P Parameter: Age (day) Value: 40
  misc_feature: MA Experiment 20001908 PARAMETER Experiment Name: At_Drought_Reproduction_P Parameter: Organism Value: A. thaliana
  misc_feature: MA Experiment 20001908 PARAMETER Experiment Name: At_Drought_Reproduction_P Parameter: Plant Line Value: WS
  misc_feature: MA Experiment 20001908 PARAMETER Experiment Name: At_Drought_Reproduction_P Parameter: Timepoint (day) Value: 10
  misc_feature: MA Experiment 20001908 PARAMETER Experiment Name: At_Drought_Reproduction_P Parameter: Tissue Value: Siliques
  misc_feature: MA Experiment 20001908 PARAMETER Experiment Name: At_Drought_Reproduction_P Parameter: Treatment Value: Drought vs. No Drought
  misc_feature: MA Experiment ID: 20001911 Result: Down-regulated in Transcription
  misc_feature: MA Experiment 20001911 PARAMETER Experiment Name: At_Drought_Reproduction_P Parameter: Age (day) Value: 40
  misc_feature: MA Experiment 20001911 PARAMETER Experiment Name: At_Drought_Reproduction_P Parameter: Organism Value: A. thaliana
  misc_feature: MA Experiment 20001911 PARAMETER Experiment Name: At_Drought_Reproduction_P Parameter: Plant Line Value: WS
  misc_feature: MA Experiment 20001911 PARAMETER Experiment Name: At_Drought_Reproduction_P Parameter: Timepoint (day) Value: 10
  misc_feature: MA Experiment 20001911 PARAMETER Experiment Name: At_Drought_Reproduction_P Parameter: Tissue Value: Flowers
  misc_feature: MA Experiment 20001911 PARAMETER Experiment Name: At_Drought_Reproduction_P Parameter: Treatment Value: Drought vs. No Drought
aattgacaatctctttctttcatcttcatcttattcttctttatctctctctctctctcaagactattgagcttctttcttttttcctgagtcttttagtctgatctcttacaagaatggcgttcgcaggaacaacccagaaatgcatggcatgtgacaaaacagtttatcttgtcgacaagttaaccgccgataaccgggtctaccacaaagcttgtttccgatgtcaccattgcaaaggaactctcaagcttagcaattacaactcctttgaaggagttctctactgcagaccacatttcgatcaaaacttcaagagaactggaagtcttgagaaaagcttcgaagggacaccaaagattgggaaacctgataggcctttggagggagagagacctgctggaaccaaagtttcgaatatgtttggtggaacacgagagaaatgcgttggttgcgacaaaaccgtgtatccaattgagaaggtatcggtgaatggaacattgtaccacaagagctgcttcaagtgtacacatggaggctgcacgataagcccttcgaattacatagctcacgagggtaagctatattgcaagcatcatcatattcagctgatcaaggagaaaggaaacttgagccagctcgaaggaggaggagagaatgccgccaaggacaaagtcgtcgctgcttaaagaaacaattcaatctctctgggatgattttgactatcgaagaatcaaaagagtcactacttctccatcgatcgataacatatattggttttgtttcttcctacgtttgtgtttttctttttggtctttaatatgtttttttttttttgggacctttgttcactcttttattgggtttcttgaaatgaaactagagaaacaaagaaataatggatgtttgcttatgagatatatatgtattacgttcatatgatataaattaattttcg

SEQ ID NO: 100898 - protein, 190 aa, Arabidopsis thaliana; identical to SEQ ID NO: 24619
  peptide (1)..(190): Ceres Seq. ID no. 13606309
  misc_feature (10)..(67): Pfam Name: LIM domain Pfam Description: LIM domain
  misc_feature (1)..(190): Homolog of NCBI NO: 15218450 NR Description: transcription factor -related [Arabidopsis >gi|13926190|gb|AAK49575.1|AF370569_1 similar to transcription SF3 (pir|IS37656) [Arabidopsis thaliana]
  misc_feature (1)..(177): Homolog of NCBI NO: 18565112 NR Description: transcription factor LIM [Populus kitakamiensis]
  misc_feature (1)..(177): Homolog of NCBI NO: 18565116 NR Description: transcription factor LIM [Populus kitakamiensis]
  misc_feature (1)..(190): Homolog of NCBI NO: 18565124 NR Description: transcription factor LIM [Nicotiana tabacum]
  misc_feature (1)..(190): Homolog of NCBI NO: 5932413 NR Description: LIM domain protein WLIM1 [Nicotiana tabacum]
  misc_feature (1)..(190): Homolog of NCBI NO: 5689136 NR Description: transcription factor Ntlim1 [Nicotiana tabacum]
  misc_feature (1)..(184): Homolog of NCBI NO: 5070280 NR Description: LIM domain protein WLIM-1 [Helianthus annuus]
  misc_feature (1)..(180): Homolog of NCBI NO: 6467903 NR Description: pollen specific LIM domain protein 1a [Nicotiana
  misc_feature (1)..(184): Homolog of NCBI NO: 5932436 NR Description: LIM domain protein WLIM1 [Helianthus annuus]
  misc_feature (1)..(180): Homolog of NCBI NO: 5932418 NR Description: LIM domain protein PLIM1 [Nicotiana tabacum]

SEQ ID NO: 100899 - protein, 180 aa, Arabidopsis thaliana; identical to SEQ ID NO: 24620
  peptide (1)..(180): Ceres Seq. ID no. 13606310
  misc_feature (1)..(57): Pfam Name: LIM domain Pfam Description: LIM domain
  misc_feature (1)..(180): Homolog of NCBI NO: 15218450 NR Description: transcription factor -related [Arabidopsis >gi|13926190|gb|AAK49575.1|AF370569_1 similar to transcription SF3 (pir|IS37656) [Arabidopsis thaliana]
  misc_feature (1)..(167): Homolog of NCBI NO: 18565112 NR Description: transcription factor LIM [Populus kitakamiensis]
  misc_feature (1)..(167): Homolog of NCBI NO: 18565116 NR Description: transcription factor LIM [Populus kitakamiensis]
  misc_feature (1)..(180): Homolog of NCBI NO: 18565124 NR Description: transcription factor LIM [Nicotiana tabacum]
  misc_feature (1)..(180): Homolog of NCBI NO: 5932413 NR Description: LIM domain protein WLIM1 [Nicotiana tabacum]
  misc_feature (1)..(180): Homolog of NCBI NO: 5689136 NR Description: transcription factor Ntlim1 [Nicotiana tabacum]
  misc_feature (1)..(174): Homolog of NCBI NO: 5070280 NR Description: LIM domain protein WLIM-1 [Helianthus annuus]
  misc_feature (1)..(170): Homolog of NCBI NO: 6467903 NR Description: pollen specific LIM domain protein 1a [Nicotiana
  misc_feature (1)..(174): Homolog of NCBI NO: 5932436 NR Description: LIM domain protein WLIM1 [Helianthus annuus]
  misc_feature (1)..(170): Homolog of NCBI NO: 5932418 NR Description: LIM domain protein PLIM1 [Nicotiana tabacum]

SEQ ID NO: 100900 - DNA, 1384 bp, Arabidopsis thaliana
  misc_feature (1)..(1384): Ceres Seq. ID no. 13606315
  misc_feature: MA Experiment ID: 108461 Result: Up-regulated in Transcription
  misc_feature: MA Experiment 108461 PARAMETER Experiment Name: At_Germinating_Seeds_cDNA_P Parameter: Age (day) Value: 1 vs. 0
  misc_feature: MA Experiment 108461 PARAMETER Experiment Name: At_Germinating_Seeds_cDNA_P Parameter: Tissue Value: Germinating Seeds
  misc_feature: MA Experiment ID: 108462 Result: Up-regulated in Transcription
  misc_feature: MA Experiment 108462 PARAMETER Experiment Name: At_Germinating_Seeds_cDNA_P Parameter: Age (day) Value: 2 vs. 0
  misc_feature: MA Experiment 108462 PARAMETER Experiment Name: At_Germinating_Seeds_cDNA_P Parameter: Tissue Value: Germinating Seeds
  misc_feature: MA Experiment ID: 108463 Result: Up-regulated in Transcription
  misc_feature: MA Experiment 108463 PARAMETER Experiment Name: At_Germinating_Seeds_cDNA_P Parameter: Age (day) Value: 3 vs. 0
  misc_feature: MA Experiment 108463 PARAMETER Experiment Name: At_Germinating_Seeds_cDNA_P Parameter: Tissue Value: Germinating Seeds
  misc_feature: MA Experiment ID: 108464 Result: Up-regulated in Transcription
  misc_feature: MA Experiment 108464 PARAMETER Experiment Name: At_Germinating_Seeds_cDNA_P Parameter: Age (day) Value: 4 vs. 0
  misc_feature: MA Experiment 108464 PARAMETER Experiment Name: At_Germinating_Seeds_cDNA_P Parameter: Tissue Value: Germinating Seeds
  misc_feature: MA Experiment ID: 20000069 Result: Up-regulated in Transcription
  misc_feature: MA Experiment 20000069 PARAMETER Experiment Name: At_100uM_ABA_Mutants_cDNA_P Parameter: Plant Line Value: CS23
  misc_feature: MA Experiment 20000069 PARAMETER Experiment Name: At_100uM_ABA_Mutants_cDNA_P Parameter: Timepoint (hr) Value: 6
  misc_feature: MA Experiment 20000069 PARAMETER Experiment Name: At_100uM_ABA_Mutants_cDNA_P Parameter: Tissue Value: Aerial
  misc_feature: MA Experiment 20000069 PARAMETER Experiment Name: At_100uM_ABA_Mutants_cDNA_P Parameter: Treatment Value: 100uM ABA vs. No Treatment
  misc_feature: MA Experiment ID: 20000071 Result: Up-regulated in Transcription
  misc_feature: MA Experiment 20000071 PARAMETER Experiment Name: At_100uM_ABA_Mutants_cDNA_P Parameter: Plant Line Value: CS8104
  misc_feature: MA Experiment 20000071 PARAMETER Experiment Name: At_100uM_ABA_Mutants_cDNA_P Parameter: Timepoint (hr) Value: 6
  misc_feature: MA Experiment 20000071 PARAMETER Experiment Name: At_100uM_ABA_Mutants_cDNA_P Parameter: Tissue Value: Aerial
  misc_feature: MA Experiment 20000071 PARAMETER Experiment Name: At_100uM_ABA_Mutants_cDNA_P Parameter: Treatment Value: 100uM ABA vs. No Treatment
  misc_feature: MA Experiment ID: 20000086 Result: Up-regulated in Transcription
  misc_feature: MA Experiment 20000086 PARAMETER Experiment Name: At_100uM_ABA_Mutants_cDNA_P Parameter: Plant Line Value: CS22
  misc_feature: MA Experiment 20000086 PARAMETER Experiment Name: At_100uM_ABA_Mutants_cDNA_P Parameter: Timepoint (hr) Value: 6
  misc_feature: MA Experiment 20000086 PARAMETER Experiment Name: At_100uM_ABA_Mutants_cDNA_P Parameter: Tissue Value: Aerial
  misc_feature: MA Experiment 20000086 PARAMETER Experiment Name: At_100uM_ABA_Mutants_cDNA_P Parameter: Treatment Value: 100uM ABA vs. No Treatment
  misc_feature: MA Experiment ID: 20000179 Result: Up-regulated in Transcription
  misc_feature: MA Experiment 20000179 PARAMETER Experiment Name: At_Germinating_Seeds_P Parameter: Age (hr) Value: 6 vs. 0
  misc_feature: MA Experiment 20000179 PARAMETER Experiment Name: At_Germinating_Seeds_P Parameter: Tissue Value: Germinating Seeds
  misc_feature: MA Experiment ID: 20000180 Result: Up-regulated in Transcription
  misc_feature: MA Experiment 20000180 PARAMETER Experiment Name: At_Germinating_Seeds_P Parameter: Age (hr) Value: 24 vs. 0
  misc_feature: MA Experiment 20000180 PARAMETER Experiment Name: At_Germinating_Seeds_P Parameter: Tissue Value: Germinating Seeds
  misc_feature: MA Experiment ID: 20000184 Result: Down-regulated in Transcription
  misc_feature: MA Experiment 20000184 PARAMETER Experiment Name: At_Shoots__P Parameter: Age (day) Value: 7
  misc_feature: MA Experiment 20000184 PARAMETER Experiment Name: At_Shoots__P Parameter: Tissue Value: Shoots vs. Whole Plant
aaaatatctcgaatccgattccttttttctcttctgcaatctctttgaaatctcaagcttctcttcaaaatttcgattacagctgaagattctctcgattttctggttttgactttttttttgtttggtttggtgaaagatttggatcaaatgggggtggattactacaatgttctgaaagtgaatcgaaatgctaacgaagatgatctgaagaagtcttaccggcgaatggctatgaaatggcaccctgacaaaaaccctacgagcaagaaagaagctgaagctaagttcaagcagatctctgaagcttacgacgtcttgagcgatcctcagagacgtcagatctacgatcagtacggagaagaaggtcttaaatccaccgatttacctactgcggcggagacggcggcgcatcagcagcagcggagctactcttctagcaactctgagtttcggtattatccgcgtgatgctgaagatatctttgctgagtttttcggcgaatccggtgatgcttttggcggagggagtagcggaaggacacgtggagatggcggtgatggtggcggtcggagatttaaaagtgcagaagcagggagccaggctaatagaaagacgccgccgacgaacaaaaaaacgacgccgccggcgaataggaaggctccggctattgagagtaaattggcttgcacattggaggagctctacaaaggtgcaaagaagaagatgcgaatttctcgcgttgttcctgatgattttggaaagccaaagacagtccaagagatattgaagatagacataaaaccaggttggaagaaaggcacaaagatcacttttccagagaaaggcaaccaagaacctggtgtcactcctgcggatcttatattcgtggttgacgagaaaccgcattcggtattcaagagagacggtaacgatctgattctcgagaagaaagtctctcttatagatgctttaaccggtctcaccattagcgtaacgactctagacgggaggagcctaactatcccggtgctggatatcgtaaaaccgggtcaggagattgtgatcccgaatgagggaatgcctactaaagaccctttgaagagaggagaccttagagttacctttgaaatcttgttcccgtcaaggctaacgtcagaacagaagaatgacctcaagagagttcttggtggaagctgatgagttgacgtttagttttcaagtaagctattgatcttctttaacaacggattccacaggaagttgctagtcatttgagtgtacatacatttacgtttttcctttgtaaacttgtgttataagaaaaacaagaaaacccaaatcgaataagactggatatgcgggatctaataatggctgccac

SEQ ID NO: 100901 - protein, 349 aa, Arabidopsis thaliana; identical to SEQ ID NO: 23763
  peptide (1)..(349): Ceres Seq. ID no. 13606316
  misc_feature (225)..(346): Pfam Name: DnaJ C terminal region Pfam Description: DnaJ C terminal region
  misc_feature (1)..(349): Homolog of NCBI NO: 15218515 NR Description: heat shock protein, putative [Arabidopsis
  misc_feature (1)..(349): Homolog of NCBI NO: 21593202 NR Description: putative heat-shock protein [Arabidopsis thaliana]
  misc_feature (1)..(347): Homolog of NCBI NO: 15225377 NR Description: heat shock protein, putative [Arabidopsis
  misc_feature (115)..(349): Homolog of NCBI NO: 15231987 NR Description: DnaJ protein family [Arabidopsis thaliana]
  misc_feature (1)..(132): Homolog of NCBI NO: 15231987 NR Description: DnaJ protein family [Arabidopsis thaliana]
  misc_feature (1)..(347): Homolog of NCBI NO: 15235310 NR Description: heat shock protein, putative [Arabidopsis
  misc_feature (1)..(346): Homolog of NCBI NO: 15240968 NR Description: DnaJ protein family [Arabidopsis thaliana]
  misc_feature (1)..(348): Homolog of NCBI NO: 15228294 NR Description: heat shock protein, putative [Arabidopsis
  misc_feature (1)..(347): Homolog of NCBI NO: 6179940 NR Description: DnaJ-like protein [Nicotiana tabacum]
  misc_feature (1)..(348): Homolog of NCBI NO: 34905276 NR Description: putative heat shock protein [Oryza sativa

SEQ ID NO: 100902 - protein, 323 aa, Arabidopsis thaliana; identical to SEQ ID NO: 23764
  peptide (1)..(323): Ceres Seq. ID no. 13606317
  misc_feature (199)..(320): Pfam Name: DnaJ C terminal region Pfam Description: DnaJ C terminal region
  misc_feature (1)..(323): Homolog of NCBI NO: 15218515 NR Description: heat shock protein, putative [Arabidopsis
  misc_feature (1)..(323): Homolog of NCBI NO: 21593202 NR Description: putative heat-shock protein [Arabidopsis thaliana]
  misc_feature (1)..(321): Homolog of NCBI NO: 15225377 NR Description: heat shock protein, putative [Arabidopsis
  misc_feature (89)..(323): Homolog of NCBI NO: 15231987 NR Description: DnaJ protein family [Arabidopsis thaliana]
  misc_feature (1)..(106): Homolog of NCBI NO: 15231987 NR Description: DnaJ protein family [Arabidopsis thaliana]
  misc_feature (1)..(321): Homolog of NCBI NO: 15235310 NR Description: heat shock protein, putative [Arabidopsis
  misc_feature (1)..(320): Homolog of NCBI NO: 15240968 NR Description: DnaJ protein family [Arabidopsis thaliana]
  misc_feature (1)..(322): Homolog of NCBI NO: 15228294 NR Description: heat shock protein, putative [Arabidopsis
  misc_feature (1)..(321): Homolog of NCBI NO: 6179940 NR Description: DnaJ-like protein [Nicotiana tabacum]
  misc_feature (1)..(322): Homolog of NCBI NO: 34905276 NR Description: putative heat shock protein [Oryza sativa

SEQ ID NO: 100903 - protein, 321 aa, Arabidopsis thaliana; identical to SEQ ID NO: 23765
  peptide (1)..(321): Ceres Seq. ID no. 13606318
  misc_feature (197)..(318): Pfam Name: DnaJ C terminal region Pfam Description: DnaJ C terminal region
  misc_feature (1)..(321): Homolog of NCBI NO: 15218515 NR Description: heat shock protein, putative [Arabidopsis
  misc_feature (1)..(321): Homolog of NCBI NO: 21593202 NR Description: putative heat-shock protein [Arabidopsis thaliana]
  misc_feature (1)..(319): Homolog of NCBI NO: 15225377 NR Description: heat shock protein, putative [Arabidopsis
  misc_feature (87)..(321): Homolog of NCBI NO: 15231987 NR Description: DnaJ protein family [Arabidopsis thaliana]
  misc_feature (1)..(104): Homolog of NCBI NO: 15231987 NR Description: DnaJ protein family [Arabidopsis thaliana]
  misc_feature (1)..(319): Homolog of NCBI NO: 15235310 NR Description: heat shock protein, putative [Arabidopsis
  misc_feature (1)..(318): Homolog of NCBI NO: 15240968 NR Description: DnaJ protein family [Arabidopsis thaliana]
  misc_feature (1)..(320): Homolog of NCBI NO: 15228294 NR Description: heat shock protein, putative [Arabidopsis
  misc_feature (1)..(319): Homolog of NCBI NO: 6179940 NR Description: DnaJ-like protein [Nicotiana tabacum]
  misc_feature (1)..(320): Homolog of NCBI NO: 34905276 NR Description: putative heat shock protein [Oryza sativa

SEQ ID NO: 100904 - DNA, 809 bp, Arabidopsis thaliana
  misc_feature (1)..(809): Ceres Seq. ID no. 13606331
  misc_feature: MA Experiment ID: 20000184 Result: Down-regulated in Transcription
  misc_feature: MA Experiment 20000184 PARAMETER Experiment Name: At_Shoots__P Parameter: Age (day) Value: 7
  misc_feature: MA Experiment 20000184 PARAMETER Experiment Name: At_Shoots__P Parameter: Tissue Value: Shoots vs. Whole Plant
gtagaattgtcatcttcgcaaaagcttcgagagtagtgcaatcgaaacaagtcatggatctttcgcctgttaaggaagctttggccgccaaatcctttgacaaaatcgccgatatctgcgatactctcatgcttcaggttgcttccgaaggaattgaatatcatgatgattggccttacgcaatccatcttctgggttacttttacgttgacgattgtgatagcgcacgtttcctctggaaaaggatacctacagctatcaaggagaggaagcctgaagttgttgcagcttgggggattggtcagaagctgtggacacacgactatgcaggtgtatatgaagctattcggggttatgattggagtcaagaagctaaagatatggttgctgccttctcagatctttacacaaaaaggatgtttcagcttttgttgtctgcctactccacaattaccatccatgatttagctcttttcctagggatgacggaggatgatgccacaacttatgttgtagagaatggatggacagtggatgcagcttctcaaatggcgagtgtgaagaaacaagctgttaaaagagagcaaaaggtggattcatcgaagctacaacgcttgacggagtatgtgttccaccttgaacattaaaactaagtgccgatctcctattaagatagtgaaattctaagaacagaattcgtttttgagagatttcacaatgactgattctaagttgcaacatatcttgactctttgagtatatgatgaataactcctaccaattttactcttataagatcagtttacacc

SEQ ID NO: 100905 - protein, 214 aa, Arabidopsis thaliana
  peptide (1)..(214): Ceres Seq. ID no. 13606332
  misc_feature (18)..(214): Homolog of NCBI NO: 15236410 NR Description: COP9 protein [Arabidopsis thaliana]
  misc_feature (18)..(214): Homolog of NCBI NO: 7484675 NR Description: multisubunit regulator protein COP9 - spinach
  misc_feature (18)..(214): Homolog of NCBI NO: 29468343 NR Description: CSN8 [Nicotiana benthamiana]
  misc_feature (18)..(214): Homolog of NCBI NO: 38345448 NR Description: OSJNBa0042L16.3 [Oryza sativa (japonica
  misc_feature (18)..(131): Homolog of NCBI NO: 34897554 NR Description: OSJNBa0042L16.14 [Oryza sativa (japonica
  misc_feature (35)..(214): Homolog of NCBI NO: 28374344 NR Description: Similar to COP9 homolog [Danio rerio]
  misc_feature (31)..(214): Homolog of NCBI NO: 38566156 NR Description: COP9 signalosome subunit 8 isoform 1 [Silurana
  misc_feature (29)..(190): Homolog of NCBI NO: 30024961 NR Description: COP9 signalosome subunit 8 [Mus musculus]
  misc_feature (29)..(190): Homolog of NCBI NO: 17389272 NR Description: COP9 signalosome subunit 8 [Mus musculus] protein [Mus musculus] >gi|26347789|dbj|BAC37543.1| unnamed
  misc_feature (29)..(190): Homolog of NCBI NO: 31981583 NR Description: COP9 signalosome subunit 8 [Mus musculus]
RIVIFAKASRVVQSKQVMDLSPVKEALAAKSFDKIADICDTLMLQVASEGIEYHDDWPYAIHLLGYFYVDDCDSARFLWKRIPTAIKERKPEVVAAWGIGQKLWTHDYAGVYEAIRGYDWSQEAKDMVAAFSDLYTKRMFQLLLSAYSTITIHDLALFLGMTEDDATTYVVENGWTVDAASQMASVKKQAVKREQKVDSSKLQRLTEYVFHLEH

SEQ ID NO: 100906 - protein, 197 aa, Arabidopsis thaliana
  peptide (1)..(197): Ceres Seq. ID no. 13606333
  misc_feature (1)..(197): Homolog of NCBI NO: 15236410 NR Description: COP9 protein [Arabidopsis thaliana]
  misc_feature (1)..(197): Homolog of NCBI NO: 7484675 NR Description: multisubunit regulator protein COP9 - spinach
  misc_feature (1)..(197): Homolog of NCBI NO: 29468343 NR Description: CSN8 [Nicotiana benthamiana]
  misc_feature (1)..(197): Homolog of NCBI NO: 38345448 NR Description: OSJNBa0042L16.3 [Oryza sativa (japonica
  misc_feature (1)..(114): Homolog of NCBI NO: 34897554 NR Description: OSJNBa0042L16.14 [Oryza sativa (japonica
  misc_feature (18)..(197): Homolog of NCBI NO: 28374344 NR Description: Similar to COP9 homolog [Danio rerio]
  misc_feature (14)..(197): Homolog of NCBI NO: 38566156 NR Description: COP9 signalosome subunit 8 isoform 1 [Silurana
  misc_feature (12)..(173): Homolog of NCBI NO: 30024961 NR Description: COP9 signalosome subunit 8 [Mus musculus]
  misc_feature (12)..(173): Homolog of NCBI NO: 17389272 NR Description: COP9 signalosome subunit 8 [Mus musculus] protein [Mus musculus] >gi|26347789|dbj|BAC37543.1| unnamed
  misc_feature (12)..(173): Homolog of NCBI NO: 31981583 NR Description: COP9 signalosome subunit 8 [Mus musculus]
MDLSPVKEALAAKSFDKIADICDTLMLQVASEGIEYHDDWPYAIHLLGYFYVDDCDSARFLWKRIPTAIKERKPEVVAAWGIGQKLWTHDYAGVYEAIRGYDWSQEAKDMVAAFSDLYTKRMFQLLLSAYSTITIHDLALFLGMTEDDATTYVVENGWTVDAASQMASVKKQAVKREQKVDSSKLQRLTEYVFHLEH

SEQ ID NO: 100907 - protein, 172 aa, Arabidopsis thaliana
  peptide (1)..(172): Ceres Seq. ID no. 13606334
  misc_feature (1)..(172): Homolog of NCBI NO: 15236410 NR Description: COP9 protein [Arabidopsis thaliana]
  misc_feature (1)..(172): Homolog of NCBI NO: 7484675 NR Description: multisubunit regulator protein COP9 - spinach
  misc_feature (1)..(172): Homolog of NCBI NO: 29468343 NR Description: CSN8 [Nicotiana benthamiana]
  misc_feature (1)..(172): Homolog of NCBI NO: 38345448 NR Description: OSJNBa0042L16.3 [Oryza sativa (japonica
  misc_feature (1)..(89): Homolog of NCBI NO: 34897554 NR Description: OSJNBa0042L16.14 [Oryza sativa (japonica
  misc_feature (1)..(172): Homolog of NCBI NO: 28374344 NR Description: Similar to COP9 homolog [Danio rerio]
  misc_feature (1)..(172): Homolog of NCBI NO: 38566156 NR Description: COP9 signalosome subunit 8 isoform 1 [Silurana
  misc_feature (1)..(148): Homolog of NCBI NO: 30024961 NR Description: COP9 signalosome subunit 8 [Mus musculus]
  misc_feature (1)..(148): Homolog of NCBI NO: 17389272 NR Description: COP9 signalosome subunit 8 [Mus musculus] protein [Mus musculus] >gi|26347789|dbj|BAC37543.1| unnamed
  misc_feature (1)..(148): Homolog of NCBI NO: 31981583 NR Description: COP9 signalosome subunit 8 [Mus musculus]
MLQVASEGIEYHDDWPYAIHLLGYFYVDDCDSARFLWKRIPTAIKERKPEVVAAWGIGQKLWTHDYAGVYEAIRGYDWSQEAKDMVAAFSDLYTKRMFQLLLSAYSTITIHDLALFLGMTEDDATTYVVENGWTVDAASQMASVKKQAVKREQKVDSSKLQRLTEYVFHLEH

SEQ ID NO: 100908 - DNA, 603 bp, Arabidopsis thaliana
  misc_feature (1)..(603): Ceres Seq. ID no. 13606339
  misc_feature: MA Experiment ID: 20001248 Result: Up-regulated in Transcription
  misc_feature: MA Experiment 20001248 PARAMETER Experiment Name: At_Far-red-induction_P Parameter: Age (day) Value: 7
  misc_feature: MA Experiment 20001248 PARAMETER Experiment Name: At_Far-red-induction_P Parameter: Light Value: Far-red vs. White
  misc_feature: MA Experiment 20001248 PARAMETER Experiment Name: At_Far-red-induction_P Parameter: Organism Value: A. thaliana
  misc_feature: MA Experiment 20001248 PARAMETER Experiment Name: At_Far-red-induction_P Parameter: Plant Line Value: Columbia
  misc_feature: MA Experiment 20001248 PARAMETER Experiment Name: At_Far-red-induction_P Parameter: Timepoint (hr) Value: 4
  misc_feature: MA Experiment 20001248 PARAMETER Experiment Name: At_Far-red-induction_P Parameter: Tissue Value: Whole Plant
  misc_feature: MA Experiment ID: 20001458 Result: Up-regulated in Transcription
  misc_feature: MA Experiment 20001458 PARAMETER Experiment Name: At_50mM_NH4NO3_L-to-H_P Parameter: Age (day) Value: Undefined
  misc_feature: MA Experiment 20001458 PARAMETER Experiment Name: At_50mM_NH4NO3_L-to-H_P Parameter: Organism Value: Undefined
  misc_feature: MA Experiment 20001458 PARAMETER Experiment Name: At_50mM_NH4NO3_L-to-H_P Parameter: Plant Line Value: Undefined
  misc_feature: MA Experiment 20001458 PARAMETER Experiment Name: At_50mM_NH4NO3_L-to-H_P Parameter: Timepoint (hr) Value: 2
  misc_feature: MA Experiment 20001458 PARAMETER Experiment Name: At_50mM_NH4NO3_L-to-H_P Parameter: Tissue Value: Siliques
  misc_feature: MA Experiment 20001458 PARAMETER Experiment Name: At_50mM_NH4NO3_L-to-H_P Parameter: Treatment Value: 50mM NH4NO3 vs. 100mM Manitol
  misc_feature: MA Experiment ID: 20001459 Result: Down-regulated in Transcription
  misc_feature: MA Experiment 20001459 PARAMETER Experiment Name: At_50mM_NH4NO3_L-to-H_P Parameter: Age (day) Value: Undefined
  misc_feature: MA Experiment 20001459 PARAMETER Experiment Name: At_50mM_NH4NO3_L-to-H_P Parameter: Organism Value: Undefined
  misc_feature: MA Experiment 20001459 PARAMETER Experiment Name: At_50mM_NH4NO3_L-to-H_P Parameter: Plant Line Value: Undefined
  misc_feature: MA Experiment 20001459 PARAMETER Experiment Name: At_50mM_NH4NO3_L-to-H_P Parameter: Timepoint (hr) Value: 4
  misc_feature: MA Experiment 20001459 PARAMETER Experiment Name: At_50mM_NH4NO3_L-to-H_P Parameter: Tissue Value: Siliques
  misc_feature: MA Experiment 20001459 PARAMETER Experiment Name: At_50mM_NH4NO3_L-to-H_P Parameter: Treatment Value: 50mM NH4NO3 vs. 100mM Manitol
aaaacatctatctctctttctcgaccttttgtctcctcgatctaaagatggcggattcggacaacgattcaggaggacacaaagacggtggaaatgcttcgacacgtgagcaagataggtttctaccgatcgctaacgttagcaggatcatgaagaaagcacttcctgcgaacgcaaaaatctctaaggatgctaaagaaacggttcaagagtgtgtatcggaattcataagtttcatcaccggtgaggcttctgacaagtgtcagagagagaagaggaagacaatcaacggtgacgatcttctttgggcgatgactacgctagggtttgaggactacgtggagcctctcaaggtttatctgcaaaagtatagggaggtggaaggagagaagactactacggcagggagacaaggcgataaggaaggtggaggaggaggcggtggagctggaagtggaagtggaggagctccgatgtacggtggtggcatggtgactacgatgggacatcaattttcccatcatttttcttaattgtaaaatgataaaagcaaattttcatttttattaattaatgatatatatatatatatgtttaactttt

SEQ ID NO: 100909 - protein, 176 aa, Arabidopsis thaliana
  peptide (1)..(176): Ceres Seq. ID no. 13606340
  misc_feature (16)..(176): Homolog of NCBI NO: 15233475 NR Description: CCAAT-binding transcription factor subunit
  misc_feature (16)..(173): Homolog of NCBI NO: 15238156 NR Description: expressed protein [Arabidopsis thaliana]
  misc_feature (20)..(173): Homolog of NCBI NO: 2398529 NR Description: Transcription factor [Arabidopsis thaliana]
  misc_feature (25)..(163): Homolog of NCBI NO: 30409461 NR Description: NF-YB [Oryza sativa (japonica cultivar-group)]
  misc_feature (21)..(163): Homolog of NCBI NO: 22380 NR Description: CAAT-box DNA binding protein subunit B (NF-YB)
  misc_feature (21)..(163): Homolog of NCBI NO: 115840 NR Description: CCAAT-BINDING TRANSCRIPTION FACTOR SUBUNIT A
  misc_feature (16)..(152): Homolog of NCBI NO: 18404885 NR Description: CCAAT-binding transcription factor subunit [Arabidopsis thaliana] >gi|2398527|emb|CAA74051.1| Transcription [Arabidopsis thaliana] >gi|20197447|gb|AAC79602.2| putative
  misc_feature (16)..(148): Homolog of NCBI NO: 25299604 NR Description: hypothetical protein At2g38880 [imported] -
  misc_feature (17)..(152): Homolog of NCBI NO: 17979253 NR Description: At2g37060/T2N18.18 [Arabidopsis thaliana]
  misc_feature (16)..(146): Homolog of NCBI NO: 15231796 NR Description: transcription factor NF-Y, CCAAT-binding - like
NIYLSFSTFCLLDLKMADSDNDSGGHKDGGNASTREQDRFLPIANVSRIMKKALPANAKISKDAKETVQECVSEFISFITGEASDKCQREKRKTINGDDLLWAMTTLGFEDYVEPLKVYLQKYREVEGEKTTTAGRQGDKEGGGGGGGAGSGSGGAPMYGGGMVTTMGHQFSHHFS

SEQ ID NO: 100910 - protein, 161 aa, Arabidopsis thaliana
  peptide (1)..(161): Ceres Seq. ID no. 13606341
  misc_feature (1)..(161): Homolog of NCBI NO: 15233475 NR Description: CCAAT-binding transcription factor subunit
  misc_feature (1)..(158): Homolog of NCBI NO: 15238156 NR Description: expressed protein [Arabidopsis thaliana]
  misc_feature (5)..(158): Homolog of NCBI NO: 2398529 NR Description: Transcription factor [Arabidopsis thaliana]
  misc_feature (10)..(148): Homolog of NCBI NO: 30409461 NR Description: NF-YB [Oryza sativa (japonica cultivar-group)]
  misc_feature (6)..(148): Homolog of NCBI NO: 22380 NR Description: CAAT-box DNA binding protein subunit B (NF-YB)
  misc_feature (6)..(148): Homolog of NCBI NO: 115840 NR Description: CCAAT-BINDING TRANSCRIPTION FACTOR SUBUNIT A
  misc_feature (1)..(137): Homolog of NCBI NO: 18404885 NR Description: CCAAT-binding transcription factor subunit [Arabidopsis thaliana] >gi|2398527|emb|CAA74051.1| Transcription [Arabidopsis thaliana] >gi|20197447|gb|AAC79602.2| putative
  misc_feature (1)..(133): Homolog of NCBI NO: 25299604 NR Description: hypothetical protein At2g38880 [imported] -
  misc_feature (2)..(137): Homolog of NCBI NO: 17979253 NR Description: At2g37060/T2N18.18 [Arabidopsis thaliana]
  misc_feature (1)..(131): Homolog of NCBI NO: 15231796 NR Description: transcription factor NF-Y, CCAAT-binding - like
MADSDNDSGGHKDGGNASTREQDRFLPIANVSRIMKKALPANAKISKDAKETVQECVSEFISFITGEASDKCQREKRKTINGDDLLWAMTTLGFEDYVEPLKVYLQKYREVEGEKTTTAGRQGDKEGGGGGGGAGSGSGGAPMYGGGMVTTMGHQFSHHFS

SEQ ID NO: 100911 - protein, 127 aa, Arabidopsis thaliana
  peptide (1)..(127): Ceres Seq. ID no. 13606342
  misc_feature (1)..(127): Homolog of NCBI NO: 15233475 NR Description: CCAAT-binding transcription factor subunit
  misc_feature (1)..(124): Homolog of NCBI NO: 15238156 NR Description: expressed protein [Arabidopsis thaliana]
  misc_feature (1)..(124): Homolog of NCBI NO: 2398529 NR Description: Transcription factor [Arabidopsis thaliana]
  misc_feature (1)..(114): Homolog of NCBI NO: 30409461 NR Description: NF-YB [Oryza sativa (japonica cultivar-group)]
  misc_feature (1)..(114): Homolog of NCBI NO: 22380 NR Description: CAAT-box DNA binding protein subunit B (NF-YB)
  misc_feature (1)..(114): Homolog of NCBI NO: 115840 NR Description: CCAAT-BINDING TRANSCRIPTION FACTOR SUBUNIT A
  misc_feature (1)..(103): Homolog of NCBI NO: 18404885 NR Description: CCAAT-binding transcription factor subunit [Arabidopsis thaliana] >gi|2398527|emb|CAA74051.1| Transcription [Arabidopsis thaliana] >gi|20197447|gb|AAC79602.2| putative
  misc_feature (1)..(99): Homolog of NCBI NO: 25299604 NR Description: hypothetical protein At2g38880 [imported] -
  misc_feature (1)..(103): Homolog of NCBI NO: 17979253 NR Description: At2g37060/T2N18.18 [Arabidopsis thaliana]
  misc_feature (1)..(97): Homolog of NCBI NO: 15231796 NR Description: transcription factor NF-Y, CCAAT-binding - like
MKKALPANAKISKDAKETVQECVSEFISFITGEASDKCQREKRKTINGDDLLWAMTTLGFEDYVEPLKVYLQKYREVEGEKTTTAGRQGDKEGGGGGGGAGSGSGGAPMYGGGMVTTMGHQFSHHFS

SEQ ID NO: 100912 - DNA, 1363 bp, Arabidopsis thaliana
  misc_feature (1)..(1363): Ceres Seq. ID no. 13606343
  misc_feature: MA Experiment ID: 20000355 Result: Up-regulated in Transcription
  misc_feature: MA Experiment 20000355 PARAMETER Experiment Name: At_Siliques_Sub_P Parameter: Age (day) Value: 21
  misc_feature: MA Experiment 20000355 PARAMETER Experiment Name: At_Siliques_Sub_P Parameter: Organism Value: A. thaliana
  misc_feature: MA Experiment 20000355 PARAMETER Experiment Name: At_Siliques_Sub_P Parameter: Plant Line Value: WS
  misc_feature: MA Experiment 20000355 PARAMETER Experiment Name: At_Siliques_Sub_P Parameter: Tissue Value: Less Than 5mm Siliques vs. Whole Plant
  misc_feature: MA Experiment ID: 20000440 Result: Up-regulated in Transcription
  misc_feature: MA Experiment 20000440 PARAMETER Experiment Name: At_Closed-Flower__Sub_P Parameter: Tissue Value: Closed Flower vs. Whole Plant
acctattcactagtaataatctgaaaaaattagtactagatttcatgatgatgatgaaaagattgatgatttgagtcacaaaatcttgttttttgaaagttgtgtgatcttcttgtttgcatagtgaattagttttgatttgaaaagattttaagtaatggagaagaaatcagaagaagatgggaacaacacgacgaaagaaaagatctttagagcggataagattgatttgaagagtttagatagacagcttgagaaacatctgagtagggtttggtcgaggaaccttgaggtgaatcctaaagctaaggaagaatgggagattgatttggctaagcttgaaacaagtaatgttattgctcgtggtacttatggtactgtctacaaaggcatttatgatggacaagatgttgcagtgaaggtgcttgattgggaagatgatgggaatgaaacaacggccaagaccgctacaaatcgagctttgttccgtcaagaggtcactgtttggcacaaactcaaccatccaaatgtcacaaagtttgttggagcgtcgatgggaacaacgaatcttaatatacgatcagctgattcgaaaggctcgttgcctcaacaagcatgttgtgtggttgtggaatatcttcctggtggaacattgaaacaacacttgattcgtcataagagcaagaaactcgcttttaaagccgttatcaaactcgctcttgatctcgccagagggctaagctatttgcactcagagaagattgtccaccgcgatgtgaaaacagagaacatgcttttggatgctcagaagaatttgaaaatagcggattttggagtagcacgagtggaagctcttaatccaaaagacatgacaggagaaaccggtactcttggatacatggctcctgaggtcattgatggtaagccatacaacagaaggtgcgatgtttacagctttgggatatgtttatgggaaatctactgctgcgatatgccttatcctgatcttagctttgtcgatgtttcttccgcggttgtcttacataatctgagaccggagataccgagatgctgtccgactgcattggcgggcataatgaagacatgttgggatgggaatccgcagaaacggccggagatgaaggaggtggtgaaaatgcttgaaggtgttgataccagtaaaggtggcggaatgataccggaagatcaaagtcggggctgtttctgctttgctcctgctcgtggaccttaaatttccctttctacctctgtttggttttattgtcttgtttttgtcgacatttaactgaatgccccttttgcttcttctccaagaaacttcttttaacaagatttgttaaat

SEQ ID NO: 100913 - protein, 364 aa, Arabidopsis thaliana
  peptide (1)..(364): Ceres Seq. ID no. 13606344
  misc_feature (1)..(364): Homolog of NCBI NO: 15233574 NR Description: protein kinase, putative [Arabidopsis thaliana]
  misc_feature (8)..(364): Homolog of NCBI NO: 18403507 NR Description: protein kinase, putative [Arabidopsis thaliana]
  misc_feature (42)..(364): Homolog of NCBI NO: 15232131 NR Description: protein kinase, putative [Arabidopsis thaliana] putative protein kinase [Arabidopsis thaliana]
  misc_feature (1)..(41): Homolog of NCBI NO: 15232131 NR Description: protein kinase, putative [Arabidopsis thaliana] putative protein kinase [Arabidopsis thaliana]
  misc_feature (49)..(364): Homolog of NCBI NO: 34911620 NR Description: protein kinase -like [Oryza sativa (japonica
  misc_feature (19)..(38): Homolog of NCBI NO: 34911620 NR Description: protein kinase -like [Oryza sativa (japonica
  misc_feature (51)..(364): Homolog of NCBI NO: 29367399 NR Description: putative protein kinase [Oryza sativa (japonica
  misc_feature (19)..(41): Homolog of NCBI NO: 29367399 NR Description: putative protein kinase [Oryza sativa (japonica
  misc_feature (49)..(364): Homolog of NCBI NO: 15240597 NR Description: protein kinase, putative [Arabidopsis thaliana]
  misc_feature (49)..(364): Homolog of NCBI NO: 21553402 NR Description: protein kinase [Arabidopsis thaliana]
MEKKSEEDGNNTTKEKIFRADKIDLKSLDRQLEKHLSRVWSRNLEVNPKAKEEWEIDLAKLETSNVIARGTYGTVYKGIYDGQDVAVKVLDWEDDGNETTAKTATNRALFRQEVTVWHKLNHPNVTKFVGASMGTTNLNIRSADSKGSLPQQACCVVVEYLPGGTLKQHLIRHKSKKLAFKAVIKLALDLARGLSYLHSEKIVHRDVKTENMLLDAQKNLKIADFGVARVEALNPKDMTGETGTLGYMAPEVIDGKPYNRRCDVYSFGICLWEIYCCDMPYPDLSFVDVSSAVVLHNLRPEIPRCCPTALAGIMKTCWDGNPQKRPEMKEVVKMLEGVDTSKGGGMIPEDQSRGCFCFAPARGP

SEQ ID NO: 100914 - protein, 232 aa, Arabidopsis thaliana
  peptide (1)..(232): Ceres Seq. ID no. 13606345
  misc_feature (1)..(232): Homolog of NCBI NO: 15233574 NR Description: protein kinase, putative [Arabidopsis thaliana]
  misc_feature (1)..(232): Homolog of NCBI NO: 18403507 NR Description: protein kinase, putative [Arabidopsis thaliana]
  misc_feature (1)..(232): Homolog of NCBI NO: 15232131 NR Description: protein kinase, putative [Arabidopsis thaliana] putative protein kinase [Arabidopsis thaliana]
  misc_feature (1)..(232): Homolog of NCBI NO: 34911620 NR Description: protein kinase -like [Oryza sativa (japonica
  misc_feature (1)..(232): Homolog of NCBI NO: 29367399 NR Description: putative protein kinase [Oryza sativa (japonica
  misc_feature (1)..(232): Homolog of NCBI NO: 15240597 NR Description: protein kinase, putative [Arabidopsis thaliana]
  misc_feature (1)..(232): Homolog of NCBI NO: 21553402 NR Description: protein kinase [Arabidopsis thaliana]
  misc_feature (1)..(232): Homolog of NCBI NO: 15229398 NR Description: protein kinase, putative (ATMRK1) [Arabidopsis
  misc_feature (1)..(232): Homolog of NCBI NO: 21554375 NR Description: ATMRK1 [Arabidopsis thaliana]
  misc_feature (1)..(231): Homolog of NCBI NO: 14626298 NR Description: putative protein kinase [Oryza sativa (japonica
MGTTNLNIRSADSKGSLPQQACCVVVEYLPGGTLKQHLIRHKSKKLAFKAVIKLALDLARGLSYLHSEKIVHRDVKTENMLLDAQKNLKIADFGVARVEALNPKDMTGETGTLGYMAPEVIDGKPYNRRCDVYSFGICLWEIYCCDMPYPDLSFVDVSSAVVLHNLRPEIPRCCPTALAGIMKTCWDGNPQKRPEMKEVVKMLEGVDTSKGGGMIPEDQSRGCFCFAPARGP

SEQ ID NO: 100915 - DNA, 927 bp, Arabidopsis thaliana
  misc_feature (1)..(927): Ceres Seq. ID no. 13606346
  misc_feature: MA Experiment ID: 20000179 Result: Up-regulated in Transcription
  misc_feature: MA Experiment 20000179 PARAMETER Experiment Name: At_Germinating_Seeds_P Parameter: Age (hr) Value: 6 vs. 0
  misc_feature: MA Experiment 20000179 PARAMETER Experiment Name: At_Germinating_Seeds_P Parameter: Tissue Value: Germinating Seeds
  misc_feature: MA Experiment ID: 20000184 Result: Down-regulated in Transcription
  misc_feature: MA Experiment 20000184 PARAMETER Experiment Name: At_Shoots__P Parameter: Age (day) Value: 7
  misc_feature: MA Experiment 20000184 PARAMETER Experiment Name: At_Shoots__P Parameter: Tissue Value: Shoots vs. Whole Plant
  misc_feature: MA Experiment ID: 20000234 Result: Up-regulated in Transcription
  misc_feature: MA Experiment 20000234 PARAMETER Experiment Name: At_Siliques_P Parameter: Age (day) Value: 21
  misc_feature: MA Experiment 20000234 PARAMETER Experiment Name: At_Siliques_P Parameter: Organism Value: A. thaliana
  misc_feature: MA Experiment 20000234 PARAMETER Experiment Name: At_Siliques_P Parameter: Plant Line Value: WS
  misc_feature: MA Experiment 20000234 PARAMETER Experiment Name: At_Siliques_P Parameter: Tissue Value: Less Than 5mm Siliques vs. Whole Plant
  misc_feature: MA Experiment ID: 20001905 Result: Down-regulated in Transcription
  misc_feature: MA Experiment 20001905 PARAMETER Experiment Name: At_Drought_Reproduction_P Parameter: Age (day) Value: 40
  misc_feature: MA Experiment 20001905 PARAMETER Experiment Name: At_Drought_Reproduction_P Parameter: Organism Value: A. thaliana
  misc_feature: MA Experiment 20001905 PARAMETER Experiment Name: At_Drought_Reproduction_P Parameter: Plant Line Value: WS
  misc_feature: MA Experiment 20001905 PARAMETER Experiment Name: At_Drought_Reproduction_P Parameter: Timepoint (day) Value: 10
  misc_feature: MA Experiment 20001905 PARAMETER Experiment Name: At_Drought_Reproduction_P Parameter: Tissue Value: Rosettes
  misc_feature: MA Experiment 20001905 PARAMETER Experiment Name: At_Drought_Reproduction_P Parameter: Treatment Value: Drought vs. No Drought
gctctagtctcttcttcgaacgcttgcaatggatcttctcaagactccttcctccacggttggtctatcagaaacattcgctaggttaaagtcacaaggcaaagtggctctgattccatatatcacagctggtgatcctgatctttctacaacagcgaaagctcttaaagtgcttgattcgtgtggctccgacataatcgaactcggtgttccatactctgatccattagctgatggtccagcaatccaggctgctgcgagacgttcgttacttaaaggaaccaactttaactccattatctctatgcttaaagaggttattcctcagttatcttgtccaattgcattgtttacatattacaatccaatcctgcgacgaggagtagagaactacatgactgttataaagaatgctggagttcatgggcttctggttcctgatgttccactcgaggagactgaaactctgcggaacgaagctcggaagcatcaaattgagctagtactgctcacaacacccacaactccaaaagaacgaatgaatgccattgttgaagcctctgaaggatttatctatctcgtaagttcagtaggggttactggtacaagagagtctgttaacgaaaaagttcaatctcttctacaacaaatcaaagaggcaactagcaagccagtggcagttggatttggcatatcaaaacctgagcatgtgaaacaggtagctgaatggggagcagacggagtcattgttggtagcgcgatggttaagatcttgggcgagtctgaatcacctgagcaaggacttaaggagctagaattcttcactaaatctttgaagtctgctcttgtctcttgaatacccacaatgattctttcttaattgaatgcaaagaaccagatgaagctaccattgcttcttcataatat

SEQ ID NO: 100916 - protein, 275 aa, Arabidopsis thaliana
  peptide (1)..(275): Ceres Seq. ID no. 13606347
  misc_feature (17)..(274): Pfam Name: Tryptophan synthase alpha chain Pfam Description: Tryptophan synthase alpha chain
  misc_feature (1)..(275): Homolog of NCBI NO: 15235430 NR Description: tryptophan synthase, alpha subunit (TSA1), [Arabidopsis thaliana] >gi|7436987|pir||T01088 tryptophan
  misc_feature (1)..(274): Homolog of NCBI NO: 18410104 NR Description: tryptophan synthase, alpha subunit (TSA1) thaliana] >gi|2129755|pir||S59519 tryptophan synthase (EC
  misc_feature (1)..(274): Homolog of NCBI NO: 21593559 NR Description: tryptophan synthase alpha chain [Arabidopsis
  misc_feature (13)..(273): Homolog of NCBI NO: 34393530 NR Description: putative tryptophan synthase alpha chain [Oryza
  misc_feature (12)..(273): Homolog of NCBI NO: 34897224 NR Description: putative indole-3-glycerol phosphate lyase [Oryza
  misc_feature (13)..(273): Homolog of NCBI NO: 11993328 NR Description: putative tryptophan synthase alpha [Zea mays]
  misc_feature (49)..(274): Homolog of NCBI NO: 32441888 NR Description: putative tryptophan synthase alpha chain
  misc_feature (13)..(273): Homolog of NCBI NO: 11993325 NR Description: indole-3-glycerol phosphate lyase [Zea mays]
  misc_feature (8)..(273): Homolog of NCBI NO: 34897212 NR Description: putative indole-3-glycerol phosphate lyase [Oryza
  misc_feature (13)..(273): Homolog of NCBI NO: 33383132 NR Description: Indole synthase [Triticum aestivum]
MDLLKTPSSTVGLSETFARLKSQGKVALIPYITAGDPDLSTTAKALKVLDSCGSDIIELGVPYSDPLADGPAIQAAARRSLLKGTNFNSIISMLKEVIPQLSCPIALFTYYNPILRRGVENYMTVIKNAGVHGLLVPDVPLEETETLRNEARKHQIELVLLTTPTTPKERMNAIVEASEGFIYLVSSVGVTGTRESVNEKVQSLLQQIKEATSKPVAVGFGISKPEHVKQVAEWGADGVIVGSAMVKILGESESPEQGLKELEFFTKSLKSALVS

SEQ ID NO: 100917 - protein, 183 aa, Arabidopsis thaliana
  peptide (1)..(183): Ceres Seq. ID no. 13606348
  misc_feature (1)..(182): Pfam Name: Tryptophan synthase alpha chain Pfam Description: Tryptophan synthase alpha chain
  misc_feature (1)..(183): Homolog of NCBI NO: 15235430 NR Description: tryptophan synthase, alpha subunit (TSA1), [Arabidopsis thaliana] >gi|7436987|pir||T01088 tryptophan
  misc_feature (1)..(182): Homolog of NCBI NO: 18410104 NR Description: tryptophan synthase, alpha subunit (TSA1) thaliana] >gi|2129755|pir||S59519 tryptophan synthase (EC
  misc_feature (1)..(182): Homolog of NCBI NO: 21593559 NR Description: tryptophan synthase alpha chain [Arabidopsis
  misc_feature (1)..(181): Homolog of NCBI NO: 34393530 NR Description: putative tryptophan synthase alpha chain [Oryza
  misc_feature (1)..(181): Homolog of NCBI NO: 34897224 NR Description: putative indole-3-glycerol phosphate lyase [Oryza
  misc_feature (1)..(181): Homolog of NCBI NO: 11993328 NR Description: putative tryptophan synthase alpha [Zea mays]
  misc_feature (1)..(182): Homolog of NCBI NO: 32441888 NR Description: putative tryptophan synthase alpha chain
  misc_feature (1)..(181): Homolog of NCBI NO: 11993325 NR Description: indole-3-glycerol phosphate lyase [Zea mays]
  misc_feature (1)..(181): Homolog of NCBI NO: 34897212 NR Description: putative indole-3-glycerol phosphate lyase [Oryza
  misc_feature (1)..(181): Homolog of NCBI NO: 33383132 NR Description: Indole synthase [Triticum aestivum]
MLKEVIPQLSCPIALFTYYNPILRRGVENYMTVIKNAGVHGLLVPDVPLEETETLRNEARKHQIELVLLTTPTTPKERMNAIVEASEGFIYLVSSVGVTGTRESVNEKVQSLLQQIKEATSKPVAVGFGISKPEHVKQVAEWGADGVIVGSAMVKILGESESPEQGLKELEFFTKSLKSALVS

SEQ ID NO: 100918 - protein, 153 aa, Arabidopsis thaliana
  peptide (1)..(153): Ceres Seq. ID no. 13606349
  misc_feature (1)..(152): Pfam Name: Tryptophan synthase alpha chain Pfam Description: Tryptophan synthase alpha chain
  misc_feature (1)..(153): Homolog of NCBI NO: 15235430 NR Description: tryptophan synthase, alpha subunit (TSA1), [Arabidopsis thaliana] >gi|7436987|pir||T01088 tryptophan
  misc_feature (1)..(152): Homolog of NCBI NO: 18410104 NR Description: tryptophan synthase, alpha subunit (TSA1) thaliana] >gi|2129755|pir||S59519 tryptophan synthase (EC
  misc_feature (1)..(152): Homolog of NCBI NO: 21593559 NR Description: tryptophan synthase alpha chain [Arabidopsis
  misc_feature (1)..(151): Homolog of NCBI NO: 34393530 NR Description: putative tryptophan synthase alpha chain [Oryza
  misc_feature (1)..(151): Homolog of NCBI NO: 34897224 NR Description: putative indole-3-glycerol phosphate lyase [Oryza
  misc_feature (1)..(151): Homolog of NCBI NO: 11993328 NR Description: putative tryptophan synthase alpha [Zea mays]
  misc_feature (1)..(152): Homolog of NCBI NO: 32441888 NR Description: putative tryptophan synthase alpha chain
  misc_feature (1)..(151): Homolog of NCBI NO: 11993325 NR Description: indole-3-glycerol phosphate lyase [Zea mays]
  misc_feature (1)..(151): Homolog of NCBI NO: 34897212 NR Description: putative indole-3-glycerol phosphate lyase [Oryza
  misc_feature (1)..(151): Homolog of NCBI NO: 33383132 NR Description: Indole synthase [Triticum aestivum]
MTVIKNAGVHGLLVPDVPLEETETLRNEARKHQIELVLLTTPTTPKERMNAIVEASEGFIYLVSSVGVTGTRESVNEKVQSLLQQIKEATSKPVAVGFGISKPEHVKQVAEWGADGVIVGSAMVKILGESESPEQGLKELEFFTKSLKSALVS

SEQ ID NO: 100919 - DNA, 1713 bp, Arabidopsis thaliana
  misc_feature (1)..(1713): Ceres Seq. ID no. 13606350
  misc_feature: MA Experiment ID: 20000173 Result: Down-regulated in Transcription
  misc_feature: MA Experiment 20000173 PARAMETER Experiment Name: At_42deg_Heat_P Parameter: Age (day) Value: 14
  misc_feature: MA Experiment 20000173 PARAMETER Experiment Name: At_42deg_Heat_P Parameter: Organism Value: A. thaliana
  misc_feature: MA Experiment 20000173 PARAMETER Experiment Name: At_42deg_Heat_P Parameter: Plant Line Value: WS
  misc_feature: MA Experiment 20000173 PARAMETER Experiment Name: At_42deg_Heat_P Parameter: Temperature (deg C) Value: 42 vs. 22
  misc_feature: MA Experiment 20000173 PARAMETER Experiment Name: At_42deg_Heat_P Parameter: Timepoint (hr) Value: 6
  misc_feature: MA Experiment 20000173 PARAMETER Experiment Name: At_42deg_Heat_P Parameter: Tissue Value: Aerial
  misc_feature: MA Experiment ID: 20000182 Result: Down-regulated in Transcription
  misc_feature: MA Experiment 20000182 PARAMETER Experiment Name: At_2mM_SA_P Parameter: Age (day) Value: 14
  misc_feature: MA Experiment 20000182 PARAMETER Experiment Name: At_2mM_SA_P Parameter: Organism Value: A. thaliana
  misc_feature: MA Experiment 20000182 PARAMETER Experiment Name: At_2mM_SA_P Parameter: Plant Line Value: WS
  misc_feature: MA Experiment 20000182 PARAMETER Experiment Name: At_2mM_SA_P Parameter: Timepoint (hr) Value: 6
  misc_feature: MA Experiment 20000182 PARAMETER Experiment Name: At_2mM_SA_P Parameter: Tissue Value: Aerial
  misc_feature: MA Experiment 20000182 PARAMETER Experiment Name: At_2mM_SA_P Parameter: Treatment Value: 2mM SA vs. No Treatment
  misc_feature: MA Experiment ID: 20000185 Result: Down-regulated in Transcription
  misc_feature: MA Experiment 20000185 PARAMETER Experiment Name: At_Roots__P Parameter: Age (day) Value: 7 vs. 21
  misc_feature: MA Experiment 20000185 PARAMETER Experiment Name: At_Roots__P Parameter: Organism Value: A. thaliana
  misc_feature: MA Experiment 20000185 PARAMETER Experiment Name: At_Roots__P Parameter: Tissue Value: Roots vs. Whole Plant
  misc_feature: MA Experiment ID: 20000227 Result: Down-regulated in Transcription
  misc_feature: MA Experiment 20000227 PARAMETER Experiment Name: At_Root-Tips-vs-Tops_P Parameter: Tissue Value: Root Tips vs. Root Tops
  misc_feature: MA Experiment ID: 20000573 Result: Down-regulated in Transcription
  misc_feature: MA Experiment 20000573 PARAMETER Experiment Name: At_100uM_ABA_Mutants__P Parameter: Organism Value: A. thaliana
  misc_feature: MA Experiment 20000573 PARAMETER Experiment Name: At_100uM_ABA_Mutants__P Parameter: Plant Line Value: CS22 vs. Ler wt
  misc_feature: MA Experiment 20000573 PARAMETER Experiment Name: At_100uM_ABA_Mutants__P Parameter: Timepoint (hr) Value: N/A
  misc_feature: MA Experiment 20000573 PARAMETER Experiment Name: At_100uM_ABA_Mutants__P Parameter: Tissue Value: Whole Plant
  misc_feature: MA Experiment 20000573 PARAMETER Experiment Name: At_100uM_ABA_Mutants__P Parameter: Treatment Value: None
  misc_feature: MA Experiment ID: 20000574 Result: Down-regulated in Transcription
  misc_feature: MA Experiment 20000574 PARAMETER Experiment Name: At_100uM_ABA_Mutants__P Parameter: Organism Value: A. thaliana
  misc_feature: MA Experiment 20000574 PARAMETER Experiment Name: At_100uM_ABA_Mutants__P Parameter: Plant Line Value: CS23 vs. Ler wt
  misc_feature: MA Experiment 20000574 PARAMETER Experiment Name: At_100uM_ABA_Mutants__P Parameter: Timepoint (hr) Value: N/A
  misc_feature: MA Experiment 20000574 PARAMETER Experiment Name: At_100uM_ABA_Mutants__P Parameter: Tissue Value: Whole Plant
  misc_feature: MA Experiment 20000574 PARAMETER Experiment Name: At_100uM_ABA_Mutants__P Parameter: Treatment Value: None
  misc_feature: MA Experiment ID: 20000794 Result: Up-regulated in Transcription
  misc_feature: MA Experiment 20000794 PARAMETER Experiment Name: At_Petals_P Parameter: Age (day) Value: 23-25 days
  misc_feature: MA Experiment 20000794 PARAMETER Experiment Name: At_Petals_P Parameter: Plant Line Value: WS
  misc_feature: MA Experiment 20000794 PARAMETER Experiment Name: At_Petals_P Parameter: Tissue Value: Petals vs. Whole plant
  misc_feature: MA Experiment ID: 20001248 Result: Down-regulated in Transcription
  misc_feature: MA Experiment 20001248 PARAMETER Experiment Name: At_Far-red-induction_P Parameter: Age (day) Value: 7
  misc_feature: MA Experiment 20001248 PARAMETER Experiment Name: At_Far-red-induction_P Parameter: Light Value: Far-red vs. White
  misc_feature: MA Experiment 20001248 PARAMETER Experiment Name: At_Far-red-induction_P Parameter: Organism Value: A. thaliana
  misc_feature: MA Experiment 20001248 PARAMETER Experiment Name: At_Far-red-induction_P Parameter: Plant Line Value: Columbia
  misc_feature: MA Experiment 20001248 PARAMETER Experiment Name: At_Far-red-induction_P Parameter: Timepoint (hr) Value: 4
  misc_feature: MA Experiment 20001248 PARAMETER Experiment Name: At_Far-red-induction_P Parameter: Tissue Value: Whole Plant
  misc_feature: MA Experiment ID: 20001450 Result: Down-regulated in Transcription
  misc_feature: MA Experiment 20001450 PARAMETER Experiment Name: At_Far-red-induction_P Parameter: Age (day) Value: 7
  misc_feature: MA Experiment 20001450 PARAMETER Experiment Name: At_Far-red-induction_P Parameter: Light Value: Far-red vs. White
  misc_feature: MA Experiment 20001450 PARAMETER Experiment Name: At_Far-red-induction_P Parameter: Organism Value: A. thaliana
  misc_feature: MA Experiment 20001450 PARAMETER Experiment Name: At_Far-red-induction_P Parameter: Plant Line Value: Columbia
  misc_feature: MA Experiment 20001450 PARAMETER Experiment Name: At_Far-red-induction_P Parameter: Timepoint (hr) Value: 8
  misc_feature: MA Experiment 20001450 PARAMETER Experiment Name: At_Far-red-induction_P Parameter: Tissue Value: Whole Plant
  misc_feature: MA Experiment ID: 20001451 Result: Up-regulated in Transcription
  misc_feature: MA Experiment 20001451 PARAMETER Experiment Name: At_Far-red-induction_P Parameter: Age (day) Value: 7
  misc_feature: MA Experiment 20001451 PARAMETER Experiment Name: At_Far-red-induction_P Parameter: Light Value: Far-red vs. White
  misc_feature: MA Experiment 20001451 PARAMETER Experiment Name: At_Far-red-induction_P Parameter: Organism Value: A. thaliana
  misc_feature: MA Experiment 20001451 PARAMETER Experiment Name: At_Far-red-induction_P Parameter: Plant Line Value: Columbia
  misc_feature: MA Experiment 20001451 PARAMETER Experiment Name: At_Far-red-induction_P Parameter: Timepoint (hr) Value: 24
  misc_feature: MA Experiment 20001451 PARAMETER Experiment Name: At_Far-red-induction_P Parameter: Tissue Value: Whole Plant
  misc_feature: MA Experiment ID: 20001905 Result: Down-regulated in Transcription
  misc_feature: MA Experiment 20001905 PARAMETER Experiment Name: At_Drought_Reproduction_P Parameter: Age (day) Value: 40
  misc_feature: MA Experiment 20001905 PARAMETER Experiment Name: At_Drought_Reproduction_P Parameter: Organism Value: A. thaliana
  misc_feature: MA Experiment 20001905 PARAMETER Experiment Name: At_Drought_Reproduction_P Parameter: Plant Line Value: WS
  misc_feature: MA Experiment 20001905 PARAMETER Experiment Name: At_Drought_Reproduction_P Parameter: Timepoint (day) Value: 10
  misc_feature: MA Experiment 20001905 PARAMETER Experiment Name: At_Drought_Reproduction_P Parameter: Tissue Value: Rosettes
  misc_feature: MA Experiment 20001905 PARAMETER Experiment Name: At_Drought_Reproduction_P Parameter: Treatment Value: Drought vs. No Drought
gtgcagcagaacaaaagcaaaaagagagagtcagaggaagaagaagaagaagaagagtcagtgagctgcaatggcggattctcactcagtcaacaatcagctctcgagacacacttccatttttggtttacgtttatgggttgttctcggcgtttgcgttggagccgcgatcgttcttttactcgttctcatctctctctggttcatttaccgacgaagcaacaagaacaaatctcttgagtcttcttctaaatctaaccatacgattgttcccgttgtttccaaggagattcaagagattcgacctccaattcaacccgacccaacaccggagccacaccaaaaccaacaaagagaagacgataacaaaattcacatcgaaattggtaaagatcatcggattgcgtacccggaacgaggaggttggactggttccgggtctgggtccgggtcgggtgatcagggtttacttatgttgtcgggtcctgaggtttctcatttaggttggggacattggtatacgttgagagagcttgaggtttctactaatggatttgctgacgagaatgtgattggacaaggaggttatgggattgtgtatagaggtgttcttgaggataaatcaatggtggctataaagaatctgctcaacaacagaggacaagctgagaaagaatttaaagtcgaagtcgaagctattggacgcgtaagacacaagaatctggtgagattgcttggttattgcgttgaaggagctcataggatgttagtttacgagtatgttgataatgggaatttagaacaatggattcatggtggtggtttggggtttaagagtcctcttacttgggagattaggatgaacattgttcttggaacagccaaagggttaatgtatttacacgaaggtcttgagcctaaagttgttcaccgagatattaaatcgagtaatatcttgcttgacaagcaatggaactcgaaagtttctgactttgggttagctaagctcttgggttcggagatgagctatgtgactactcgtgtgatgggtacgtttgggtatgtggctcctgaatacgcgagtaccggaatgttgaatgagaggagcgatgtttatagcttcggtgttcttgttatggagattatttcagggagaagtcctgtggattatagccgggctccgggagaagtgaatcttgtggaatggttgaagagattggtgacgaatcgagatgcggaaggagttttggatccgaggatggttgataaaccgtcgttaaggtcattgaagcgtacccttttggtagctttaagatgtgttgatcctaatgctcaaaagaggccaaaaatgggtcatatcattcatatgcttgaagctgaggacttggtctctaaagatgatcggagaaactctggaggaggaggaggaggaatagaacagggaaggtcaccgcggaggaagacaaatgtgaatgaatcagaggatgagagtggtaattctgttctgatcaacaatgaccaattagctttggagaataagcagaactagtaaaaaagaaagaagctttggcattataattttgtattactatttttagaagttttttcttgtgtgtgtatatttatgtgtgtagattcttagccctttcacaaaaaaaaaaaaaatgtgtgtagattcttgtaattttgcaataattaaaactggggattgct

SEQ ID NO: 100920 - protein, 492 aa, Arabidopsis thaliana
  peptide (1)..(492): Ceres Seq. ID no. 13606351
  misc_feature (164)..(434): Pfam Name: Protein kinase domain Pfam Description: Protein kinase domain
  misc_feature (1)..(492): Homolog of NCBI NO: 15235432 NR Description: protein kinase family [Arabidopsis thaliana]
  misc_feature (3)..(477): Homolog of NCBI NO: 14194119 NR Description: At1g01540/F22L4_6 [Arabidopsis thaliana]
  misc_feature (3)..(477): Homolog of NCBI NO: 15223428 NR Description: protein kinase family [Arabidopsis thaliana] putative kinase [Arabidopsis thaliana]
  misc_feature (157)..(477): Homolog of NCBI NO: 25518287 NR Description: hypothetical protein F22L4.8 - Arabidopsis >gi|8920590|gb|AAF81312.1|AC061957_8 Contains a strong similarity an unknown protein from Arabidopsis thaliana gi|2505874 and
  misc_feature (3)..(196): Homolog of NCBI NO: 25518287 NR Description: hypothetical protein F22L4.8 - Arabidopsis >gi|8920590|gb|AAF81312.1|AC061957_8 Contains a strong similarity an unknown protein from Arabidopsis thaliana gi|2505874 and
  misc_feature (6)..(443): Homolog of NCBI NO: 15234142 NR Description: protein kinase family [Arabidopsis thaliana]
  misc_feature (79)..(477): Homolog of NCBI NO: 34897534 NR Description: OSJNBa0042L16.4 [Oryza sativa (japonica
  misc_feature (8)..(86): Homolog of NCBI NO: 34897534 NR Description: OSJNBa0042L16.4 [Oryza sativa (japonica
  misc_feature (139)..(477): Homolog of NCBI NO: 37535714 NR Description: putative kinase [Oryza sativa (japonica
  misc_feature (1)..(78): Homolog of NCBI NO: 37535714 NR Description: putative kinase [Oryza sativa (japonica
MADSHSVNNQLSRHTSIFGLRLWVVLGVCVGAAIVLLLVLISLWFIYRRSNKNKSLESSSKSNHTIVPVVSKEIQEIRPPIQPDPTPEPHQNQQREDDNKIHIEIGKDHRIAYPERGGWTGSGSGSGSGDQGLLMLSGPEVSHLGWGHWYTLRELEVSTNGFADENVIGQGGYGIVYRGVLEDKSMVAIKNLLNNRGQAEKEFKVEVEAIGRVRHKNLVRLLGYCVEGAHRMLVYEYVDNGNLEQWIHGGGLGFKSPLTWEIRMNIVLGTAKGLMYLHEGLEPKVVHRDIKSSNILLDKQWNSKVSDFGLAKLLGSEMSYVTTRVMGTFGYVAPEYASTGMLNERSDVYSFGVLVMEIISGRSPVDYSRAPGEVNLVEWLKRLVTNRDAEGVLDPRMVDKPSLRSLKRTLLVALRCVDPNAQKRPKMGHIIHMLEAEDLVSKDDRRNSGGGGGGIEQGRSPRRKTNVNESEDESGNSVLINNDQLALENKQN

SEQ ID NO: 100921 - protein, 358 aa, Arabidopsis thaliana
  peptide (1)..(358): Ceres Seq. ID no. 13606352
  misc_feature (30)..(300): Pfam Name: Protein kinase domain Pfam Description: Protein kinase domain
  misc_feature (1)..(358): Homolog of NCBI NO: 15235432 NR Description: protein kinase family [Arabidopsis thaliana]
  misc_feature (1)..(343): Homolog of NCBI NO: 14194119 NR Description: At1g01540/F22L4_6 [Arabidopsis thaliana]
  misc_feature (1)..(343): Homolog of NCBI NO: 15223428 NR Description: protein kinase family [Arabidopsis thaliana] putative kinase [Arabidopsis thaliana]
  misc_feature (23)..(343): Homolog of NCBI NO: 25518287 NR Description: hypothetical protein F22L4.8 - Arabidopsis >gi|8920590|gb|AAF81312.1|AC061957_8 Contains a strong similarity an unknown protein from Arabidopsis thaliana gi|2505874 and
  misc_feature (1)..(62): Homolog of NCBI NO: 25518287 NR Description: hypothetical protein F22L4.8 - Arabidopsis >gi|8920590|gb|AAF81312.1|AC061957_8 Contains a strong similarity an unknown protein from Arabidopsis thaliana gi|2505874 and
  misc_feature (1)..(309): Homolog of NCBI NO: 15234142 NR Description: protein kinase family [Arabidopsis thaliana]
  misc_feature (1)..(343): Homolog of NCBI NO: 34897534 NR Description: OSJNBa0042L16.4 [Oryza sativa (japonica
  misc_feature (5)..(343): Homolog of NCBI NO: 37535714 NR Description: putative kinase [Oryza sativa (japonica
  misc_feature (1)..(322): Homolog of NCBI NO: 15228043 NR Description: protein kinase family [Arabidopsis thaliana]
  misc_feature (1)..(336): Homolog of NCBI NO: 34910880 NR Description: P0003E08.6 [Oryza sativa (japonica
MLSGPEVSHLGWGHWYTLRELEVSTNGFADENVIGQGGYGIVYRGVLEDKSMVAIKNLLNNRGQAEKEFKVEVEAIGRVRHKNLVRLLGYCVEGAHRMLVYEYVDNGNLEQWIHGGGLGFKSPLTWEIRMNIVLGTAKGLMYLHEGLEPKVVHRDIKSSNILLDKQWNSKVSDFGLAKLLGSEMSYVTTRVMGTFGYVAPEYASTGMLNERSDVYSFGVLVMEIISGRSPVDYSRAPGEVNLVEWLKRLVTNRDAEGVLDPRMVDKPSLRSLKRTLLVALRCVDPNAQKRPKMGHIIHMLEAEDLVSKDDRRNSGGGGGGIEQGRSPRRKTNVNESEDESGNSVLINNDQLALENKQN

SEQ ID NO: 100922 - protein, 307 aa, Arabidopsis thaliana
  peptide (1)..(307): Ceres Seq. ID no. 13606353
  misc_feature (1)..(249): Pfam Name: Protein kinase domain Pfam Description: Protein kinase domain
  misc_feature (1)..(307): Homolog of NCBI NO: 15235432 NR Description: protein kinase family [Arabidopsis thaliana]
  misc_feature (1)..(292): Homolog of NCBI NO: 14194119 NR Description: At1g01540/F22L4_6 [Arabidopsis thaliana]
  misc_feature (1)..(292): Homolog of NCBI NO: 15223428 NR Description: protein kinase family [Arabidopsis thaliana] putative kinase [Arabidopsis thaliana]
  misc_feature (1)..(292): Homolog of NCBI NO: 25518287 NR Description: hypothetical protein F22L4.8 - Arabidopsis >gi|8920590|gb|AAF81312.1|AC061957_8 Contains a strong similarity an unknown protein from Arabidopsis thaliana gi|2505874 and
  misc_feature (1)..(11): Homolog of NCBI NO: 25518287 NR Description: hypothetical protein F22L4.8 - Arabidopsis >gi|8920590|gb|AAF81312.1|AC061957_8 Contains a strong similarity an unknown protein from Arabidopsis thaliana gi|2505874 and
  misc_feature (1)..(258): Homolog of NCBI NO: 15234142 NR Description: protein kinase family [Arabidopsis thaliana]
  misc_feature (1)..(292): Homolog of NCBI NO: 34897534 NR Description: OSJNBa0042L16.4 [Oryza sativa (japonica
  misc_feature (1)..(292): Homolog of NCBI NO: 37535714 NR Description: putative kinase [Oryza sativa (japonica
  misc_feature (1)..(271): Homolog of NCBI NO: 15228043 NR Description: protein kinase family [Arabidopsis thaliana]
  misc_feature (1)..(285): Homolog of NCBI NO: 34910880 NR Description: P0003E08.6 [Oryza sativa (japonica
MVAIKNLLNNRGQAEKEFKVEVEAIGRVRHKNLVRLLGYCVEGAHRMLVYEYVDNGNLEQWIHGGGLGFKSPLTWEIRMNIVLGTAKGLMYLHEGLEPKVVHRDIKSSNILLDKQWNSKVSDFGLAKLLGSEMSYVTTRVMGTFGYVAPEYASTGMLNERSDVYSFGVLVMEIISGRSPVDYSRAPGEVNLVEWLKRLVTNRDAEGVLDPRMVDKPSLRSLKRTLLVALRCVDPNAQKRPKMGHIIHMLEAEDLVSKDDRRNSGGGGGGIEQGRSPRRKTNVNESEDESGNSVLINNDQLALENKQN

SEQ ID NO: 100923 - DNA, 1393 bp, Arabidopsis thaliana
  misc_feature (1)..(1393): Ceres Seq. ID no. 13606354
  misc_feature: MA Experiment ID: 108462 Result: Up-regulated in Transcription
  misc_feature: MA Experiment 108462 PARAMETER Experiment Name: At_Germinating_Seeds_cDNA_P Parameter: Age (day) Value: 2 vs. 0
  misc_feature: MA Experiment 108462 PARAMETER Experiment Name: At_Germinating_Seeds_cDNA_P Parameter: Tissue Value: Germinating Seeds
  misc_feature: MA Experiment ID: 108463 Result: Up-regulated in Transcription
  misc_feature: MA Experiment 108463 PARAMETER Experiment Name: At_Germinating_Seeds_cDNA_P Parameter: Age (day) Value: 3 vs. 0
  misc_feature: MA Experiment 108463 PARAMETER Experiment Name: At_Germinating_Seeds_cDNA_P Parameter: Tissue Value: Germinating Seeds
  misc_feature: MA Experiment ID: 108464 Result: Up-regulated in Transcription
  misc_feature: MA Experiment 108464 PARAMETER Experiment Name: At_Germinating_Seeds_cDNA_P Parameter: Age (day) Value: 4 vs. 0
  misc_feature: MA Experiment 108464 PARAMETER Experiment Name: At_Germinating_Seeds_cDNA_P Parameter: Tissue Value: Germinating Seeds
  misc_feature: MA Experiment ID: 108488 Result: Down-regulated in Transcription
  misc_feature: MA Experiment ID: 20000184 Result: Down-regulated in Transcription
  misc_feature: MA Experiment 20000184 PARAMETER Experiment Name: At_Shoots__P Parameter: Age (day) Value: 7
  misc_feature: MA Experiment 20000184 PARAMETER Experiment Name: At_Shoots__P Parameter: Tissue Value: Shoots vs. Whole Plant
  misc_feature: MA Experiment ID: 20000185 Result: Up-regulated in Transcription
  misc_feature: MA Experiment 20000185 PARAMETER Experiment Name: At_Roots__P Parameter: Age (day) Value: 7 vs. 21
  misc_feature: MA Experiment 20000185 PARAMETER Experiment Name: At_Roots__P Parameter: Organism Value: A. thaliana
  misc_feature: MA Experiment 20000185 PARAMETER Experiment Name: At_Roots__P Parameter: Tissue Value: Roots vs. Whole Plant
  misc_feature: MA Experiment ID: 20000224 Result: Up-regulated in Transcription
  misc_feature: MA Experiment ID: 20000794 Result: Up-regulated in Transcription
  misc_feature: MA Experiment 20000794 PARAMETER Experiment Name: At_Petals_P Parameter: Age (day) Value: 23-25 days
  misc_feature: MA Experiment 20000794 PARAMETER Experiment Name: At_Petals_P Parameter: Plant Line Value: WS
  misc_feature: MA Experiment 20000794 PARAMETER Experiment Name: At_Petals_P Parameter: Tissue Value: Petals vs. Whole plant
  misc_feature: MA Experiment ID: 20001451 Result: Down-regulated in Transcription
  misc_feature: MA Experiment 20001451 PARAMETER Experiment Name: At_Far-red-induction_P Parameter: Age (day) Value: 7
  misc_feature: MA Experiment 20001451 PARAMETER Experiment Name: At_Far-red-induction_P Parameter: Light Value: Far-red vs. White
  misc_feature: MA Experiment 20001451 PARAMETER Experiment Name: At_Far-red-induction_P Parameter: Organism Value: A. thaliana
  misc_feature: MA Experiment 20001451 PARAMETER Experiment Name: At_Far-red-induction_P Parameter: Plant Line Value: Columbia
  misc_feature: MA Experiment 20001451 PARAMETER Experiment Name: At_Far-red-induction_P Parameter: Timepoint (hr) Value: 24
  misc_feature: MA Experiment 20001451 PARAMETER Experiment Name: At_Far-red-induction_P Parameter: Tissue Value: Whole Plant
  misc_feature: MA Experiment ID: 20001558 Result: Down-regulated in Transcription
  misc_feature: MA Experiment 20001558 PARAMETER Experiment Name: At_Drought_Soil_Dry_P Parameter: Age (day) Value: 27
  misc_feature: MA Experiment 20001558 PARAMETER Experiment Name: At_Drought_Soil_Dry_P Parameter: Organism Value: A. thaliana
  misc_feature: MA Experiment 20001558 PARAMETER Experiment Name: At_Drought_Soil_Dry_P Parameter: Plant Line Value: WS
  misc_feature: MA Experiment 20001558 PARAMETER Experiment Name: At_Drought_Soil_Dry_P Parameter: Post Timepoint (hr) Value: 6
  misc_feature: MA Experiment 20001558 PARAMETER Experiment Name: At_Drought_Soil_Dry_P Parameter: Post-Treatment Value: Re-Water vs. No Drought
  misc_feature: MA Experiment 20001558 PARAMETER Experiment Name: At_Drought_Soil_Dry_P Parameter: Timepoint (day) Value: 13
  misc_feature: MA Experiment 20001558 PARAMETER Experiment Name: At_Drought_Soil_Dry_P Parameter: Treatment Value: Drought vs. No Drought
  misc_feature: MA Experiment ID: 20001560 Result: Down-regulated in Transcription
  misc_feature: MA Experiment 20001560 PARAMETER Experiment Name: At_Drought_Soil_Dry_P Parameter: Age (day) Value: 28
  misc_feature: MA Experiment 20001560 PARAMETER Experiment Name: At_Drought_Soil_Dry_P Parameter: Organism Value: A. thaliana
  misc_feature: MA Experiment 20001560 PARAMETER Experiment Name: At_Drought_Soil_Dry_P Parameter: Plant Line Value: WS
  misc_feature: MA Experiment 20001560 PARAMETER Experiment Name: At_Drought_Soil_Dry_P Parameter: Post Timepoint (hr) Value: None
  misc_feature: MA Experiment 20001560 PARAMETER Experiment Name: At_Drought_Soil_Dry_P Parameter: Post-Treatment Value: None
  misc_feature: MA Experiment 20001560 PARAMETER Experiment Name: At_Drought_Soil_Dry_P Parameter: Timepoint (day) Value: 14
  misc_feature: MA Experiment 20001560 PARAMETER Experiment Name: At_Drought_Soil_Dry_P Parameter: Treatment Value: Drought vs. No Drought
gaaaaagagagcgagcgatgaacagtatcttctccattgacgatttctccgatcctttctgggaaactcctccgattcctctcaatcccgactcttctaagcctgttacggcggatgaagttagccagagtcaaccggaatggactttcgagatgtttctcgaagagatttcttcgtcggcggtgagctctgagccacttggtaacaacaacaacgcgatcgtcggtgtttcttcggcgcaatctcttccttctgtttccggacagaatgatttcgaggatgatagtcgatttcgtgatcgcgattcgggaaatttggattgtgctgctcccatgacgacgaagacggtgattgttgattccgatgattatcgtcgtgttcttaagaacaagcttgagactgagtgcgctactgttgtttctcttcgggttgggtctgtgaagcctgaagattcgactagttctccagaaactcaacttcaaccagttcaatccagtcctcttactcaaggagaacttggtgttacttcttccttaccagctgaggtgaaaaaaactggtgtatcaatgaagcaggttactagtggatcgtcgagagaatattctgatgacgaggaccttgatgaagagaatgaaaccaccggttccttgaagccagaggacgttaaaaaatctagaaggatgctgtcaaatcgtgagtcagctaggcgatctagaaggagaaagcaggagcaaacaagtgacctcgaaacacaggttaatgatctaaaaggtgagcattcatcacttcttaaacaactgagcaacatgaatcacaagtatgacgaggctgctgttggcaatagaatactaaaggctgacattgagacattaagagctaaggtgaaaatggcggaagaaaccgtgaagagagtaacaggaatgaatccgatgcttctcggaagatcaagtggacataacaacaacaacagaatgccaataactggtaacaacaggatggattcttctagcattattccagcttatcaaccacactcaaacctaaaccatatgtcaaaccaaaacatcgggatcccaaccattctacctccaagactcggaaacaatttcgctgctcctccatcccaaaccagctctcccttgcagagaattagaaatgggcaaaatcaccatgttactccaagcgccaacccgtatggctggaataccgaacctcagaacgattcagcatggccgaaaaaatgcgtggactgatcaaacaagaagcgggtttcgcactatattaatgtctatgcatctgtaatttgtaagtgttattaagttacgaatcatgagaaaacatcttgtgaaaatacagtctcatggcttatatatatatataagctctgtcttat

SEQ ID NO: 100924 - protein, 416 aa, Arabidopsis thaliana; identical to SEQ ID NO: 27485
  peptide (1)..(416): Ceres Seq. ID no. 13606355
  misc_feature (218)..(282): Pfam Name: bZIP transcription factor Pfam Description: bZIP transcription factor
  misc_feature (6)..(416): Homolog of NCBI NO: 15235433 NR Description: bZIP protein [Arabidopsis thaliana]
  misc_feature (6)..(416): Homolog of NCBI NO: 30679226 NR Description: bZIP protein [Arabidopsis thaliana]
  misc_feature (13)..(416): Homolog of NCBI NO: 19423919 NR Description: unknown protein [Arabidopsis thaliana]
  misc_feature (6)..(357): Homolog of NCBI NO: 30694089 NR Description: bZIP transcription factor-related protein
  misc_feature (26)..(383): Homolog of NCBI NO: 100163 NR Description: light-induced protein CPRF-2 - parsley
  misc_feature (26)..(383): Homolog of NCBI NO: 2842757 NR Description: Light-inducible protein CPRF-2
  misc_feature (6)..(356): Homolog of NCBI NO: 542188 NR Description: OHP2 protein - maize >gi|168428|gb|AAA33439.1|
  misc_feature (6)..(336): Homolog of NCBI NO: 542187 NR Description: OHP1 protein - maize >gi|168530|gb|AAA33488.1|
  misc_feature (28)..(373): Homolog of NCBI NO: 16797791 NR Description: bZIP transcription factor [Nicotiana tabacum]
  misc_feature (6)..(356): Homolog of NCBI NO: 4115746 NR Description: bZIP protein [Oryza sativa (indica

SEQ ID NO: 100925 - protein, 411 aa, Arabidopsis thaliana; identical to SEQ ID NO: 27486
  peptide (1)..(411): Ceres Seq. ID no. 13606356
  misc_feature (213)..(277): Pfam Name: bZIP transcription factor Pfam Description: bZIP transcription factor
  misc_feature (1)..(411): Homolog of NCBI NO: 15235433 NR Description: bZIP protein [Arabidopsis thaliana]
  misc_feature (1)..(411): Homolog of NCBI NO: 30679226 NR Description: bZIP protein [Arabidopsis thaliana]
  misc_feature (8)..(411): Homolog of NCBI NO: 19423919 NR Description: unknown protein [Arabidopsis thaliana]
  misc_feature (1)..(352): Homolog of NCBI NO: 30694089 NR Description: bZIP transcription factor-related protein
  misc_feature (21)..(378): Homolog of NCBI NO: 100163 NR Description: light-induced protein CPRF-2 - parsley
  misc_feature (21)..(378): Homolog of NCBI NO: 2842757 NR Description: Light-inducible protein CPRF-2
  misc_feature (1)..(351): Homolog of NCBI NO: 542188 NR Description: OHP2 protein - maize >gi|168428|gb|AAA33439.1|
  misc_feature (1)..(331): Homolog of NCBI NO: 542187 NR Description: OHP1 protein - maize >gi|168530|gb|AAA33488.1|
  misc_feature (23)..(368): Homolog of NCBI NO: 16797791 NR Description: bZIP transcription factor [Nicotiana tabacum]
  misc_feature (1)..(351): Homolog of NCBI NO: 4115746 NR Description: bZIP protein [Oryza sativa (indica

SEQ ID NO: 100926 - protein, 366 aa, Arabidopsis thaliana; identical to SEQ ID NO: 27487
  peptide (1)..(366): Ceres Seq. ID no. 13606357
  misc_feature (168)..(232): Pfam Name: bZIP transcription factor Pfam Description: bZIP transcription factor
  misc_feature (1)..(366): Homolog of NCBI NO: 15235433 NR Description: bZIP protein [Arabidopsis thaliana]
  misc_feature (1)..(366): Homolog of NCBI NO: 30679226 NR Description: bZIP protein [Arabidopsis thaliana]
  misc_feature (1)..(366): Homolog of NCBI NO: 19423919 NR Description: unknown protein [Arabidopsis thaliana]
  misc_feature (1)..(307): Homolog of NCBI NO: 30694089 NR Description: bZIP transcription factor-related protein
  misc_feature (1)..(333): Homolog of NCBI NO: 100163 NR Description: light-induced protein CPRF-2 - parsley
  misc_feature (1)..(333): Homolog of NCBI NO: 2842757 NR Description: Light-inducible protein CPRF-2
  misc_feature (1)..(306): Homolog of NCBI NO: 542188 NR Description: OHP2 protein - maize >gi|168428|gb|AAA33439.1|
  misc_feature (1)..(286): Homolog of NCBI NO: 542187 NR Description: OHP1 protein - maize >gi|168530|gb|AAA33488.1|
  misc_feature (1)..(323): Homolog of NCBI NO: 16797791 NR Description: bZIP transcription factor [Nicotiana tabacum]
  misc_feature (1)..(306): Homolog of NCBI NO: 4115746 NR Description: bZIP protein [Oryza sativa (indica

SEQ ID NO: 100927 - DNA, 1509 bp, Arabidopsis thaliana
  misc_feature (1)..(1509): Ceres Seq. ID no. 13606366
  misc_feature: MA Experiment ID: 20000314 Result: Up-regulated in Transcription
  misc_feature: MA Experiment 20000314 PARAMETER Experiment Name: At_14day_Shoots-Roots_Sub_P Parameter: Age (day) Value: 14
  misc_feature: MA Experiment 20000314 PARAMETER Experiment Name: At_14day_Shoots-Roots_Sub_P Parameter: Organism Value: A. thaliana
  misc_feature: MA Experiment 20000314 PARAMETER Experiment Name: At_14day_Shoots-Roots_Sub_P Parameter: Plant Line Value: WS
  misc_feature: MA Experiment 20000314 PARAMETER Experiment Name: At_14day_Shoots-Roots_Sub_P Parameter: Tissue Value: Roots vs. Whole Plant
  misc_feature: MA Experiment ID: 20000346 Result: Up-regulated in Transcription
  misc_feature: MA Experiment 20000346 PARAMETER Experiment Name: At_2mM_SA_Sub_P Parameter: Age (day) Value: 14
  misc_feature: MA Experiment 20000346 PARAMETER Experiment Name: At_2mM_SA_Sub_P Parameter: Organism Value: A. thaliana
  misc_feature: MA Experiment 20000346 PARAMETER Experiment Name: At_2mM_SA_Sub_P Parameter: Plant Line Value: WS
  misc_feature: MA Experiment 20000346 PARAMETER Experiment Name: At_2mM_SA_Sub_P Parameter: Timepoint (hr) Value: 1
  misc_feature: MA Experiment 20000346 PARAMETER Experiment Name: At_2mM_SA_Sub_P Parameter: Tissue Value: Aerial
  misc_feature: MA Experiment 20000346 PARAMETER Experiment Name: At_2mM_SA_Sub_P Parameter: Treatment Value: 2mM SA vs. No Treatment
  misc_feature: MA Experiment ID: 20000347 Result: Up-regulated in Transcription
  misc_feature: MA Experiment 20000347 PARAMETER Experiment Name: At_2mM_SA_Sub_P Parameter: Age (day) Value: 14
  misc_feature: MA Experiment 20000347 PARAMETER Experiment Name: At_2mM_SA_Sub_P Parameter: Organism Value: A. thaliana
  misc_feature: MA Experiment 20000347 PARAMETER Experiment Name: At_2mM_SA_Sub_P Parameter: Plant Line Value: WS
  misc_feature: MA Experiment 20000347 PARAMETER Experiment Name: At_2mM_SA_Sub_P Parameter: Timepoint (hr) Value: 6
  misc_feature: MA Experiment 20000347 PARAMETER Experiment Name: At_2mM_SA_Sub_P Parameter: Tissue Value: Aerial
  misc_feature: MA Experiment 20000347 PARAMETER Experiment Name: At_2mM_SA_Sub_P Parameter: Treatment Value: 2mM SA vs. No Treatment
gtattcgatgatgtaagcttacgggaagctccacaagattcttcttcttcttcaggtatctgaagtcactaaacacgtcaatcacaaattccttttacttttcctctctgacaatctttctacacttcatctctctatatatatatatcgaatcttgaaactgatttgaaagaagaagaagaagaaacctaacgaagaacattcgaaaaaacctaaactgttttttactttgagcttgaatctgtaaaaatggaaggcattgaatctgggtctaaacaaggaaagagagtggttgtgatcggcggcggaatcgccggctcactcgccgcgaaattgcttcagttcgatgctgaagtcacactcatcgatccgaaggagtattttgagattacatgggcaagtttgagatccatggtggagcctaagtttgctgagagaacagtgattaaccacaagagttacttgaaacaaggccgtcttgtaacttctccggcgatcaatatcacagagagtgatgttatgactgaagatggatctgtgattggatatgattatcttgtgattgctacaggtcacaatgacttgttccctaaaactagacaagagaagctgtcacattatcaatctgaatatgagaagataaaatcttctggatcagttttgattgttggtggaggtccatctggtgtggagctagctgcggaaatcgcggttgatttcccggagaagaaggttactctggtgcataaaggaccaagattgcttgagtttgttggacaaaaagctgctgataaagcatctgattggttagaatcaaagaaagtggaagttatattgaaccaatctgtggatttgagttcagcttcggatggaaacaaaatataccggacttcaggaggagaaactatacacgcagatattcacttcctctgtgttgggaaacctttgtcttctcaatggctcaatggaactgttctgaaagatagcttggatggtaaaggaagagtcatggtcgatgagtacttgcggattagaggtcgaagcaatgtattcgctgttggagatatcactaatatccctgagatgaaacaaggatatatagcagagactcatgctaatgtcgttgtgaagaacataaaggtaatgatgtcaggtgggaaaaagaagaagatgtcgacttacaagcccggtccagagttggccattgtatctttaggaagaaaggactcggtggctcagtttccgtttgtgacagttgttggttgcctccctggtttgatcaagtctaaggatctgtttgtggggaagacaaggaaggcaagaggcctaaatcctaaacttgtataagtttgattcctattgtgttttgaggttacatcttgtgtgcagatgtaatcatgttgtttgtgtttgtgtttgtttttgtgttgatttcattgtttcagtgtgtgttgattttgctttatgttggtatctaatgtataaataatggaattatttgagtcgact

SEQ ID NO: 100928 - protein, 365 aa, Arabidopsis thaliana
  peptide (1)..(365): Ceres Seq. ID no. 13606367
  misc_feature (13)..(284): Pfam Name: Pyridine nucleotide-disulphide oxidoreductase Pfam Description: Pyridine nucleotide-disulphide oxidoreductase
  misc_feature (1)..(365): Homolog of NCBI NO: 22326972 NR Description: pyridine nucleotide-disulphide oxidoreductase [Arabidopsis thaliana] >gi|13374873|emb|CAC34507.1| putative
  misc_feature (1)..(365): Homolog of NCBI NO: 26450665 NR Description: unknown protein [Arabidopsis thaliana]
  misc_feature (1)..(365): Homolog of NCBI NO: 15229901 NR Description: pyridine nucleotide-disulphide oxidoreductase
  misc_feature (42)..(362): Homolog of NCBI NO: 34581771 NR Description: pyridine nucleotide-disulphide oxidoreductase
  misc_feature (157)..(361): Homolog of NCBI NO: 40641605 NR Description: putative pyridine nucleotide-disulphide
  misc_feature (4)..(362): Homolog of NCBI NO: 14318424 NR Description: apoptosis-inducing factor (AIF)-homologous
  misc_feature (14)..(362): Homolog of NCBI NO: 30017355 NR Description: RIKEN cDNA 5430437E11 [Mus musculus]
  misc_feature (14)..(313): Homolog of NCBI NO: 24418885 NR Description: RIKEN cDNA 5430437E11 [Mus musculus]
  misc_feature (13)..(247): Homolog of NCBI NO: 8745008 NR Description: hypothetical protein P1295.22 [Leishmania major]
  misc_feature (12)..(313): Homolog of NCBI NO: 27764291 NR Description: unnamed protein product [Podospora anserina]
MEGIESGSKQGKRVVVIGGGIAGSLAAKLLQFDAEVTLIDPKEYFEITWASLRSMVEPKFAERTVINHKSYLKQGRLVTSPAINITESDVMTEDGSVIGYDYLVIATGHNDLFPKTRQEKLSHYQSEYEKIKSSGSVLIVGGGPSGVELAAEIAVDFPEKKVTLVHKGPRLLEFVGQKAADKASDWLESKKVEVILNQSVDLSSASDGNKIYRTSGGETIHADIHFLCVGKPLSSQWLNGTVLKDSLDGKGRVMVDEYLRIRGRSNVFAVGDITNIPEMKQGYIAETHANVVVKNIKVMMSGGKKKKMSTYKPGPELAIVSLGRKDSVAQFPFVTVVGCLPGLIKSKDLFVGKTRKARGLNPKLV

SEQ ID NO: 100929 - protein, 311 aa, Arabidopsis thaliana
  peptide (1)..(311): Ceres Seq. ID no. 13606368
  misc_feature (1)..(230): Pfam Name: Pyridine nucleotide-disulphide oxidoreductase Pfam Description: Pyridine nucleotide-disulphide oxidoreductase
  misc_feature (1)..(311): Homolog of NCBI NO: 22326972 NR Description: pyridine nucleotide-disulphide oxidoreductase [Arabidopsis thaliana] >gi|13374873|emb|CAC34507.1| putative
  misc_feature (1)..(311): Homolog of NCBI NO: 26450665 NR Description: unknown protein [Arabidopsis thaliana]
  misc_feature (1)..(311): Homolog of NCBI NO: 15229901 NR Description: pyridine nucleotide-disulphide oxidoreductase
  misc_feature (1)..(308): Homolog of NCBI NO: 34581771 NR Description: pyridine nucleotide-disulphide oxidoreductase
  misc_feature (103)..(307): Homolog of NCBI NO: 40641605 NR Description: putative pyridine nucleotide-disulphide
  misc_feature (1)..(308): Homolog of NCBI NO: 14318424 NR Description: apoptosis-inducing factor (AIF)-homologous
  misc_feature (1)..(308): Homolog of NCBI NO: 30017355 NR Description: RIKEN cDNA 5430437E11 [Mus musculus]
  misc_feature (1)..(259): Homolog of NCBI NO: 24418885 NR Description: RIKEN cDNA 5430437E11 [Mus musculus]
  misc_feature (1)..(193): Homolog of NCBI NO: 8745008 NR Description: hypothetical protein P1295.22 [Leishmania major]
  misc_feature (1)..(259): Homolog of NCBI NO: 27764291 NR Description: unnamed protein product [Podospora anserina]
MVEPKFAERTVINHKSYLKQGRLVTSPAINITESDVMTEDGSVIGYDYLVIATGHNDLFPKTRQEKLSHYQSEYEKIKSSGSVLIVGGGPSGVELAAEIAVDFPEKKVTLVHKGPRLLEFVGQKAADKASDWLESKKVEVILNQSVDLSSASDGNKIYRTSGGETIHADIHFLCVGKPLSSQWLNGTVLKDSLDGKGRVMVDEYLRIRGRSNVFAVGDITNIPEMKQGYIAETHANVVVKNIKVMMSGGKKKKMSTYKPGPELAIVSLGRKDSVAQFPFVTVVGCLPGLIKSKDLFVGKTRKARGLNPKLV

SEQ ID NO: 100930 - protein, 275 aa, Arabidopsis thaliana
  peptide (1)..(275): Ceres Seq. ID no. 13606369
  misc_feature (1)..(194): Pfam Name: Pyridine nucleotide-disulphide oxidoreductase Pfam Description: Pyridine nucleotide-disulphide oxidoreductase
  misc_feature (1)..(275): Homolog of NCBI NO: 22326972 NR Description: pyridine nucleotide-disulphide oxidoreductase [Arabidopsis thaliana] >gi|13374873|emb|CAC34507.1| putative
  misc_feature (1)..(275): Homolog of NCBI NO: 26450665 NR Description: unknown protein [Arabidopsis thaliana]
  misc_feature (1)..(275): Homolog of NCBI NO: 15229901 NR Description: pyridine nucleotide-disulphide oxidoreductase
  misc_feature (1)..(272): Homolog of NCBI NO: 34581771 NR Description: pyridine nucleotide-disulphide oxidoreductase
  misc_feature (67)..(271): Homolog of NCBI NO: 40641605 NR Description: putative pyridine nucleotide-disulphide
  misc_feature (1)..(272): Homolog of NCBI NO: 14318424 NR Description: apoptosis-inducing factor (AIF)-homologous
  misc_feature (1)..(272): Homolog of NCBI NO: 30017355 NR Description: RIKEN cDNA 5430437E11 [Mus musculus]
  misc_feature (1)..(223): Homolog of NCBI NO: 24418885 NR Description: RIKEN cDNA 5430437E11 [Mus musculus]
  misc_feature (1)..(157): Homolog of NCBI NO: 8745008 NR Description: hypothetical protein P1295.22 [Leishmania major]
  misc_feature (1)..(223): Homolog of NCBI NO: 27764291 NR Description: unnamed protein product [Podospora anserina]
MTEDGSVIGYDYLVIATGHNDLFPKTRQEKLSHYQSEYEKIKSSGSVLIVGGGPSGVELAAEIAVDFPEKKVTLVHKGPRLLEFVGQKAADKASDWLESKKVEVILNQSVDLSSASDGNKIYRTSGGETIHADIHFLCVGKPLSSQWLNGTVLKDSLDGKGRVMVDEYLRIRGRSNVFAVGDITNIPEMKQGYIAETHANVVVKNIKVMMSGGKKKKMSTYKPGPELAIVSLGRKDSVAQFPFVTVVGCLPGLIKSKDLFVGKTRKARGLNPKLV

SEQ ID NO: 100931 - DNA, 1016 bp, Arabidopsis thaliana
  misc_feature (1)..(1016): Ceres Seq. ID no. 13606386
  misc_feature: MA Experiment ID: 20000173 Result: Down-regulated in Transcription
  misc_feature: MA Experiment 20000173 PARAMETER Experiment Name: At_42deg_Heat_P Parameter: Age (day) Value: 14
  misc_feature: MA Experiment 20000173 PARAMETER Experiment Name: At_42deg_Heat_P Parameter: Organism Value: A. thaliana
  misc_feature: MA Experiment 20000173 PARAMETER Experiment Name: At_42deg_Heat_P Parameter: Plant Line Value: WS
  misc_feature: MA Experiment 20000173 PARAMETER Experiment Name: At_42deg_Heat_P Parameter: Temperature (deg C) Value: 42 vs. 22
  misc_feature: MA Experiment 20000173 PARAMETER Experiment Name: At_42deg_Heat_P Parameter: Timepoint (hr) Value: 6
  misc_feature: MA Experiment 20000173 PARAMETER Experiment Name: At_42deg_Heat_P Parameter: Tissue Value: Aerial
  misc_feature: MA Experiment ID: 20000182 Result: Up-regulated in Transcription
  misc_feature: MA Experiment 20000182 PARAMETER Experiment Name: At_2mM_SA_P Parameter: Age (day) Value: 14
  misc_feature: MA Experiment 20000182 PARAMETER Experiment Name: At_2mM_SA_P Parameter: Organism Value: A. thaliana
  misc_feature: MA Experiment 20000182 PARAMETER Experiment Name: At_2mM_SA_P Parameter: Plant Line Value: WS
  misc_feature: MA Experiment 20000182 PARAMETER Experiment Name: At_2mM_SA_P Parameter: Timepoint (hr) Value: 6
  misc_feature: MA Experiment 20000182 PARAMETER Experiment Name: At_2mM_SA_P Parameter: Tissue Value: Aerial
  misc_feature: MA Experiment 20000182 PARAMETER Experiment Name: At_2mM_SA_P Parameter: Treatment Value: 2mM SA vs. No Treatment
  misc_feature: MA Experiment ID: 20000265 Result: Down-regulated in Transcription
  misc_feature: MA Experiment 20000265 PARAMETER Experiment Name: At_Open_Flower_P Parameter: Age (day) Value: 21
  misc_feature: MA Experiment 20000265 PARAMETER Experiment Name: At_Open_Flower_P Parameter: Plant Line Value: WS
  misc_feature: MA Experiment 20000265 PARAMETER Experiment Name: At_Open_Flower_P Parameter: Tissue Value: Closed Flower vs. Whole Plant
  misc_feature: MA Experiment ID: 20000451 Result: Up-regulated in Transcription
  misc_feature: MA Experiment 20000451 PARAMETER Experiment Name: At_CS6879_Shoots-Roots_P Parameter: Age (day) Value: 14
  misc_feature: MA Experiment 20000451 PARAMETER Experiment Name: At_CS6879_Shoots-Roots_P Parameter: Organism Value: A. thaliana
  misc_feature: MA Experiment 20000451 PARAMETER Experiment Name: At_CS6879_Shoots-Roots_P Parameter: Plant Line Value: CS6879 vs. WS
  misc_feature: MA Experiment 20000451 PARAMETER Experiment Name: At_CS6879_Shoots-Roots_P Parameter: Tissue Value: Roots
  misc_feature: MA Experiment ID: 20000527 Result: Down-regulated in Transcription
  misc_feature: MA Experiment 20000527 PARAMETER Experiment Name: At_10percent_PEG_P Parameter: Age (day) Value: 20
  misc_feature: MA Experiment 20000527 PARAMETER Experiment Name: At_10percent_PEG_P Parameter: Organism Value: A. thaliana
  misc_feature: MA Experiment 20000527 PARAMETER Experiment Name: At_10percent_PEG_P Parameter: Plant Line Value: WS
  misc_feature: MA Experiment 20000527 PARAMETER Experiment Name: At_10percent_PEG_P Parameter: Timepoint (day) Value: 20
  misc_feature: MA Experiment 20000527 PARAMETER Experiment Name: At_10percent_PEG_P Parameter: Tissue Value: Whole Plant
  misc_feature: MA Experiment 20000527 PARAMETER Experiment Name: At_10percent_PEG_P Parameter: Treatment Value: 10percent PEG vs. No Treatment
  misc_feature: MA Experiment ID: 20001554 Result: Down-regulated in Transcription
  misc_feature: MA Experiment 20001554 PARAMETER Experiment Name: At_Drought_Soil_Dry_P Parameter: Age (day) Value: 21
  misc_feature: MA Experiment 20001554 PARAMETER Experiment Name: At_Drought_Soil_Dry_P Parameter: Organism Value: A. thaliana
  misc_feature: MA Experiment 20001554 PARAMETER Experiment Name: At_Drought_Soil_Dry_P Parameter: Plant Line Value: WS
  misc_feature: MA Experiment 20001554 PARAMETER Experiment Name: At_Drought_Soil_Dry_P Parameter: Post Timepoint (hr) Value: None
  misc_feature: MA Experiment 20001554 PARAMETER Experiment Name: At_Drought_Soil_Dry_P Parameter: Post-Treatment Value: None
  misc_feature: MA Experiment 20001554 PARAMETER Experiment Name: At_Drought_Soil_Dry_P Parameter: Timepoint (day) Value: 7
  misc_feature: MA Experiment 20001554 PARAMETER Experiment Name: At_Drought_Soil_Dry_P Parameter: Treatment Value: Drought vs. No Drought
  misc_feature: MA Experiment ID: 20001555 Result: Down-regulated in Transcription
  misc_feature: MA Experiment 20001555 PARAMETER Experiment Name: At_Drought_Soil_Dry_P Parameter: Age (day) Value: 24
  misc_feature: MA Experiment 20001555 PARAMETER Experiment Name: At_Drought_Soil_Dry_P Parameter: Organism Value: A. thaliana
  misc_feature: MA Experiment 20001555 PARAMETER Experiment Name: At_Drought_Soil_Dry_P Parameter: Plant Line Value: WS
  misc_feature: MA Experiment 20001555 PARAMETER Experiment Name: At_Drought_Soil_Dry_P Parameter: Post Timepoint (hr) Value: None
  misc_feature: MA Experiment 20001555 PARAMETER Experiment Name: At_Drought_Soil_Dry_P Parameter: Post-Treatment Value: None
  misc_feature: MA Experiment 20001555 PARAMETER Experiment Name: At_Drought_Soil_Dry_P Parameter: Timepoint (day) Value: 10
  misc_feature: MA Experiment 20001555 PARAMETER Experiment Name: At_Drought_Soil_Dry_P Parameter: Treatment Value: Drought vs. No Drought
  misc_feature: MA Experiment ID: 20001557 Result: Down-regulated in Transcription
  misc_feature: MA Experiment 20001557 PARAMETER Experiment Name: At_Drought_Soil_Dry_P Parameter: Age (day) Value: 27
  misc_feature: MA Experiment 20001557 PARAMETER Experiment Name: At_Drought_Soil_Dry_P Parameter: Organism Value: A. thaliana
  misc_feature: MA Experiment 20001557 PARAMETER Experiment Name: At_Drought_Soil_Dry_P Parameter: Plant Line Value: WS
  misc_feature: MA Experiment 20001557 PARAMETER Experiment Name: At_Drought_Soil_Dry_P Parameter: Post Timepoint (hr) Value: 3
  misc_feature: MA Experiment 20001557 PARAMETER Experiment Name: At_Drought_Soil_Dry_P Parameter: Post-Treatment Value: Re-Water vs. No Drought
  misc_feature: MA Experiment 20001557 PARAMETER Experiment Name: At_Drought_Soil_Dry_P Parameter: Timepoint (day) Value: 13
  misc_feature: MA Experiment 20001557 PARAMETER Experiment Name: At_Drought_Soil_Dry_P Parameter: Treatment Value: Drought vs. No Drought
  misc_feature: MA Experiment ID: 20001757 Result: Up-regulated in Transcription
  misc_feature: MA Experiment 20001757 PARAMETER Experiment Name: At_50mM_NH4NO3_L-to-H_P Parameter: Timepoint (hr) Value: 6
  misc_feature: MA Experiment 20001757 PARAMETER Experiment Name: At_50mM_NH4NO3_L-to-H_P Parameter: Tissue Value: Leaf
  misc_feature: MA Experiment 20001757 PARAMETER Experiment Name: At_50mM_NH4NO3_L-to-H_P Parameter: Treatment Value: 50mM NH4NO3 vs 100mM Mannitol
  misc_feature: MA Experiment ID: 20001761 Result: Up-regulated in Transcription
  misc_feature: MA Experiment 20001761 PARAMETER Experiment Name: At_50mM_NH4NO3_L-to-H_P Parameter: Timepoint (hr) Value: 4
  misc_feature: MA Experiment 20001761 PARAMETER Experiment Name: At_50mM_NH4NO3_L-to-H_P Parameter: Tissue Value: Siliques
  misc_feature: MA Experiment 20001761 PARAMETER Experiment Name: At_50mM_NH4NO3_L-to-H_P Parameter: Treatment Value: 50mM NH4NO3 vs 100mM Mannitol
atagcacagagaagagacttgagaaaaagaaaacaaacaagaaacacatacacacacacacaagttcactatactctatggaaatgaactccccacacgaaaaggcggtgcaagctatccgttatggccatagctgcgccatgcggttgaagaggcggctcaaccatccaatggctgatggtggaccgctttcaagttatgatcttgctaaatcgatcgttgaaagtttttccaatgccatttcaatcttatctgctaaaccagaaaccgaagatgatcagttttctgatttatcttctagggattcttctcctcctccacaggggagcccctccaagaaaagaaagattgatagtacaaattcaagtgagaattggagggacgattcaccggatccgatttactacgacgggtatctttggaggaaatatggtcaaaagagtataaaaaaatctaatcaccaaaggagttactatagatgttcttacaacaaagatcataactgcgaagcaagaaagcatgaacaaaagatcaaagacaatcctccggtttaccgaaccacttactttggccaccacacttgcaaaaccgaacataatctagatgccatttttattgccggacaagatcccctagatgactttaaaagtacccaaatgatccgattcggaaaagatcaggatcaggagaaggaaagccgctcgaacggtttctccttatcggttaagcatgaagaagatatcatcaaagagcaagctatagatcagtaccgtgagataaccagtaatgaccaagattgtcaagatgttatagaagaatatctatcatcaccatcaggctcttatcctccttcatcgtcatctggcagtgaaagtgctgactttaattctgatttgttatttgacaacccagactcgtgggatcgttatgatcagttttacttttgattgcactagatttttcagctaaaactatttaataatgttttcctttttatgagattgtatatatttgag

SEQ ID NO: 100932 - protein, 314 aa, Arabidopsis thaliana
  peptide (1)..(314): Ceres Seq. ID no. 13606387
  misc_feature (26)..(314): Homolog of NCBI NO: 30688540 NR Description: WRKY family transcription factor [Arabidopsis >gi|29839548|sp|Q8GWF1|WR38_ARATH Probable WRKY transcription
  misc_feature (28)..(314): Homolog of NCBI NO: 9758663 NR Description: contains similarity to DNA-binding [Arabidopsis thaliana] >gi|17064162|gb|AAL35288.1|AF442395_1 WRKY
  misc_feature (28)..(251): Homolog of NCBI NO: 30679452 NR Description: WRKY family transcription factor [Arabidopsis >gi|29839652|sp|Q9LZV6|WR62_ARATH Probable WRKY transcription
  misc_feature (22)..(251): Homolog of NCBI NO: 13506735 NR Description: WRKY DNA-binding protein 62 [Arabidopsis thaliana]
  misc_feature (36)..(251): Homolog of NCBI NO: 11358138 NR Description: hypothetical protein T20L15.170 - Arabidopsis >gi|7329663|emb|CAB82760.1| putative protein [Arabidopsis
  misc_feature (26)..(195): Homolog of NCBI NO: 15219706 NR Description: expressed protein [Arabidopsis thaliana]
  misc_feature (33)..(268): Homolog of NCBI NO: 15219685 NR Description: WRKY family transcription factor [Arabidopsis >gi|29839608|sp|Q9C557|WR64_ARATH Probable WRKY transcription
  misc_feature (26)..(286): Homolog of NCBI NO: 18408541 NR Description: WRKY family transcription factor [Arabidopsis >gi|29839601|sp|Q93WV7|WR67_ARATH Probable WRKY transcription
  misc_feature (26)..(286): Homolog of NCBI NO: 25404630 NR Description: probable wrky-type DNA binding protein F28G11.3
  misc_feature (92)..(195): Homolog of NCBI NO: 15220174 NR Description: WRKY family transcription factor [Arabidopsis >gi|29839654|sp|Q9M8M6|WR66_ARATH Probable WRKY transcription
STEKRLEKKKTNKKHIHTHTSSLYSMEMNSPHEKAVQAIRYGHSCAMRLKRRLNHPMADGGPLSSYDLAKSIVESFSNAISILSAKPETEDDQFSDLSSRDSSPPPQGSPSKKRKIDSTNSSENWRDDSPDPIYYDGYLWRKYGQKSIKKSNHQRSYYRCSYNKDHNCEARKHEQKIKDNPPVYRTTYFGHHTCKTEHNLDAIFIAGQDPLDDFKSTQMIRFGKDQDQEKESRSNGFSLSVKHEEDIIKEQAIDQYREITSNDQDCQDVIEEYLSSPSGSYPPSSSSGSESADFNSDLLFDNPDSWDRYDQFYF

SEQ ID NO: 100933 - protein, 289 aa, Arabidopsis thaliana
  peptide (1)..(289): Ceres Seq. ID no. 13606388
  misc_feature (1)..(289): Homolog of NCBI NO: 30688540 NR Description: WRKY family transcription factor [Arabidopsis >gi|29839548|sp|Q8GWF1|WR38_ARATH Probable WRKY transcription
  misc_feature (3)..(289): Homolog of NCBI NO: 9758663 NR Description: contains similarity to DNA-binding [Arabidopsis thaliana] >gi|17064162|gb|AAL35288.1|AF442395_1 WRKY
  misc_feature (3)..(226): Homolog of NCBI NO: 30679452 NR Description: WRKY family transcription factor [Arabidopsis >gi|29839652|sp|Q9LZV6|WR62_ARATH Probable WRKY transcription
  misc_feature (1)..(226): Homolog of NCBI NO: 13506735 NR Description: WRKY DNA-binding protein 62 [Arabidopsis thaliana]
  misc_feature (11)..(226): Homolog of NCBI NO: 11358138 NR Description: hypothetical protein T20L15.170 - Arabidopsis >gi|7329663|emb|CAB82760.1| putative protein [Arabidopsis
  misc_feature (1)..(170): Homolog of NCBI NO: 15219706 NR Description: expressed protein [Arabidopsis thaliana]
  misc_feature (8)..(243): Homolog of NCBI NO: 15219685 NR Description: WRKY family transcription factor [Arabidopsis >gi|29839608|sp|Q9C557|WR64_ARATH Probable WRKY transcription
  misc_feature (1)..(261): Homolog of NCBI NO: 18408541 NR Description: WRKY family transcription factor [Arabidopsis >gi|29839601|sp|Q93WV7|WR67_ARATH Probable WRKY transcription
  misc_feature (1)..(261): Homolog of NCBI NO: 25404630 NR Description: probable wrky-type DNA binding protein F28G11.3
  misc_feature (67)..(170): Homolog of NCBI NO: 15220174 NR Description: WRKY family transcription factor [Arabidopsis >gi|29839654|sp|Q9M8M6|WR66_ARATH Probable WRKY transcription
MEMNSPHEKAVQAIRYGHSCAMRLKRRLNHPMADGGPLSSYDLAKSIVESFSNAISILSAKPETEDDQFSDLSSRDSSPPPQGSPSKKRKIDSTNSSENWRDDSPDPIYYDGYLWRKYGQKSIKKSNHQRSYYRCSYNKDHNCEARKHEQKIKDNPPVYRTTYFGHHTCKTEHNLDAIFIAGQDPLDDFKSTQMIRFGKDQDQEKESRSNGFSLSVKHEEDIIKEQAIDQYREITSNDQDCQDVIEEYLSSPSGSYPPSSSSGSESADFNSDLLFDNPDSWDRYDQFYF

SEQ ID NO: 100934 - protein, 287 aa, Arabidopsis thaliana
  peptide (1)..(287): Ceres Seq. ID no. 13606389
  misc_feature (1)..(287): Homolog of NCBI NO: 30688540 NR Description: WRKY family transcription factor [Arabidopsis >gi|29839548|sp|Q8GWF1|WR38_ARATH Probable WRKY transcription
  misc_feature (1)..(287): Homolog of NCBI NO: 9758663 NR Description: contains similarity to DNA-binding [Arabidopsis thaliana] >gi|17064162|gb|AAL35288.1|AF442395_1 WRKY
  misc_feature (1)..(224): Homolog of NCBI NO: 30679452 NR Description: WRKY family transcription factor [Arabidopsis >gi|29839652|sp|Q9LZV6|WR62_ARATH Probable WRKY transcription
  misc_feature (1)..(224): Homolog of NCBI NO: 13506735 NR Description: WRKY DNA-binding protein 62 [Arabidopsis thaliana]
  misc_feature (9)..(224): Homolog of NCBI NO: 11358138 NR Description: hypothetical protein T20L15.170 - Arabidopsis >gi|7329663|emb|CAB82760.1| putative protein [Arabidopsis
  misc_feature (1)..(168): Homolog of NCBI NO: 15219706 NR Description: expressed protein [Arabidopsis thaliana]
  misc_feature (6)..(241): Homolog of NCBI NO: 15219685 NR Description: WRKY family transcription factor [Arabidopsis >gi|29839608|sp|Q9C557|WR64_ARATH Probable WRKY transcription
  misc_feature (1)..(259): Homolog of NCBI NO: 18408541 NR Description: WRKY family transcription factor [Arabidopsis >gi|29839601|sp|Q93WV7|WR67_ARATH Probable WRKY transcription
  misc_feature (1)..(259): Homolog of NCBI NO: 25404630 NR Description: probable wrky-type DNA binding protein F28G11.3
  misc_feature (65)..(168): Homolog of NCBI NO: 15220174 NR Description: WRKY family transcription factor [Arabidopsis >gi|29839654|sp|Q9M8M6|WR66_ARATH Probable WRKY transcription
MNSPHEKAVQAIRYGHSCAMRLKRRLNHPMADGGPLSSYDLAKSIVESFSNAISILSAKPETEDDQFSDLSSRDSSPPPQGSPSKKRKIDSTNSSENWRDDSPDPIYYDGYLWRKYGQKSIKKSNHQRSYYRCSYNKDHNCEARKHEQKIKDNPPVYRTTYFGHHTCKTEHNLDAIFIAGQDPLDDFKSTQMIRFGKDQDQEKESRSNGFSLSVKHEEDIIKEQAIDQYREITSNDQDCQDVIEEYLSSPSGSYPPSSSSGSESADFNSDLLFDNPDSWDRYDQFYF

SEQ ID NO: 100935 - DNA, 2215 bp, Arabidopsis thaliana
  misc_feature (1)..(2215): Ceres Seq. ID no. 13606402
  misc_feature: MA Experiment ID: 20000180 Result: Up-regulated in Transcription
  misc_feature: MA Experiment 20000180 PARAMETER Experiment Name: At_Germinating_Seeds_P Parameter: Age (hr) Value: 24 vs. 0
  misc_feature: MA Experiment 20000180 PARAMETER Experiment Name: At_Germinating_Seeds_P Parameter: Tissue Value: Germinating Seeds
  misc_feature: MA Experiment ID: 20001451 Result: Down-regulated in Transcription
  misc_feature: MA Experiment 20001451 PARAMETER Experiment Name: At_Far-red-induction_P Parameter: Age (day) Value: 7
  misc_feature: MA Experiment 20001451 PARAMETER Experiment Name: At_Far-red-induction_P Parameter: Light Value: Far-red vs. White
  misc_feature: MA Experiment 20001451 PARAMETER Experiment Name: At_Far-red-induction_P Parameter: Organism Value: A. thaliana
  misc_feature: MA Experiment 20001451 PARAMETER Experiment Name: At_Far-red-induction_P Parameter: Plant Line Value: Columbia
  misc_feature: MA Experiment 20001451 PARAMETER Experiment Name: At_Far-red-induction_P Parameter: Timepoint (hr) Value: 24
  misc_feature: MA Experiment 20001451 PARAMETER Experiment Name: At_Far-red-induction_P Parameter: Tissue Value: Whole Plant
agcttcttctactggagaagaggaggagaacacaaatccaattcacactggaaactgttgggtcggatcctgagtgatatttcgagaccgatgatgtggaagaacattgctgggttgtcgaaggcagcggcagcggcaagaacacacggatctcggcggtgcttttccacagcgattcctggtccttgcatcgtccacaagcgtggtgctgatattcttcacgatccatggttcaataaggttgtgtgttttcctttgactgagagagatagattagggatacgaggcttgcttcctcctcgtgttatgacctgtgtacagcaatgtgatcgtttcattgagtcgtttcgttcgctagagaacaacacaaaaggagagcctgaaaacgttgttgcattagctaaatggaggatgttgaatagattgcatgaccgtaatgagactttgtactaccgagttcttattgataacatcaaagattttgcccccattatatacactcctacggttggacttgtttgtcagaactattctggtttgtatagaagaccaagaggaatgtacttcagcgccaaagacaaaggagagatgatgtctatgatttataactggcctgctccgcaggtagatatgattgtcatcactgatggtagccgtattttgggcttaggagaccttggagtacagggaattgggattcctattggaaagctcgacatgtatgtcgctgctgcaggaatcaatccacagagagttttgccaattatgttggatgtaggcacaaataatgaaaagctcctacagaatgatctctatttaggagtcagacaacctaggttggaaggagaggagtaccttgagattattgatgaatttatggaagctgcatttacacgttggccaaaggccgtcgtacagttcgaagatttccaagcgaaatgggctttcggaacattggaaagatatcggaagaaattttgcatgttcaatgatgatgtccagggaactgctggtgttgcactggctggactattgggaactgtaagagctcaaggtcggccgatatccgactttgtgaaccaaaagattgttgtggtgggagctggaagtgctgggcttggtgtaactaagatggcagtacaggcagttgccagaatggcaggtatcagcgagagtgaagcaacaaaaaacttttacctgatagataaagatggtcttgtcaccacggagaggacaaaacttgacccaggagctgtactttttgccaaaaatccagctgagatacgcgagggagcaagtatcgttgaagtggtgaagaaagtgaggccacatgttcttcttggtttatctggagttggtggtatctttaatgaagaagttctcaaggcgatgcgagaatctgactcatgcaagcctgccatttttgccatgtcgaatcccactttgaatgccgagtgcactgctgctgatgctttcaaacacgccggaggaaacattgtctttgcaagtggaagtccatttgagaacgttgaacttgagaatggtaaagtaggacatgtgaatcaggctaacaacatgtatttattcccggggatcgggctagggactcttctctctggtgcacgtatcgtaactgatggaatgctacaagcagcttctgaatgccttgcgtcctacatgaccgatgaagaagtccaaaaaggcatcctttacccttcaatcaacaacatccgacacataacagctgaagtcggggcagctgttctacgagctgcggtgactgatgacattgcagaaggacatggtgatgttggtcccaaagatctcagccacatgtctaaggaggatacagtgaattacattacacgcaacatgtggttccctgtttacagccctctcgttcacgagaaatagacaacaactctatataactcttctcaggtttcatagaaagccaaaagacaaaaaatcttcgcttcatcttttatttgtgatcaacattctttttttcttcaaaatgtgatatgttttaagaaaaacaatgccaaaaagagggcttaagaacaagaacagggttagttctaggtcaacctgtacttttccttttttttttttggacatttttccaacttcttacgattatttctgatgataatgattacaactttatatactgttttggcaataataagccaataatgatatctttcttctg

SEQ ID NO: 100936 - protein, 637 aa, Arabidopsis thaliana
  peptide (1)..(637): Ceres Seq. ID no. 13606403
  misc_feature (333)..(593): Pfam Name: Malic enzyme, NAD binding domain Pfam Description: Malic enzyme, NAD binding domain
  misc_feature (42)..(636): Homolog of NCBI NO: 585452 NR Description: NAD-DEPENDENT MALIC ENZYME 59 KDA ISOFORM,
  misc_feature (58)..(554): Homolog of NCBI NO: 37535816 NR Description: putative mitochondrial NAD+-dependent malic
  misc_feature (53)..(637): Homolog of NCBI NO: 34393731 NR Description: putative malate dehydrogenase [Oryza sativa
  misc_feature (41)..(637): Homolog of NCBI NO: 585451 NR Description: NAD-DEPENDENT MALIC ENZYME 62 KDA ISOFORM,
  misc_feature (53)..(636): Homolog of NCBI NO: 15225438 NR Description: malate oxidoreductase (malic enzyme), putative thaliana] >gi|25283678|pir||E84508 malate oxidoreductase (malic
  misc_feature (51)..(637): Homolog of NCBI NO: 585450 NR Description: NAD-DEPENDENT MALIC ENZYME 65 KDA ISOFORM,
  misc_feature (338)..(637): Homolog of NCBI NO: 8894554 NR Description: NAD-dependent malic enzyme (malate
  misc_feature (72)..(600): Homolog of NCBI NO: 27381580 NR Description: malic enzyme [Bradyrhizobium japonicum]
  misc_feature (24)..(634): Homolog of NCBI NO: 1698596 NR Description: malic enzyme precursor [Neocallimastix frontalis]
  misc_feature (67)..(619): Homolog of NCBI NO: 126732 NR Description: NAD-DEPENDENT MALIC ENZYME, MITOCHONDRIAL
SFFYWRRGGEHKSNSHWKLLGRILSDISRPMMWKNIAGLSKAAAAARTHGSRRCFSTAIPGPCIVHKRGADILHDPWFNKVVCFPLTERDRLGIRGLLPPRVMTCVQQCDRFIESFRSLENNTKGEPENVVALAKWRMLNRLHDRNETLYYRVLIDNIKDFAPIIYTPTVGLVCQNYSGLYRRPRGMYFSAKDKGEMMSMIYNWPAPQVDMIVITDGSRILGLGDLGVQGIGIPIGKLDMYVAAAGINPQRVLPIMLDVGTNNEKLLQNDLYLGVRQPRLEGEEYLEIIDEFMEAAFTRWPKAVVQFEDFQAKWAFGTLERYRKKFCMFNDDVQGTAGVALAGLLGTVRAQGRPISDFVNQKIVVVGAGSAGLGVTKMAVQAVARMAGISESEATKNFYLIDKDGLVTTERTKLDPGAVLFAKNPAEIREGASIVEVVKKVRPHVLLGLSGVGGIFNEEVLKAMRESDSCKPAIFAMSNPTLNAECTAADAFKHAGGNIVFASGSPFENVELENGKVGHVNQANNMYLFPGIGLGTLLSGARIVTDGMLQAASECLASYMTDEEVQKGILYPSINNIRHITAEVGAAVLRAAVTDDIAEGHGDVGPKDLSHMSKEDTVNYITRNMWFPVYSPLVHEK

SEQ ID NO: 100937 - protein, 607 aa, Arabidopsis thaliana
  peptide (1)..(607): Ceres Seq. ID no. 13606404
  misc_feature (303)..(563): Pfam Name: Malic enzyme, NAD binding domain Pfam Description: Malic enzyme, NAD binding domain
  misc_feature (12)..(606): Homolog of NCBI NO: 585452 NR Description: NAD-DEPENDENT MALIC ENZYME 59 KDA ISOFORM,
  misc_feature (28)..(524): Homolog of NCBI NO: 37535816 NR Description: putative mitochondrial NAD+-dependent malic
  misc_feature (23)..(607): Homolog of NCBI NO: 34393731 NR Description: putative malate dehydrogenase [Oryza sativa
  misc_feature (11)..(607): Homolog of NCBI NO: 585451 NR Description: NAD-DEPENDENT MALIC ENZYME 62 KDA ISOFORM,
  misc_feature (23)..(606): Homolog of NCBI NO: 15225438 NR Description: malate oxidoreductase (malic enzyme), putative thaliana] >gi|25283678|pir||E84508 malate oxidoreductase (malic
  misc_feature (21)..(607): Homolog of NCBI NO: 585450 NR Description: NAD-DEPENDENT MALIC ENZYME 65 KDA ISOFORM,
  misc_feature (308)..(607): Homolog of NCBI NO: 8894554 NR Description: NAD-dependent malic enzyme (malate
  misc_feature (42)..(570): Homolog of NCBI NO: 27381580 NR Description: malic enzyme [Bradyrhizobium japonicum]
  misc_feature (1)..(604): Homolog of NCBI NO: 1698596 NR Description: malic enzyme precursor [Neocallimastix frontalis]
  misc_feature (37)..(589): Homolog of NCBI NO: 126732 NR Description: NAD-DEPENDENT MALIC ENZYME, MITOCHONDRIAL
MMWKNIAGLSKAAAAARTHGSRRCFSTAIPGPCIVHKRGADILHDPWFNKVVCFPLTERDRLGIRGLLPPRVMTCVQQCDRFIESFRSLENNTKGEPENVVALAKWRMLNRLHDRNETLYYRVLIDNIKDFAPIIYTPTVGLVCQNYSGLYRRPRGMYFSAKDKGEMMSMIYNWPAPQVDMIVITDGSRILGLGDLGVQGIGIPIGKLDMYVAAAGINPQRVLPIMLDVGTNNEKLLQNDLYLGVRQPRLEGEEYLEIIDEFMEAAFTRWPKAVVQFEDFQAKWAFGTLERYRKKFCMFNDDVQGTAGVALAGLLGTVRAQGRPISDFVNQKIVVVGAGSAGLGVTKMAVQAVARMAGISESEATKNFYLIDKDGLVTTERTKLDPGAVLFAKNPAEIREGASIVEVVKKVRPHVLLGLSGVGGIFNEEVLKAMRESDSCKPAIFAMSNPTLNAECTAADAFKHAGGNIVFASGSPFENVELENGKVGHVNQANNMYLFPGIGLGTLLSGARIVTDGMLQAASECLASYMTDEEVQKGILYPSINNIRHITAEVGAAVLRAAVTDDIAEGHGDVGPKDLSHMSKEDTVNYITRNMWFPVYSPLVHEK

SEQ ID NO: 100938 - protein, 606 aa, Arabidopsis thaliana
  peptide (1)..(606): Ceres Seq. ID no. 13606405
  misc_feature (302)..(562): Pfam Name: Malic enzyme, NAD binding domain Pfam Description: Malic enzyme, NAD binding domain
  misc_feature (11)..(605): Homolog of NCBI NO: 585452 NR Description: NAD-DEPENDENT MALIC ENZYME 59 KDA ISOFORM,
  misc_feature (27)..(523): Homolog of NCBI NO: 37535816 NR Description: putative mitochondrial NAD+-dependent malic
  misc_feature (22)..(606): Homolog of NCBI NO: 34393731 NR Description: putative malate dehydrogenase [Oryza sativa
  misc_feature (10)..(606): Homolog of NCBI NO: 585451 NR Description: NAD-DEPENDENT MALIC ENZYME 62 KDA ISOFORM,
  misc_feature (22)..(605): Homolog of NCBI NO: 15225438 NR Description: malate oxidoreductase (malic enzyme), putative thaliana] >gi|25283678|pir||E84508 malate oxidoreductase (malic
  misc_feature (20)..(606): Homolog of NCBI NO: 585450 NR Description: NAD-DEPENDENT MALIC ENZYME 65 KDA ISOFORM,
  misc_feature (307)..(606): Homolog of NCBI NO: 8894554 NR Description: NAD-dependent malic enzyme (malate
  misc_feature (41)..(569): Homolog of NCBI NO: 27381580 NR Description: malic enzyme [Bradyrhizobium japonicum]
  misc_feature (1)..(603): Homolog of NCBI NO: 1698596 NR Description: malic enzyme precursor [Neocallimastix frontalis]
  misc_feature (36)..(588): Homolog of NCBI NO: 126732 NR Description: NAD-DEPENDENT MALIC ENZYME, MITOCHONDRIAL
MWKNIAGLSKAAAAARTHGSRRCFSTAIPGPCIVHKRGADILHDPWFNKVVCFPLTERDRLGIRGLLPPRVMTCVQQCDRFIESFRSLENNTKGEPENVVALAKWRMLNRLHDRNETLYYRVLIDNIKDFAPIIYTPTVGLVCQNYSGLYRRPRGMYFSAKDKGEMMSMIYNWPAPQVDMIVITDGSRILGLGDLGVQGIGIPIGKLDMYVAAAGINPQRVLPIMLDVGTNNEKLLQNDLYLGVRQPRLEGEEYLEIIDEFMEAAFTRWPKAVVQFEDFQAKWAFGTLERYRKKFCMFNDDVQGTAGVALAGLLGTVRAQGRPISDFVNQKIVVVGAGSAGLGVTKMAVQAVARMAGISESEATKNFYLIDKDGLVTTERTKLDPGAVLFAKNPAEIREGASIVEVVKKVRPHVLLGLSGVGGIFNEEVLKAMRESDSCKPAIFAMSNPTLNAECTAADAFKHAGGNIVFASGSPFENVELENGKVGHVNQANNMYLFPGIGLGTLLSGARIVTDGMLQAASECLASYMTDEEVQKGILYPSINNIRHITAEVGAAVLRAAVTDDIAEGHGDVGPKDLSHMSKEDTVNYITRNMWFPVYSPLVHEK

SEQ ID NO: 100939 - DNA, 1779 bp, Arabidopsis thaliana
  misc_feature (1)..(1779): Ceres Seq. ID no. 13606418
  misc_feature: MA Experiment ID: 20001904 Result: Down-regulated in Transcription
  misc_feature: MA Experiment 20001904 PARAMETER Experiment Name: At_Drought_Reproduction_P Parameter: Age (day) Value: 37
  misc_feature: MA Experiment 20001904 PARAMETER Experiment Name: At_Drought_Reproduction_P Parameter: Organism Value: A. thaliana
  misc_feature: MA Experiment 20001904 PARAMETER Experiment Name: At_Drought_Reproduction_P Parameter: Plant Line Value: WS
  misc_feature: MA Experiment 20001904 PARAMETER Experiment Name: At_Drought_Reproduction_P Parameter: Timepoint (day) Value: 7
  misc_feature: MA Experiment 20001904 PARAMETER Experiment Name: At_Drought_Reproduction_P Parameter: Tissue Value: Rosettes
  misc_feature: MA Experiment 20001904 PARAMETER Experiment Name: At_Drought_Reproduction_P Parameter: Treatment Value: Drought vs. No Drought
atctttatctatctctctttgtctgcaaatggaagaacatattcaagatcgccgtgaaattgcgttcttacactcaggagaatttctccacggagattctgactcaaaggatcatcaaccgaacgagtctccggtggaacgtcatcacgagtcgtctatcaaagaagttgatttcttcgctgctaaaagtcagccgtttgatcttggtcatgtgagaacaacgacgatcgttggatcatctggttttaatgatggattaggtttggtaaattcatgtcatggaacatcaagcaatgatggcgatgacaaaaccaaaactcaaattagtagactgaagttggagctagagaggcttcacgaggagaatcacaaactgaagcatttattagatgaggtcagtgagagttacaacgacctccaaagaagagttttgttagcaagacaaacacaagtggaaggtcttcatcataaacaacatgaggatgtacctcaagctggttcctcacaagctctagagaacagaagaccaaaggatatgaaccatgaaactccggccaccaccttgaaacgacggtctccagacgacgtggatggtcgtgatatgcaccgaggatcaccaaaaactcctcgaatagaccaaaacaagagtactaatcatgaagaacaacaaaaccctcatgatcaattaccctatagaaaagctagggtttccgttagagctagatctgatgccactacggtaaatgacggatgtcaatggagaaaatacggtcagaaaatggcgaaagggaatccatgtcctcgcgcttattatcgttgcaccatggccgttggatgtcctgtccgtaaacaggtccaacgatgcgcggaggatacaactatcttgacaacaacgtacgaaggaaaccataaccatcctcttcccccgtcagccacagccatggctgcaaccacctccgccgcagcagccatgctcttatcaggctcctcctccagcaacctccaccaaacactctctagcccctccgccacgtcatcatcatccttctaccataacttcccatacacctccacaatcgcaacactctctgcctcagctcctttccccaccataaccttagacctcaccaacccacctcgaccgctacaaccgccaccgcagtttctaagccagtatggtcccgccgcgtttttaccaaacgctaatcaaattaggtctatgaataataataaccagcagttattaatacctaatttgtttggcccacaagccccaccacgtgaaatggtcgattcagttagggctgcgattgcgatggatccgaacttcacggcggcacttgcggccgcgatctcaaacattatcggaggaggtaataacgacaacaataataatactgatattaatgataacaaggttgatgcaaaaagtggagggagtagtaacggagattcgccacagcttcctcagtcttgcaccactttctctacaaactaattttactaccattattatatgttatcttattatatattacacacacatattatacattatgcgtatcttaagttttttttggtgtacattatatatgaatgatatggagatcactgagagagagagagagctattataggtttttttttttacaggtttacacgattttggctatcgtttttttttcttctatgttaagaacgaggggtgtaggttttatttttcctacttcttatgaatcatactctgtatatgtatacatcttaaatatatattatgtt

SEQ ID NO: 100940 - protein, 498 aa, Arabidopsis thaliana
  peptide (1)..(498): Ceres Seq. ID no. 13606419
  misc_feature (247)..(307): Pfam Name: WRKY DNA -binding domain Pfam Description: WRKY DNA -binding domain
  misc_feature (10)..(498): Homolog of NCBI NO: 15234284 NR Description: WRKY family transcription factor [Arabidopsis >gi|20978798|sp|Q9ZSI7|WR47_ARATH Probable WRKY transcription
  misc_feature (247)..(498): Homolog of NCBI NO: 7488096 NR Description: probable DNA-binding protein T15B16.12 -
  misc_feature (10)..(160): Homolog of NCBI NO: 7488096 NR Description: probable DNA-binding protein T15B16.12 -
  misc_feature (79)..(487): Homolog of NCBI NO: 11357339 NR Description: hypothetical protein AT4g22070 - Arabidopsis >gi|2961352|emb|CAA18110.1| putative protein [Arabidopsis >gi|7269052|emb|CAB79162.1| putative protein [Arabidopsis
  misc_feature (218)..(485): Homolog of NCBI NO: 34894308 NR Description: unnamed protein product [Oryza sativa (japonica group)] >gi|8467950|dbj|BAA96574.1| unnamed protein product
  misc_feature (47)..(187): Homolog of NCBI NO: 34894308 NR Description: unnamed protein product [Oryza sativa (japonica group)] >gi|8467950|dbj|BAA96574.1| unnamed protein product
  misc_feature (168)..(474): Homolog of NCBI NO: 15233516 NR Description: WRKY family transcription factor [Arabidopsis >gi|20978795|sp|Q9XEC3|WR42_ARATH Probable WRKY transcription
  misc_feature (115)..(487): Homolog of NCBI NO: 18415833 NR Description: WRKY family transcription factor [Arabidopsis >gi|20978775|sp|Q93WT0|WR31_ARATH Probable WRKY transcription
  misc_feature (94)..(413): Homolog of NCBI NO: 18407554 NR Description: WRKY family transcription factor [Arabidopsis
  misc_feature (204)..(399): Homolog of NCBI NO: 5042446 NR Description: putative WRKY DNA binding protein [Oryza sativa
SLSISLCLQMEEHIQDRREIAFLHSGEFLHGDSDSKDHQPNESPVERHHESSIKEVDFFAAKSQPFDLGHVRTTTIVGSSGFNDGLGLVNSCHGTSSNDGDDKTKTQISRLKLELERLHEENHKLKHLLDEVSESYNDLQRRVLLARQTQVEGLHHKQHEDVPQAGSSQALENRRPKDMNHETPATTLKRRSPDDVDGRDMHRGSPKTPRIDQNKSTNHEEQQNPHDQLPYRKARVSVRARSDATTVNDGCQWRKYGQKMAKGNPCPRAYYRCTMAVGCPVRKQVQRCAEDTTILTTTYEGNHNHPLPPSATAMAATTSAAAAMLLSGSSSSNLHQTLSSPSATSSSSFYHNFPYTSTIATLSASAPFPTITLDLTNPPRPLQPPPQFLSQYGPAAFLPNANQIRSMNNNNQQLLIPNLFGPQAPPREMVDSVRAAIAMDPNFTAALAAAISNIIGGGNNDNNNNTDINDNKVDAKSGGSSNGDSPQLPQSCTTFSTN

SEQ ID NO: 100941 - protein, 489 aa, Arabidopsis thaliana
  peptide (1)..(489): Ceres Seq. ID no. 13606420
  misc_feature (238)..(298): Pfam Name: WRKY DNA -binding domain Pfam Description: WRKY DNA -binding domain
  misc_feature (1)..(489): Homolog of NCBI NO: 15234284 NR Description: WRKY family transcription factor [Arabidopsis >gi|20978798|sp|Q9ZSI7|WR47_ARATH Probable WRKY transcription
  misc_feature (238)..(489): Homolog of NCBI NO: 7488096 NR Description: probable DNA-binding protein T15B16.12 -
  misc_feature (1)..(151): Homolog of NCBI NO: 7488096 NR Description: probable DNA-binding protein T15B16.12 -
  misc_feature (70)..(478): Homolog of NCBI NO: 11357339 NR Description: hypothetical protein AT4g22070 - Arabidopsis >gi|2961352|emb|CAA18110.1| putative protein [Arabidopsis >gi|7269052|emb|CAB79162.1| putative protein [Arabidopsis
  misc_feature (209)..(476): Homolog of NCBI NO: 34894308 NR Description: unnamed protein product [Oryza sativa (japonica group)] >gi|8467950|dbj|BAA96574.1| unnamed protein product
  misc_feature (38)..(178): Homolog of NCBI NO: 34894308 NR Description: unnamed protein product [Oryza sativa (japonica group)] >gi|8467950|dbj|BAA96574.1| unnamed protein product
  misc_feature (159)..(465): Homolog of NCBI NO: 15233516 NR Description: WRKY family transcription factor [Arabidopsis >gi|20978795|sp|Q9XEC3|WR42_ARATH Probable WRKY transcription
  misc_feature (106)..(478): Homolog of NCBI NO: 18415833 NR Description: WRKY family transcription factor [Arabidopsis >gi|20978775|sp|Q93WT0|WR31_ARATH Probable WRKY transcription
  misc_feature (85)..(404): Homolog of NCBI NO: 18407554 NR Description: WRKY family transcription factor [Arabidopsis
  misc_feature (195)..(390): Homolog of NCBI NO: 5042446 NR Description: putative WRKY DNA binding protein [Oryza sativa
MEEHIQDRREIAFLHSGEFLHGDSDSKDHQPNESPVERHHESSIKEVDFFAAKSQPFDLGHVRTTTIVGSSGFNDGLGLVNSCHGTSSNDGDDKTKTQISRLKLELERLHEENHKLKHLLDEVSESYNDLQRRVLLARQTQVEGLHHKQHEDVPQAGSSQALENRRPKDMNHETPATTLKRRSPDDVDGRDMHRGSPKTPRIDQNKSTNHEEQQNPHDQLPYRKARVSVRARSDATTVNDGCQWRKYGQKMAKGNPCPRAYYRCTMAVGCPVRKQVQRCAEDTTILTTTYEGNHNHPLPPSATAMAATTSAAAAMLLSGSSSSNLHQTLSSPSATSSSSFYHNFPYTSTIATLSASAPFPTITLDLTNPPRPLQPPPQFLSQYGPAAFLPNANQIRSMNNNNQQLLIPNLFGPQAPPREMVDSVRAAIAMDPNFTAALAAAISNIIGGGNNDNNNNTDINDNKVDAKSGGSSNGDSPQLPQSCTTFSTN

SEQ ID NO: 100942 - protein, 320 aa, Arabidopsis thaliana
  peptide (1)..(320): Ceres Seq. ID no. 13606421
  misc_feature (69)..(129): Pfam Name: WRKY DNA -binding domain Pfam Description: WRKY DNA -binding domain
  misc_feature (1)..(320): Homolog of NCBI NO: 15234284 NR Description: WRKY family transcription factor [Arabidopsis >gi|20978798|sp|Q9ZSI7|WR47_ARATH Probable WRKY transcription
  misc_feature (69)..(320): Homolog of NCBI NO: 7488096 NR Description: probable DNA-binding protein T15B16.12 -
  misc_feature (1)..(309): Homolog of NCBI NO: 11357339 NR Description: hypothetical protein AT4g22070 - Arabidopsis >gi|2961352|emb|CAA18110.1| putative protein [Arabidopsis >gi|7269052|emb|CAB79162.1| putative protein [Arabidopsis
  misc_feature (40)..(307): Homolog of NCBI NO: 34894308 NR Description: unnamed protein product [Oryza sativa (japonica group)] >gi|8467950|dbj|BAA96574.1| unnamed protein product
  misc_feature (1)..(296): Homolog of NCBI NO: 15233516 NR Description: WRKY family transcription factor [Arabidopsis >gi|20978795|sp|Q9XEC3|WR42_ARATH Probable WRKY transcription
  misc_feature (1)..(309): Homolog of NCBI NO: 18415833 NR Description: WRKY family transcription factor [Arabidopsis >gi|20978775|sp|Q93WT0|WR31_ARATH Probable WRKY transcription
  misc_feature (1)..(235): Homolog of NCBI NO: 18407554 NR Description: WRKY family transcription factor [Arabidopsis
  misc_feature (26)..(221): Homolog of NCBI NO: 5042446 NR Description: putative WRKY DNA binding protein [Oryza sativa
  misc_feature (26)..(221): Homolog of NCBI NO: 34904618 NR Description: putative WRKY DNA binding protein [Oryza sativa
  misc_feature (35)..(258): Homolog of NCBI NO: 30686070 NR Description: WRKY family transcription factor [Arabidopsis >gi|20978774|sp|Q8VWV6|WR61_ARATH Probable WRKY transcription
MNHETPATTLKRRSPDDVDGRDMHRGSPKTPRIDQNKSTNHEEQQNPHDQLPYRKARVSVRARSDATTVNDGCQWRKYGQKMAKGNPCPRAYYRCTMAVGCPVRKQVQRCAEDTTILTTTYEGNHNHPLPPSATAMAATTSAAAAMLLSGSSSSNLHQTLSSPSATSSSSFYHNFPYTSTIATLSASAPFPTITLDLTNPPRPLQPPPQFLSQYGPAAFLPNANQIRSMNNNNQQLLIPNLFGPQAPPREMVDSVRAAIAMDPNFTAALAAAISNIIGGGNNDNNNNTDINDNKVDAKSGGSSNGDSPQLPQSCTTFSTN

SEQ ID NO: 100943 - DNA, 2859 bp, Arabidopsis thaliana
  misc_feature (1)..(2859): Ceres Seq. ID no. 13606442
  misc_feature: MA Experiment ID: 20000173 Result: Down-regulated in Transcription
  misc_feature: MA Experiment 20000173 PARAMETER Experiment Name: At_42deg_Heat_P Parameter: Age (day) Value: 14
  misc_feature: MA Experiment 20000173 PARAMETER Experiment Name: At_42deg_Heat_P Parameter: Organism Value: A. thaliana
  misc_feature: MA Experiment 20000173 PARAMETER Experiment Name: At_42deg_Heat_P Parameter: Plant Line Value: WS
  misc_feature: MA Experiment 20000173 PARAMETER Experiment Name: At_42deg_Heat_P Parameter: Temperature (deg C) Value: 42 vs. 22
  misc_feature: MA Experiment 20000173 PARAMETER Experiment Name: At_42deg_Heat_P Parameter: Timepoint (hr) Value: 6
  misc_feature: MA Experiment 20000173 PARAMETER Experiment Name: At_42deg_Heat_P Parameter: Tissue Value: Aerial
  misc_feature: MA Experiment ID: 20000213 Result: Down-regulated in Transcription
  misc_feature: MA Experiment 20000213 PARAMETER Experiment Name: At_4deg_Cold_P Parameter: Timepoint (hr) Value: 2
  misc_feature: MA Experiment ID: 20000227 Result: Down-regulated in Transcription
  misc_feature: MA Experiment 20000227 PARAMETER Experiment Name: At_Root-Tips-vs-Tops_P Parameter: Tissue Value: Root Tips vs. Root Tops
  misc_feature: MA Experiment ID: 20000234 Result: Down-regulated in Transcription
  misc_feature: MA Experiment 20000234 PARAMETER Experiment Name: At_Siliques_P Parameter: Age (day) Value: 21
  misc_feature: MA Experiment 20000234 PARAMETER Experiment Name: At_Siliques_P Parameter: Organism Value: A. thaliana
  misc_feature: MA Experiment 20000234 PARAMETER Experiment Name: At_Siliques_P Parameter: Plant Line Value: WS
  misc_feature: MA Experiment 20000234 PARAMETER Experiment Name: At_Siliques_P Parameter: Tissue Value: Less Than 5mm Siliques vs. Whole Plant
  misc_feature: MA Experiment ID: 20000267 Result: Up-regulated in Transcription
  misc_feature: MA Experiment 20000267 PARAMETER Experiment Name: At_Drought_P Parameter: Age (day) Value: 7
  misc_feature: MA Experiment 20000267 PARAMETER Experiment Name: At_Drought_P Parameter: Organism Value: A. thaliana
  misc_feature: MA Experiment 20000267 PARAMETER Experiment Name: At_Drought_P Parameter: Plant Line Value: WS
  misc_feature: MA Experiment 20000267 PARAMETER Experiment Name: At_Drought_P Parameter: Timepoint (hr) Value: 6
  misc_feature: MA Experiment 20000267 PARAMETER Experiment Name: At_Drought_P Parameter: Tissue Value: Whole Plant
  misc_feature: MA Experiment 20000267 PARAMETER Experiment Name: At_Drought_P Parameter: Treatment Value: Drought vs. No Drought
  misc_feature: MA Experiment ID: 20000436 Result: Up-regulated in Transcription
  misc_feature: MA Experiment 20000436 PARAMETER Experiment Name: At_Drought_P Parameter: Age (day) Value: 7
  misc_feature: MA Experiment 20000436 PARAMETER Experiment Name: At_Drought_P Parameter: Organism Value: A. thaliana
  misc_feature: MA Experiment 20000436 PARAMETER Experiment Name: At_Drought_P Parameter: Plant Line Value: WS
  misc_feature: MA Experiment 20000436 PARAMETER Experiment Name: At_Drought_P Parameter: Timepoint (hr) Value: 12
  misc_feature: MA Experiment 20000436 PARAMETER Experiment Name: At_Drought_P Parameter: Tissue Value: Whole Plant
  misc_feature: MA Experiment 20000436 PARAMETER Experiment Name: At_Drought_P Parameter: Treatment Value: Drought vs. No Drought
  misc_feature: MA Experiment ID: 20000437 Result: Up-regulated in Transcription
  misc_feature: MA Experiment 20000437 PARAMETER Experiment Name: At_Drought_P Parameter: Age (day) Value: 8
  misc_feature: MA Experiment 20000437 PARAMETER Experiment Name: At_Drought_P Parameter: Organism Value: A. thaliana
  misc_feature: MA Experiment 20000437 PARAMETER Experiment Name: At_Drought_P Parameter: Plant Line Value: WS
  misc_feature: MA Experiment 20000437 PARAMETER Experiment Name: At_Drought_P Parameter: Timepoint (hr) Value: 24
  misc_feature: MA Experiment 20000437 PARAMETER Experiment Name: At_Drought_P Parameter: Tissue Value: Whole Plant
  misc_feature: MA Experiment 20000437 PARAMETER Experiment Name: At_Drought_P Parameter: Treatment Value: Drought vs. No Drought
  misc_feature: MA Experiment ID: 20000453 Result: Up-regulated in Transcription
  misc_feature: MA Experiment 20000453 PARAMETER Experiment Name: At_100uM_ABA_P Parameter: Age (day) Value: 15
  misc_feature: MA Experiment 20000453 PARAMETER Experiment Name: At_100uM_ABA_P Parameter: Organism Value: A. thaliana
  misc_feature: MA Experiment 20000453 PARAMETER Experiment Name: At_100uM_ABA_P Parameter: Plant Line Value: WS
  misc_feature: MA Experiment 20000453 PARAMETER Experiment Name: At_100uM_ABA_P Parameter: Timepoint (hr) Value: 24
  misc_feature: MA Experiment 20000453 PARAMETER Experiment Name: At_100uM_ABA_P Parameter: Tissue Value: Aerial
  misc_feature: MA Experiment 20000453 PARAMETER Experiment Name: At_100uM_ABA_P Parameter: Treatment Value: 100uM ABA vs. No Treatment
  misc_feature: MA Experiment ID: 20001247 Result: Up-regulated in Transcription
  misc_feature: MA Experiment 20001247 PARAMETER Experiment Name: At_Far-red-induction_P Parameter: Age (day) Value: 7
  misc_feature: MA Experiment 20001247 PARAMETER Experiment Name: At_Far-red-induction_P Parameter: Light Value: Far-red vs. White
  misc_feature: MA Experiment 20001247 PARAMETER Experiment Name: At_Far-red-induction_P Parameter: Organism Value: A. thaliana
  misc_feature: MA Experiment 20001247 PARAMETER Experiment Name: At_Far-red-induction_P Parameter: Plant Line Value: Columbia
  misc_feature: MA Experiment 20001247 PARAMETER Experiment Name: At_Far-red-induction_P Parameter: Timepoint (hr) Value: 1
  misc_feature: MA Experiment 20001247 PARAMETER Experiment Name: At_Far-red-induction_P Parameter: Tissue Value: Whole Plant
  misc_feature: MA Experiment ID: 20001248 Result: Up-regulated in Transcription
  misc_feature: MA Experiment 20001248 PARAMETER Experiment Name: At_Far-red-induction_P Parameter: Age (day) Value: 7
  misc_feature: MA Experiment 20001248 PARAMETER Experiment Name: At_Far-red-induction_P Parameter: Light Value: Far-red vs. White
  misc_feature: MA Experiment 20001248 PARAMETER Experiment Name: At_Far-red-induction_P Parameter: Organism Value: A. thaliana
  misc_feature: MA Experiment 20001248 PARAMETER Experiment Name: At_Far-red-induction_P Parameter: Plant Line Value: Columbia
  misc_feature: MA Experiment 20001248 PARAMETER Experiment Name: At_Far-red-induction_P Parameter: Timepoint (hr) Value: 4
  misc_feature: MA Experiment 20001248 PARAMETER Experiment Name: At_Far-red-induction_P Parameter: Tissue Value: Whole Plant
  misc_feature: MA Experiment ID: 20001450 Result: Up-regulated in Transcription
  misc_feature: MA Experiment 20001450 PARAMETER Experiment Name: At_Far-red-induction_P Parameter: Age (day) Value: 7
  misc_feature: MA Experiment 20001450 PARAMETER Experiment Name: At_Far-red-induction_P Parameter: Light Value: Far-red vs. White
  misc_feature: MA Experiment 20001450 PARAMETER Experiment Name: At_Far-red-induction_P Parameter: Organism Value: A. thaliana
  misc_feature: MA Experiment 20001450 PARAMETER Experiment Name: At_Far-red-induction_P Parameter: Plant Line Value: Columbia
  misc_feature: MA Experiment 20001450 PARAMETER Experiment Name: At_Far-red-induction_P Parameter: Timepoint (hr) Value: 8
  misc_feature: MA Experiment 20001450 PARAMETER Experiment Name: At_Far-red-induction_P Parameter: Tissue Value: Whole Plant
  misc_feature: MA Experiment ID: 20001557 Result: Down-regulated in Transcription
  misc_feature: MA Experiment 20001557 PARAMETER Experiment Name: At_Drought_Soil_Dry_P Parameter: Age (day) Value: 27
  misc_feature: MA Experiment 20001557 PARAMETER Experiment Name: At_Drought_Soil_Dry_P Parameter: Organism Value: A. thaliana
  misc_feature: MA Experiment 20001557 PARAMETER Experiment Name: At_Drought_Soil_Dry_P Parameter: Plant Line Value: WS
  misc_feature: MA Experiment 20001557 PARAMETER Experiment Name: At_Drought_Soil_Dry_P Parameter: Post Timepoint (hr) Value: 3
  misc_feature: MA Experiment 20001557 PARAMETER Experiment Name: At_Drought_Soil_Dry_P Parameter: Post-Treatment Value: Re-Water vs. No Drought
  misc_feature: MA Experiment 20001557 PARAMETER Experiment Name: At_Drought_Soil_Dry_P Parameter: Timepoint (day) Value: 13
  misc_feature: MA Experiment 20001557 PARAMETER Experiment Name: At_Drought_Soil_Dry_P Parameter: Treatment Value: Drought vs. No Drought
  misc_feature: MA Experiment ID: 20001905 Result: Up-regulated in Transcription
  misc_feature: MA Experiment 20001905 PARAMETER Experiment Name: At_Drought_Reproduction_P Parameter: Age (day) Value: 40
  misc_feature: MA Experiment 20001905 PARAMETER Experiment Name: At_Drought_Reproduction_P Parameter: Organism Value: A. thaliana
  misc_feature: MA Experiment 20001905 PARAMETER Experiment Name: At_Drought_Reproduction_P Parameter: Plant Line Value: WS
  misc_feature: MA Experiment 20001905 PARAMETER Experiment Name: At_Drought_Reproduction_P Parameter: Timepoint (day) Value: 10
  misc_feature: MA Experiment 20001905 PARAMETER Experiment Name: At_Drought_Reproduction_P Parameter: Tissue Value: Rosettes
  misc_feature: MA Experiment 20001905 PARAMETER Experiment Name: At_Drought_Reproduction_P Parameter: Treatment Value: Drought vs. No Drought
acgtcaaggtttattctgtttctcaggctgcttttgtgctctgtcttcaaatttcgaacacttgtctgagatatatttgtctgattccaaagatcatggaagctaattcagctgatcagaaacaaaaacctaactttcttgttgaggttaataacattgagaaacagctatggacattaatccattcaaagactatattgcataccgatgtttcagaattatacgcgaaagctggttcgacctacgagcaaatctttaaaagcaatctccaacacgaagagcttcaagaagtagagttctgtctctggaaactccactataaacacatcgatgagtttcgtaaaggccttaaaacaaatgatcatgccaagcatatgaaagcattcaagttgtttctgtcaaaagcagctgagttttaccagaatctgatttccaaagtcagaggatattaccacagactctccgaggaatcaggagagcaaaaaagcagattcttatgccatcgtttctacatttgtcttggagatcttcaaaggtatcaagaacaatatctgaaagcacatgaacatcctaattggtcaactgcagctacttactatcttgaagctgcaaaatcttggcctgatagtggaaatcctcataaccagctagctgtattggccacatatgttagtgatgagttattggctctgtatcactgcgtaagaagcttagctgtgaaagagccttttcctggtgcttcgaacaatcttcttttgttgtttgagaagaacaggtcatctccattgcagtctctgtctactgatgcagagtttaactacttaaacccatcagagaaaaaagtttctgtgaaggaacgagatttgtcaaaagcaaaaggagaactagttgccggaattgatttatggcccctggttgttcgaacaactagcttctttttccttaaatccagttttgatgagtttggtcgggcatttgcatcaactataagagaactggatgcagcgtttgcagcagatgatagaaatctagaagccatgttggagtcttatcaatttatggacacggcgagaaagggaccttataaaatcctccaaattgttgcggtttttatctacatcttccacaatttagcagaggctaatggatccgacatcgtgaaagaggaagttaagctaacaaatttagcattaactatggtgtttatcgtcatggggcgagttgttgagagatgtttgaagacaactcccttggattcttgccctctcttacctgctctacttgtatttctagactacttaccgtttctgcttgacaaggtagaagaagaagaagaagaatgcaggtttgatgagaagagcaagagtgcaatatcttacttctttggcaaactcgttgatatcttgaaccagttaaaggtgaaagacaaaaactgccctgctaaaacgttgttagctctctgggaagatcatgaactgaagtccttggctcctctggctcccatacatgcacttttggatttctcaagtaatatggatcttagagagagttttgatagagggaaggagcttcgtcttcaacggattattagttcagcaattgatatcacaactaggcagaagaagggttctcaaaagtggctattctttgacaatcaacggactcatttctacacaacttcgggtgaattgcaaagcaacggagagctctttcatggaaatggagagggtagaaacagaaaatgcgttactattggaccagttgaaatcattcctttggagaatgaaagatctgttcctgtagaagaggaagaagtcattcttctcaagccgctcgtaaggtgtcaatctgctccaatatattcttctggcattgcagcaaagccacttagctctgattgcacaacttcaggaaatcaaacaactacatccaatgacagcctaagacgtaccttatcactcattgggtctgaaagtttcagctttacgcaaggtcttaaggacacggatccacaacatttgcatctcgaagaaggcactgtctcaggaagacctccatcgctgagcgcgtgggtggttgacaagaacaaagagaaaggacgactcggtttaagtaaaccaaacggattgggccctattgatgaaacaggtcctgtctcagcctttgatagtctctccatcaatagcagcaccgagcatcctgcgtcttcctattcgcctcctactccgtctgctccactactgcctgaagacgcttcttggtttcataatgacgctagtactaacaaagcagagagcttctatgatcagacacgatatatggaactccccggtatcatgaagccatacacaaacccaccctttgttgggatttcttcttctgaatggttacgtcggtacagagaaagtaggaatcttggaccagcctattcctatcaagctcagggaacaaacaatttgagaaactttatggctcatggctcttccaagttcagtctcttagctaggtacgggacaccaaacgattcttctcaaaactcaacgtttcaccctcagctctacatggaagaccatgaatctagaggagagaagctcggcaacgttcaacaaagcacaacaaatccttatggcttcagtgacgatcccggaccgtttcttagatttctgagagaaaaagagtggctgaatgagaacggtcagaggctaagaggacctcctcctgcatatatgaacaactaaagatgcgagtgagtgagttttcaagaaactgtcctaagttgacaagttgtgacaactatagttatttcttctctctttgtgtactgtttctcaaattttcacgagaatggaaaatcatatt

SEQ ID NO: 100944 - protein, 911 aa, Arabidopsis thaliana
  peptide (1)..(911): Ceres Seq. ID no. 13606443
  misc_feature (158)..(471): Homolog of NCBI NO: 35215104 NR Description: putative cig3 [Oryza sativa (japonica
  misc_feature (81)..(150): Homolog of NCBI NO: 35215104 NR Description: putative cig3 [Oryza sativa (japonica
  misc_feature (158)..(471): Homolog of NCBI NO: 34015261 NR Description: putative cytokinin inducibl protein [Oryza sativa
  misc_feature (81)..(150): Homolog of NCBI NO: 34015261 NR Description: putative cytokinin inducibl protein [Oryza sativa
  misc_feature (160)..(471): Homolog of NCBI NO: 18146966 NR Description: cig3 [Nicotiana tabacum]
  misc_feature (48)..(507): Homolog of NCBI NO: 30687291 NR Description: expressed protein [Arabidopsis thaliana]
  misc_feature (306)..(531): Homolog of NCBI NO: 35215104 NR Description: putative cig3 [Oryza sativa (japonica
  misc_feature (306)..(531): Homolog of NCBI NO: 34015261 NR Description: putative cytokinin inducibl protein [Oryza sativa
  misc_feature (70)..(302): Homolog of NCBI NO: 34872753 NR Description: similar to telomerase subunit EST1A [Rattus
  misc_feature (857)..(900): Homolog of NCBI NO: 15241886 NR Description: expressed protein [Arabidopsis thaliana]
VKVYSVSQAAFVLCLQISNTCLRYICLIPKIMEANSADQKQKPNFLVEVNNIEKQLWTLIHSKTILHTDVSELYAKAGSTYEQIFKSNLQHEELQEVEFCLWKLHYKHIDEFRKGLKTNDHAKHMKAFKLFLSKAAEFYQNLISKVRGYYHRLSEESGEQKSRFLCHRFYICLGDLQRYQEQYLKAHEHPNWSTAATYYLEAAKSWPDSGNPHNQLAVLATYVSDELLALYHCVRSLAVKEPFPGASNNLLLLFEKNRSSPLQSLSTDAEFNYLNPSEKKVSVKERDLSKAKGELVAGIDLWPLVVRTTSFFFLKSSFDEFGRAFASTIRELDAAFAADDRNLEAMLESYQFMDTARKGPYKILQIVAVFIYIFHNLAEANGSDIVKEEVKLTNLALTMVFIVMGRVVERCLKTTPLDSCPLLPALLVFLDYLPFLLDKVEEEEEECRFDEKSKSAISYFFGKLVDILNQLKVKDKNCPAKTLLALWEDHELKSLAPLAPIHALLDFSSNMDLRESFDRGKELRLQRIISSAIDITTRQKKGSQKWLFFDNQRTHFYTTSGELQSNGELFHGNGEGRNRKCVTIGPVEIIPLENERSVPVEEEEVILLKPLVRCQSAPIYSSGIAAKPLSSDCTTSGNQTTTSNDSLRRTLSLIGSESFSFTQGLKDTDPQHLHLEEGTVSGRPPSLSAWVVDKNKEKGRLGLSKPNGLGPIDETGPVSAFDSLSINSSTEHPASSYSPPTPSAPLLPEDASWFHNDASTNKAESFYDQTRYMELPGIMKPYTNPPFVGISSSEWLRRYRESRNLGPAYSYQAQGTNNLRNFMAHGSSKFSLLARYGTPNDSSQNSTFHPQLYMEDHESRGEKLGNVQQSTTNPYGFSDDPGPFLRFLREKEWLNENGQRLRGPPPAYMNN

SEQ ID NO: 100945 - protein, 880 aa, Arabidopsis thaliana
  peptide (1)..(880): Ceres Seq. ID no. 13606444
  misc_feature (127)..(440): Homolog of NCBI NO: 35215104 NR Description: putative cig3 [Oryza sativa (japonica
  misc_feature (50)..(119): Homolog of NCBI NO: 35215104 NR Description: putative cig3 [Oryza sativa (japonica
  misc_feature (127)..(440): Homolog of NCBI NO: 34015261 NR Description: putative cytokinin inducibl protein [Oryza sativa
  misc_feature (50)..(119): Homolog of NCBI NO: 34015261 NR Description: putative cytokinin inducibl protein [Oryza sativa
  misc_feature (129)..(440): Homolog of NCBI NO: 18146966 NR Description: cig3 [Nicotiana tabacum]
  misc_feature (17)..(476): Homolog of NCBI NO: 30687291 NR Description: expressed protein [Arabidopsis thaliana]
  misc_feature (275)..(500): Homolog of NCBI NO: 35215104 NR Description: putative cig3 [Oryza sativa (japonica
  misc_feature (275)..(500): Homolog of NCBI NO: 34015261 NR Description: putative cytokinin inducibl protein [Oryza sativa
  misc_feature (39)..(271): Homolog of NCBI NO: 34872753 NR Description: similar to telomerase subunit EST1A [Rattus
  misc_feature (826)..(869): Homolog of NCBI NO: 15241886 NR Description: expressed protein [Arabidopsis thaliana]
MEANSADQKQKPNFLVEVNNIEKQLWTLIHSKTILHTDVSELYAKAGSTYEQIFKSNLQHEELQEVEFCLWKLHYKHIDEFRKGLKTNDHAKHMKAFKLFLSKAAEFYQNLISKVRGYYHRLSEESGEQKSRFLCHRFYICLGDLQRYQEQYLKAHEHPNWSTAATYYLEAAKSWPDSGNPHNQLAVLATYVSDELLALYHCVRSLAVKEPFPGASNNLLLLFEKNRSSPLQSLSTDAEFNYLNPSEKKVSVKERDLSKAKGELVAGIDLWPLVVRTTSFFFLKSSFDEFGRAFASTIRELDAAFAADDRNLEAMLESYQFMDTARKGPYKILQIVAVFIYIFHNLAEANGSDIVKEEVKLTNLALTMVFIVMGRVVERCLKTTPLDSCPLLPALLVFLDYLPFLLDKVEEEEEECRFDEKSKSAISYFFGKLVDILNQLKVKDKNCPAKTLLALWEDHELKSLAPLAPIHALLDFSSNMDLRESFDRGKELRLQRIISSAIDITTRQKKGSQKWLFFDNQRTHFYTTSGELQSNGELFHGNGEGRNRKCVTIGPVEIIPLENERSVPVEEEEVILLKPLVRCQSAPIYSSGIAAKPLSSDCTTSGNQTTTSNDSLRRTLSLIGSESFSFTQGLKDTDPQHLHLEEGTVSGRPPSLSAWVVDKNKEKGRLGLSKPNGLGPIDETGPVSAFDSLSINSSTEHPASSYSPPTPSAPLLPEDASWFHNDASTNKAESFYDQTRYMELPGIMKPYTNPPFVGISSSEWLRRYRESRNLGPAYSYQAQGTNNLRNFMAHGSSKFSLLARYGTPNDSSQNSTFHPQLYMEDHESRGEKLGNVQQSTTNPYGFSDDPGPFLRFLREKEWLNENGQRLRGPPPAYMNN

SEQ ID NO: 100946 - protein, 787 aa, Arabidopsis thaliana
  peptide (1)..(787): Ceres Seq. ID no. 13606445
  misc_feature (34)..(347): Homolog of NCBI NO: 35215104 NR Description: putative cig3 [Oryza sativa (japonica
  misc_feature (1)..(26): Homolog of NCBI NO: 35215104 NR Description: putative cig3 [Oryza sativa (japonica
  misc_feature (34)..(347): Homolog of NCBI NO: 34015261 NR Description: putative cytokinin inducibl protein [Oryza sativa
  misc_feature (1)..(26): Homolog of NCBI NO: 34015261 NR Description: putative cytokinin inducibl protein [Oryza sativa
  misc_feature (36)..(347): Homolog of NCBI NO: 18146966 NR Description: cig3 [Nicotiana tabacum]
  misc_feature (1)..(383): Homolog of NCBI NO: 30687291 NR Description: expressed protein [Arabidopsis thaliana]
  misc_feature (182)..(407): Homolog of NCBI NO: 35215104 NR Description: putative cig3 [Oryza sativa (japonica
  misc_feature (182)..(407): Homolog of NCBI NO: 34015261 NR Description: putative cytokinin inducibl protein [Oryza sativa
  misc_feature (1)..(178): Homolog of NCBI NO: 34872753 NR Description: similar to telomerase subunit EST1A [Rattus
  misc_feature (733)..(776): Homolog of NCBI NO: 15241886 NR Description: expressed protein [Arabidopsis thaliana]
MKAFKLFLSKAAEFYQNLISKVRGYYHRLSEESGEQKSRFLCHRFYICLGDLQRYQEQYLKAHEHPNWSTAATYYLEAAKSWPDSGNPHNQLAVLATYVSDELLALYHCVRSLAVKEPFPGASNNLLLLFEKNRSSPLQSLSTDAEFNYLNPSEKKVSVKERDLSKAKGELVAGIDLWPLVVRTTSFFFLKSSFDEFGRAFASTIRELDAAFAADDRNLEAMLESYQFMDTARKGPYKILQIVAVFIYIFHNLAEANGSDIVKEEVKLTNLALTMVFIVMGRVVERCLKTTPLDSCPLLPALLVFLDYLPFLLDKVEEEEEECRFDEKSKSAISYFFGKLVDILNQLKVKDKNCPAKTLLALWEDHELKSLAPLAPIHALLDFSSNMDLRESFDRGKELRLQRIISSAIDITTRQKKGSQKWLFFDNQRTHFYTTSGELQSNGELFHGNGEGRNRKCVTIGPVEIIPLENERSVPVEEEEVILLKPLVRCQSAPIYSSGIAAKPLSSDCTTSGNQTTTSNDSLRRTLSLIGSESFSFTQGLKDTDPQHLHLEEGTVSGRPPSLSAWVVDKNKEKGRLGLSKPNGLGPIDETGPVSAFDSLSINSSTEHPASSYSPPTPSAPLLPEDASWFHNDASTNKAESFYDQTRYMELPGIMKPYTNPPFVGISSSEWLRRYRESRNLGPAYSYQAQGTNNLRNFMAHGSSKFSLLARYGTPNDSSQNSTFHPQLYMEDHESRGEKLGNVQQSTTNPYGFSDDPGPFLRFLREKEWLNENGQRLRGPPPAYMNN

SEQ ID NO: 100947 - DNA, 1152 bp, Arabidopsis thaliana
  misc_feature (1)..(1152): Ceres Seq. ID no. 13606454
  misc_feature: MA Experiment ID: 108435 Result: Down-regulated in Transcription
  misc_feature: MA Experiment 108435 PARAMETER Experiment Name: At_stm_Mutants_cDNA_P Parameter: Plant Line Value: wt Landsburg vs stm
  misc_feature: MA Experiment 108435 PARAMETER Experiment Name: At_stm_Mutants_cDNA_P Parameter: Tissue Value: Shoot Apical Meristem Region
  misc_feature: MA Experiment ID: 108668 Result: Down-regulated in Transcription
  misc_feature: MA Experiment 108668 PARAMETER Experiment Name: At_2mM_SA_cDNA_P Parameter: Plant Line Value: WS
  misc_feature: MA Experiment 108668 PARAMETER Experiment Name: At_2mM_SA_cDNA_P Parameter: Timepoint (hr) Value: 6
  misc_feature: MA Experiment 108668 PARAMETER Experiment Name: At_2mM_SA_cDNA_P Parameter: Treatment Value: 2mM SA vs. No Treatment
  misc_feature: MA Experiment ID: 20000111 Result: Down-regulated in Transcription
  misc_feature: MA Experiment 20000111 PARAMETER Experiment Name: At_42deg_Heat_cDNA_P Parameter: Temperature (deg C) Value: 42 vs. 22
  misc_feature: MA Experiment 20000111 PARAMETER Experiment Name: At_42deg_Heat_cDNA_P Parameter: Timepoint (hr) Value: 6
  misc_feature: MA Experiment 20000111 PARAMETER Experiment Name: At_42deg_Heat_cDNA_P Parameter: Tissue Value: Aerial
  misc_feature: MA Experiment ID: 20000214 Result: Down-regulated in Transcription
  misc_feature: MA Experiment 20000214 PARAMETER Experiment Name: At_4deg_Cold_P Parameter: Timepoint (hr) Value: 6
  misc_feature: MA Experiment ID: 20000437 Result: Up-regulated in Transcription
  misc_feature: MA Experiment 20000437 PARAMETER Experiment Name: At_Drought_P Parameter: Age (day) Value: 8
  misc_feature: MA Experiment 20000437 PARAMETER Experiment Name: At_Drought_P Parameter: Organism Value: A. thaliana
  misc_feature: MA Experiment 20000437 PARAMETER Experiment Name: At_Drought_P Parameter: Plant Line Value: WS
  misc_feature: MA Experiment 20000437 PARAMETER Experiment Name: At_Drought_P Parameter: Timepoint (hr) Value: 24
  misc_feature: MA Experiment 20000437 PARAMETER Experiment Name: At_Drought_P Parameter: Tissue Value: Whole Plant
  misc_feature: MA Experiment 20000437 PARAMETER Experiment Name: At_Drought_P Parameter: Treatment Value: Drought vs. No Drought
  misc_feature: MA Experiment ID: 20001451 Result: Up-regulated in Transcription
  misc_feature: MA Experiment 20001451 PARAMETER Experiment Name: At_Far-red-induction_P Parameter: Age (day) Value: 7
  misc_feature: MA Experiment 20001451 PARAMETER Experiment Name: At_Far-red-induction_P Parameter: Light Value: Far-red vs. White
  misc_feature: MA Experiment 20001451 PARAMETER Experiment Name: At_Far-red-induction_P Parameter: Organism Value: A. thaliana
  misc_feature: MA Experiment 20001451 PARAMETER Experiment Name: At_Far-red-induction_P Parameter: Plant Line Value: Columbia
  misc_feature: MA Experiment 20001451 PARAMETER Experiment Name: At_Far-red-induction_P Parameter: Timepoint (hr) Value: 24
  misc_feature: MA Experiment 20001451 PARAMETER Experiment Name: At_Far-red-induction_P Parameter: Tissue Value: Whole Plant
  misc_feature: MA Experiment ID: 20001558 Result: Down-regulated in Transcription
  misc_feature: MA Experiment 20001558 PARAMETER Experiment Name: At_Drought_Soil_Dry_P Parameter: Age (day) Value: 27
  misc_feature: MA Experiment 20001558 PARAMETER Experiment Name: At_Drought_Soil_Dry_P Parameter: Organism Value: A. thaliana
  misc_feature: MA Experiment 20001558 PARAMETER Experiment Name: At_Drought_Soil_Dry_P Parameter: Plant Line Value: WS
  misc_feature: MA Experiment 20001558 PARAMETER Experiment Name: At_Drought_Soil_Dry_P Parameter: Post Timepoint (hr) Value: 6
  misc_feature: MA Experiment 20001558 PARAMETER Experiment Name: At_Drought_Soil_Dry_P Parameter: Post-Treatment Value: Re-Water vs. No Drought
  misc_feature: MA Experiment 20001558 PARAMETER Experiment Name: At_Drought_Soil_Dry_P Parameter: Timepoint (day) Value: 13
  misc_feature: MA Experiment 20001558 PARAMETER Experiment Name: At_Drought_Soil_Dry_P Parameter: Treatment Value: Drought vs. No Drought
aaaaggaagtcaaaacttcagagagaaagtggatgggggacacgaaggtagagacaatctcgaggttagctcaatggagaattgaaaattttggtccttgttctttcaaaaagtccgatcctttcaaagtcggaatttggaattggcatctgtctatagagaggaatcgctatctatcagtgaggctattcccagaactttctcgagtatctaaagagcaacctcctgttgccaaatttgttcttcgtgtctccaacgttggccccaatcgtagattctacatctctcctgtttatgagaagctgctgcgtacaactgatgattgtgtgtggcatgttgactccagtttccacggtcgattcaccattgatgttgagtttcttgatctcaaaatctgccctgtgaatggtggtgaagcttctcctgtttggccaaccgatgcaacaatgcaatcaatctctactcaaaccactctcaaatgcttatcccggatgctagaggaaagcatactaaccgatgtaatcatccacacagccgatggaacactctctgctcacaaagctatcctctcagctagctcaactgttttcaaaagcatgttccaccacgacctcatggaaaaggaatcatccacaatccacatagacgacatgtcgagagaatcttgcatggctctactaagttacctctacggaaacataacccaagaagagttctggaaacacaggctcgccctcctcggcgctgcaaacaagtacgacataacggatttgaaagcagcctgcgaggagagcctaatggaagatataaactcgagtaatgtgctcgagaggctacaagaagcttggctttatcagctggagaaactgaagaaagggtgtttgatgtatttgtttgatttcggaaagatttatgatgtcagagaagaaatcagcagtttcttcaggcaagctgatcgagaactgatgctggagatgtttcaagaggttttgtctgtgtggaaaccggtctaatatacacttacacacatactttgaacatttcagcttgatggtgttttgtttatagtcttcttgttctcttctgtgtgtgtaactaacaacaactctggattttgttgtatcactctgtctaatgtatagtattgagtgg

SEQ ID NO: 100948 - protein, 336 aa, Arabidopsis thaliana
  peptide (1)..(336): Ceres Seq. ID no. 13606455
  misc_feature (161)..(269): Pfam Name: BTB/POZ domain Pfam Description: BTB/POZ domain
  misc_feature (11)..(336): Homolog of NCBI NO: 15219092 NR Description: POZ domain protein family [Arabidopsis thaliana]
  misc_feature (49)..(336): Homolog of NCBI NO: 38637050 NR Description: POZ domain protein family-like [Oryza sativa
  misc_feature (15)..(334): Homolog of NCBI NO: 15222771 NR Description: POZ domain protein family [Arabidopsis thaliana]
  misc_feature (15)..(297): Homolog of NCBI NO: 8778495 NR Description: F20N2.15 [Arabidopsis thaliana]
  misc_feature (153)..(297): Homolog of NCBI NO: 25150010 NR Description: Maternal Effect embryonic Lethal MEL-26,
  misc_feature (154)..(297): Homolog of NCBI NO: 34858187 NR Description: similar to speckle-type POZ protein-like 1; POZ
  misc_feature (153)..(332): Homolog of NCBI NO: 27661061 NR Description: similar to speckle-type POZ protein [Homo
  misc_feature (153)..(332): Homolog of NCBI NO: 34858214 NR Description: similar to speckle-type POZ protein-like 1; POZ
  misc_feature (164)..(331): Homolog of NCBI NO: 17552682 NR Description: MATH domain and BTB/POZ domain containing protein member [Caenorhabditis elegans] >gi|465837|sp|P34371|YLJ8_CAEEL
  misc_feature (164)..(331): Homolog of NCBI NO: 39594087 NR Description: Hypothetical protein CBG16671 [Caenorhabditis
KEVKTSERKWMGDTKVETISRLAQWRIENFGPCSFKKSDPFKVGIWNWHLSIERNRYLSVRLFPELSRVSKEQPPVAKFVLRVSNVGPNRRFYISPVYEKLLRTTDDCVWHVDSSFHGRFTIDVEFLDLKICPVNGGEASPVWPTDATMQSISTQTTLKCLSRMLEESILTDVIIHTADGTLSAHKAILSASSTVFKSMFHHDLMEKESSTIHIDDMSRESCMALLSYLYGNITQEEFWKHRLALLGAANKYDITDLKAACEESLMEDINSSNVLERLQEAWLYQLEKLKKGCLMYLFDFGKIYDVREEISSFFRQADRELMLEMFQEVLSVWKPV

SEQ ID NO: 100949 - protein, 326 aa, Arabidopsis thaliana; identical to SEQ ID NO: 23514
  peptide (1)..(326): Ceres Seq. ID no. 13606456
  misc_feature (151)..(259): Pfam Name: BTB/POZ domain Pfam Description: BTB/POZ domain
  misc_feature (1)..(326): Homolog of NCBI NO: 15219092 NR Description: POZ domain protein family [Arabidopsis thaliana]
  misc_feature (39)..(326): Homolog of NCBI NO: 38637050 NR Description: POZ domain protein family-like [Oryza sativa
  misc_feature (5)..(324): Homolog of NCBI NO: 15222771 NR Description: POZ domain protein family [Arabidopsis thaliana]
  misc_feature (5)..(287): Homolog of NCBI NO: 8778495 NR Description: F20N2.15 [Arabidopsis thaliana]
  misc_feature (143)..(287): Homolog of NCBI NO: 25150010 NR Description: Maternal Effect embryonic Lethal MEL-26,
  misc_feature (144)..(287): Homolog of NCBI NO: 34858187 NR Description: similar to speckle-type POZ protein-like 1; POZ
  misc_feature (143)..(322): Homolog of NCBI NO: 27661061 NR Description: similar to speckle-type POZ protein [Homo
  misc_feature (143)..(322): Homolog of NCBI NO: 34858214 NR Description: similar to speckle-type POZ protein-like 1; POZ
  misc_feature (154)..(321): Homolog of NCBI NO: 17552682 NR Description: MATH domain and BTB/POZ domain containing protein member [Caenorhabditis elegans] >gi|465837|sp|P34371|YLJ8_CAEEL
  misc_feature (154)..(321): Homolog of NCBI NO: 39594087 NR Description: Hypothetical protein CBG16671 [Caenorhabditis

SEQ ID NO: 100950 - protein, 188 aa, Arabidopsis thaliana; identical to SEQ ID NO: 23515
  peptide (1)..(188): Ceres Seq. ID no. 13606457
  misc_feature (13)..(121): Pfam Name: BTB/POZ domain Pfam Description: BTB/POZ domain
  misc_feature (1)..(188): Homolog of NCBI NO: 15219092 NR Description: POZ domain protein family [Arabidopsis thaliana]
  misc_feature (1)..(188): Homolog of NCBI NO: 38637050 NR Description: POZ domain protein family-like [Oryza sativa
  misc_feature (1)..(186): Homolog of NCBI NO: 15222771 NR Description: POZ domain protein family [Arabidopsis thaliana]
  misc_feature (1)..(149): Homolog of NCBI NO: 8778495 NR Description: F20N2.15 [Arabidopsis thaliana]
  misc_feature (5)..(149): Homolog of NCBI NO: 25150010 NR Description: Maternal Effect embryonic Lethal MEL-26,
  misc_feature (6)..(149): Homolog of NCBI NO: 34858187 NR Description: similar to speckle-type POZ protein-like 1; POZ
  misc_feature (5)..(184): Homolog of NCBI NO: 27661061 NR Description: similar to speckle-type POZ protein [Homo
  misc_feature (5)..(184): Homolog of NCBI NO: 34858214 NR Description: similar to speckle-type POZ protein-like 1; POZ
  misc_feature (16)..(183): Homolog of NCBI NO: 17552682 NR Description: MATH domain and BTB/POZ domain containing protein member [Caenorhabditis elegans] >gi|465837|sp|P34371|YLJ8_CAEEL
  misc_feature (16)..(183): Homolog of NCBI NO: 39594087 NR Description: Hypothetical protein CBG16671 [Caenorhabditis

SEQ ID NO: 100951 - DNA, 1751 bp, Arabidopsis thaliana
  misc_feature (1)..(1751): Ceres Seq. ID no. 13606478
  misc_feature: MA Experiment ID: 20000171 Result: Down-regulated in Transcription
  misc_feature: MA Experiment 20000171 PARAMETER Experiment Name: At_42deg_Heat_P Parameter: Age (day) Value: 14
  misc_feature: MA Experiment 20000171 PARAMETER Experiment Name: At_42deg_Heat_P Parameter: Organism Value: A. thaliana
  misc_feature: MA Experiment 20000171 PARAMETER Experiment Name: At_42deg_Heat_P Parameter: Plant Line Value: WS
  misc_feature: MA Experiment 20000171 PARAMETER Experiment Name: At_42deg_Heat_P Parameter: Temperature (deg C) Value: 42 vs. 22
  misc_feature: MA Experiment 20000171 PARAMETER Experiment Name: At_42deg_Heat_P Parameter: Timepoint (hr) Value: 1
  misc_feature: MA Experiment 20000171 PARAMETER Experiment Name: At_42deg_Heat_P Parameter: Tissue Value: Aerial
  misc_feature: MA Experiment ID: 20000173 Result: Down-regulated in Transcription
  misc_feature: MA Experiment 20000173 PARAMETER Experiment Name: At_42deg_Heat_P Parameter: Age (day) Value: 14
  misc_feature: MA Experiment 20000173 PARAMETER Experiment Name: At_42deg_Heat_P Parameter: Organism Value: A. thaliana
  misc_feature: MA Experiment 20000173 PARAMETER Experiment Name: At_42deg_Heat_P Parameter: Plant Line Value: WS
  misc_feature: MA Experiment 20000173 PARAMETER Experiment Name: At_42deg_Heat_P Parameter: Temperature (deg C) Value: 42 vs. 22
  misc_feature: MA Experiment 20000173 PARAMETER Experiment Name: At_42deg_Heat_P Parameter: Timepoint (hr) Value: 6
  misc_feature: MA Experiment 20000173 PARAMETER Experiment Name: At_42deg_Heat_P Parameter: Tissue Value: Aerial
  misc_feature: MA Experiment ID: 20000180 Result: Up-regulated in Transcription
  misc_feature: MA Experiment 20000180 PARAMETER Experiment Name: At_Germinating_Seeds_P Parameter: Age (hr) Value: 24 vs. 0
  misc_feature: MA Experiment 20000180 PARAMETER Experiment Name: At_Germinating_Seeds_P Parameter: Tissue Value: Germinating Seeds
  misc_feature: MA Experiment ID: 20000227 Result: Up-regulated in Transcription
  misc_feature: MA Experiment 20000227 PARAMETER Experiment Name: At_Root-Tips-vs-Tops_P Parameter: Tissue Value: Root Tips vs. Root Tops
  misc_feature: MA Experiment ID: 20000234 Result: Up-regulated in Transcription
  misc_feature: MA Experiment 20000234 PARAMETER Experiment Name: At_Siliques_P Parameter: Age (day) Value: 21
  misc_feature: MA Experiment 20000234 PARAMETER Experiment Name: At_Siliques_P Parameter: Organism Value: A. thaliana
  misc_feature: MA Experiment 20000234 PARAMETER Experiment Name: At_Siliques_P Parameter: Plant Line Value: WS
  misc_feature: MA Experiment 20000234 PARAMETER Experiment Name: At_Siliques_P Parameter: Tissue Value: Less Than 5mm Siliques vs. Whole Plant
  misc_feature: MA Experiment ID: 20000265 Result: Up-regulated in Transcription
  misc_feature: MA Experiment 20000265 PARAMETER Experiment Name: At_Open_Flower_P Parameter: Age (day) Value: 21
  misc_feature: MA Experiment 20000265 PARAMETER Experiment Name: At_Open_Flower_P Parameter: Plant Line Value: WS
  misc_feature: MA Experiment 20000265 PARAMETER Experiment Name: At_Open_Flower_P Parameter: Tissue Value: Closed Flower vs. Whole Plant
  misc_feature: MA Experiment ID: 20000286 Result: Up-regulated in Transcription
  misc_feature: MA Experiment 20000286 PARAMETER Experiment Name: At_Open_Flower_P Parameter: Age (day) Value: 21
  misc_feature: MA Experiment 20000286 PARAMETER Experiment Name: At_Open_Flower_P Parameter: Plant Line Value: WS
  misc_feature: MA Experiment 20000286 PARAMETER Experiment Name: At_Open_Flower_P Parameter: Tissue Value: Half Open vs. Whole Plant
  misc_feature: MA Experiment ID: 20000437 Result: Down-regulated in Transcription
  misc_feature: MA Experiment 20000437 PARAMETER Experiment Name: At_Drought_P Parameter: Age (day) Value: 8
  misc_feature: MA Experiment 20000437 PARAMETER Experiment Name: At_Drought_P Parameter: Organism Value: A. thaliana
  misc_feature: MA Experiment 20000437 PARAMETER Experiment Name: At_Drought_P Parameter: Plant Line Value: WS
  misc_feature: MA Experiment 20000437 PARAMETER Experiment Name: At_Drought_P Parameter: Timepoint (hr) Value: 24
  misc_feature: MA Experiment 20000437 PARAMETER Experiment Name: At_Drought_P Parameter: Tissue Value: Whole Plant
  misc_feature: MA Experiment 20000437 PARAMETER Experiment Name: At_Drought_P Parameter: Treatment Value: Drought vs. No Drought
  misc_feature: MA Experiment ID: 20000496 Result: Up-regulated in Transcription
  misc_feature: MA Experiment 20000496 PARAMETER Experiment Name: At_Guard_Cells_P Parameter: Harvest Date Value: 7/19/2002
  misc_feature: MA Experiment 20000496 PARAMETER Experiment Name: At_Guard_Cells_P Parameter: Organism Value: Canola
  misc_feature: MA Experiment 20000496 PARAMETER Experiment Name: At_Guard_Cells_P Parameter: Tissue Value: Guard Cells vs. Leaves
  misc_feature: MA Experiment ID: 20001247 Result: Up-regulated in Transcription
  misc_feature: MA Experiment 20001247 PARAMETER Experiment Name: At_Far-red-induction_P Parameter: Age (day) Value: 7
  misc_feature: MA Experiment 20001247 PARAMETER Experiment Name: At_Far-red-induction_P Parameter: Light Value: Far-red vs. White
  misc_feature: MA Experiment 20001247 PARAMETER Experiment Name: At_Far-red-induction_P Parameter: Organism Value: A. thaliana
  misc_feature: MA Experiment 20001247 PARAMETER Experiment Name: At_Far-red-induction_P Parameter: Plant Line Value: Columbia
  misc_feature: MA Experiment 20001247 PARAMETER Experiment Name: At_Far-red-induction_P Parameter: Timepoint (hr) Value: 1
  misc_feature: MA Experiment 20001247 PARAMETER Experiment Name: At_Far-red-induction_P Parameter: Tissue Value: Whole Plant
  misc_feature: MA Experiment ID: 20001450 Result: Up-regulated in Transcription
  misc_feature: MA Experiment 20001450 PARAMETER Experiment Name: At_Far-red-induction_P Parameter: Age (day) Value: 7
  misc_feature: MA Experiment 20001450 PARAMETER Experiment Name: At_Far-red-induction_P Parameter: Light Value: Far-red vs. White
  misc_feature: MA Experiment 20001450 PARAMETER Experiment Name: At_Far-red-induction_P Parameter: Organism Value: A. thaliana
  misc_feature: MA Experiment 20001450 PARAMETER Experiment Name: At_Far-red-induction_P Parameter: Plant Line Value: Columbia
  misc_feature: MA Experiment 20001450 PARAMETER Experiment Name: At_Far-red-induction_P Parameter: Timepoint (hr) Value: 8
  misc_feature: MA Experiment 20001450 PARAMETER Experiment Name: At_Far-red-induction_P Parameter: Tissue Value: Whole Plant
  misc_feature: MA Experiment ID: 20001451 Result: Up-regulated in Transcription
  misc_feature: MA Experiment 20001451 PARAMETER Experiment Name: At_Far-red-induction_P Parameter: Age (day) Value: 7
  misc_feature: MA Experiment 20001451 PARAMETER Experiment Name: At_Far-red-induction_P Parameter: Light Value: Far-red vs. White
  misc_feature: MA Experiment 20001451 PARAMETER Experiment Name: At_Far-red-induction_P Parameter: Organism Value: A. thaliana
  misc_feature: MA Experiment 20001451 PARAMETER Experiment Name: At_Far-red-induction_P Parameter: Plant Line Value: Columbia
  misc_feature: MA Experiment 20001451 PARAMETER Experiment Name: At_Far-red-induction_P Parameter: Timepoint (hr) Value: 24
  misc_feature: MA Experiment 20001451 PARAMETER Experiment Name: At_Far-red-induction_P Parameter: Tissue Value: Whole Plant
  misc_feature: MA Experiment ID: 20001555 Result: Down-regulated in Transcription
  misc_feature: MA Experiment 20001555 PARAMETER Experiment Name: At_Drought_Soil_Dry_P Parameter: Age (day) Value: 24
  misc_feature: MA Experiment 20001555 PARAMETER Experiment Name: At_Drought_Soil_Dry_P Parameter: Organism Value: A. thaliana
  misc_feature: MA Experiment 20001555 PARAMETER Experiment Name: At_Drought_Soil_Dry_P Parameter: Plant Line Value: WS
  misc_feature: MA Experiment 20001555 PARAMETER Experiment Name: At_Drought_Soil_Dry_P Parameter: Post Timepoint (hr) Value: None
  misc_feature: MA Experiment 20001555 PARAMETER Experiment Name: At_Drought_Soil_Dry_P Parameter: Post-Treatment Value: None
  misc_feature: MA Experiment 20001555 PARAMETER Experiment Name: At_Drought_Soil_Dry_P Parameter: Timepoint (day) Value: 10
  misc_feature: MA Experiment 20001555 PARAMETER Experiment Name: At_Drought_Soil_Dry_P Parameter: Treatment Value: Drought vs. No Drought
  misc_feature: MA Experiment ID: 20001556 Result: Down-regulated in Transcription
  misc_feature: MA Experiment 20001556 PARAMETER Experiment Name: At_Drought_Soil_Dry_P Parameter: Age (day) Value: 26
  misc_feature: MA Experiment 20001556 PARAMETER Experiment Name: At_Drought_Soil_Dry_P Parameter: Organism Value: A. thaliana
  misc_feature: MA Experiment 20001556 PARAMETER Experiment Name: At_Drought_Soil_Dry_P Parameter: Plant Line Value: WS
  misc_feature: MA Experiment 20001556 PARAMETER Experiment Name: At_Drought_Soil_Dry_P Parameter: Post Timepoint (hr) Value: None
  misc_feature: MA Experiment 20001556 PARAMETER Experiment Name: At_Drought_Soil_Dry_P Parameter: Post-Treatment Value: None
  misc_feature: MA Experiment 20001556 PARAMETER Experiment Name: At_Drought_Soil_Dry_P Parameter: Timepoint (day) Value: 12
  misc_feature: MA Experiment 20001556 PARAMETER Experiment Name: At_Drought_Soil_Dry_P Parameter: Treatment Value: Drought vs. No Drought
  misc_feature: MA Experiment ID: 20001557 Result: Up-regulated in Transcription
  misc_feature: MA Experiment 20001557 PARAMETER Experiment Name: At_Drought_Soil_Dry_P Parameter: Age (day) Value: 27
  misc_feature: MA Experiment 20001557 PARAMETER Experiment Name: At_Drought_Soil_Dry_P Parameter: Organism Value: A. thaliana
  misc_feature: MA Experiment 20001557 PARAMETER Experiment Name: At_Drought_Soil_Dry_P Parameter: Plant Line Value: WS
  misc_feature: MA Experiment 20001557 PARAMETER Experiment Name: At_Drought_Soil_Dry_P Parameter: Post Timepoint (hr) Value: 3
  misc_feature: MA Experiment 20001557 PARAMETER Experiment Name: At_Drought_Soil_Dry_P Parameter: Post-Treatment Value: Re-Water vs. No Drought
  misc_feature: MA Experiment 20001557 PARAMETER Experiment Name: At_Drought_Soil_Dry_P Parameter: Timepoint (day) Value: 13
  misc_feature: MA Experiment 20001557 PARAMETER Experiment Name: At_Drought_Soil_Dry_P Parameter: Treatment Value: Drought vs. No Drought
  misc_feature: MA Experiment ID: 20001558 Result: Up-regulated in Transcription
  misc_feature: MA Experiment 20001558 PARAMETER Experiment Name: At_Drought_Soil_Dry_P Parameter: Age (day) Value: 27
  misc_feature: MA Experiment 20001558 PARAMETER Experiment Name: At_Drought_Soil_Dry_P Parameter: Organism Value: A. thaliana
  misc_feature: MA Experiment 20001558 PARAMETER Experiment Name: At_Drought_Soil_Dry_P Parameter: Plant Line Value: WS
  misc_feature: MA Experiment 20001558 PARAMETER Experiment Name: At_Drought_Soil_Dry_P Parameter: Post Timepoint (hr) Value: 6
  misc_feature: MA Experiment 20001558 PARAMETER Experiment Name: At_Drought_Soil_Dry_P Parameter: Post-Treatment Value: Re-Water vs. No Drought
  misc_feature: MA Experiment 20001558 PARAMETER Experiment Name: At_Drought_Soil_Dry_P Parameter: Timepoint (day) Value: 13
  misc_feature: MA Experiment 20001558 PARAMETER Experiment Name: At_Drought_Soil_Dry_P Parameter: Treatment Value: Drought vs. No Drought
  misc_feature: MA Experiment ID: 20001560 Result: Up-regulated in Transcription
  misc_feature: MA Experiment 20001560 PARAMETER Experiment Name: At_Drought_Soil_Dry_P Parameter: Age (day) Value: 28
  misc_feature: MA Experiment 20001560 PARAMETER Experiment Name: At_Drought_Soil_Dry_P Parameter: Organism Value: A. thaliana
  misc_feature: MA Experiment 20001560 PARAMETER Experiment Name: At_Drought_Soil_Dry_P Parameter: Plant Line Value: WS
  misc_feature: MA Experiment 20001560 PARAMETER Experiment Name: At_Drought_Soil_Dry_P Parameter: Post Timepoint (hr) Value: None
  misc_feature: MA Experiment 20001560 PARAMETER Experiment Name: At_Drought_Soil_Dry_P Parameter: Post-Treatment Value: None
  misc_feature: MA Experiment 20001560 PARAMETER Experiment Name: At_Drought_Soil_Dry_P Parameter: Timepoint (day) Value: 14
  misc_feature: MA Experiment 20001560 PARAMETER Experiment Name: At_Drought_Soil_Dry_P Parameter: Treatment Value: Drought vs. No Drought
  misc_feature: MA Experiment ID: 20001906 Result: Down-regulated in Transcription
  misc_feature: MA Experiment 20001906 PARAMETER Experiment Name: At_Drought_Reproduction_P Parameter: Age (day) Value: 35
  misc_feature: MA Experiment 20001906 PARAMETER Experiment Name: At_Drought_Reproduction_P Parameter: Organism Value: A. thaliana
  misc_feature: MA Experiment 20001906 PARAMETER Experiment Name: At_Drought_Reproduction_P Parameter: Plant Line Value: WS
  misc_feature: MA Experiment 20001906 PARAMETER Experiment Name: At_Drought_Reproduction_P Parameter: Timepoint (day) Value: 5
  misc_feature: MA Experiment 20001906 PARAMETER Experiment Name: At_Drought_Reproduction_P Parameter: Tissue Value: Siliques
  misc_feature: MA Experiment 20001906 PARAMETER Experiment Name: At_Drought_Reproduction_P Parameter: Treatment Value: Drought vs. No Drought
  misc_feature: MA Experiment ID: 20001911 Result: Down-regulated in Transcription
  misc_feature: MA Experiment 20001911 PARAMETER Experiment Name: At_Drought_Reproduction_P Parameter: Age (day) Value: 40
  misc_feature: MA Experiment 20001911 PARAMETER Experiment Name: At_Drought_Reproduction_P Parameter: Organism Value: A. thaliana
  misc_feature: MA Experiment 20001911 PARAMETER Experiment Name: At_Drought_Reproduction_P Parameter: Plant Line Value: WS
  misc_feature: MA Experiment 20001911 PARAMETER Experiment Name: At_Drought_Reproduction_P Parameter: Timepoint (day) Value: 10
  misc_feature: MA Experiment 20001911 PARAMETER Experiment Name: At_Drought_Reproduction_P Parameter: Tissue Value: Flowers
  misc_feature: MA Experiment 20001911 PARAMETER Experiment Name: At_Drought_Reproduction_P Parameter: Treatment Value: Drought vs. No Drought
  misc_feature (1582)..(1582): n is a, c, t, g, unknown, or other
  misc_feature (1609)..(1609): n is a, c, t, g, unknown, or other
atgtcgcttgacataaagaaaccgaacatcaccaagacgaagaagaagaagacaggtttcgtcgtaaaaatgcagcttaataacaacagaggaggaaataaaagaaacatctttatcttcttcttcttcagaaactattacacatggatcctctggttttgcctctctctgtatttcttcacatcttacttctccgtcgaagaccaatcctcaccgtcgtcaatacgtctcttgtctaaccacaaaacgtcgtcgtctctcccatctcgtgctctcatcgaatcttccgccattaaaaccacctccattggtaaaaaagcctcgatctttatctcttctctgtttcaaatctttcacttctcctcaaaaattgattttttggggtctctgattaaaggtttgttcaccggaatgaagatatacgtttacgatttaccggcgagttataacgacgattgggttacagcatcagaccgttgcgctagccacctcttcgcggcggaggtagctatccaccgtgcacttctctcctccgacgtccgtacgttagacccagatgaagctgattacttcttcgtccctgtctacgtttcttgcaatttctccacatccaacggcttcccttctctaagccacgctcgctctctccttagctccgccgtcgattttctctccgatcattacccattttggaacaggagtcaaggctctgaccacgtcttcgtcgcttcccatgactttggcgcatgcttccacgcaatggaggatatggctatagaggaagggattccaaaatttatgaagagatcaataattttacaaacgtttggagttaagtacaagcatccatgtcaagaagtggaacatgttgtgattcctccttatattccaccggagagtgttcaaaaagctattgaaaaagctccggtgaacggacggcgagacatttgggcgtttttccggggaaaaatggaagtcaaccctaagaatattagcggacgcttttacagcaagggagtgagaacggcgattctaaagaaattcggaggaagaaggcggttttatctaaaccggcaccggtttgctggataccgatcagaaatcgtgagatcagtgttttgtctctgtcctttagggtgggcaccatggagtcctagactagtggaatccgccgtgttaggttgtgttcccgttgttatcgccgatgggattcaattaccgttctcggagacggtacaatggccggaaatctcactaacggtggcggagaaagacgtgaggaatctacgaaaggttttggaacacgtggcggctactaatttgtctgcaatacaaagaaacttacatgaaccggtgtttaagcgggccctcttgtacaatgtgccgatgaaagaaggagacgccacgtggcatattctcgagtcgttgtggaggaagctcgatgatcggtcgtacagaaggtcaagggttttaagccaacgagaagtcgacatgtaggattctgtgtntgaatggatgctaggctggaatttttcggactgtttcggaattggttaaccgggaatgtctcgagtggggtccncaacgtggattaactcgggcacgtganatgtttgctgagctggcaattattgagtggaatattaacgtgccaagggaagtgaaagtgtaaagtattgctgacgtgtaattcttttgatgagtaggcatataaattcttttgaatatagttgatcaaaatgcaaagttat

SEQ ID NO: 100952 - protein, 498 aa, Arabidopsis thaliana
  peptide (1)..(498): Ceres Seq. ID no. 13606479
  misc_feature (140)..(448): Pfam Name: Exostosin family Pfam Description: Exostosin family
  misc_feature (1)..(498): Homolog of NCBI NO: 15237173 NR Description: expressed protein [Arabidopsis thaliana] gb|AAC98455.1~gene_id:MRN17.17~strong similarity to unknown
  misc_feature (43)..(488): Homolog of NCBI NO: 25407954 NR Description: hypothetical protein At2g28110 [imported] - thaliana >gi|4063747|gb|AAC98455.1| hypothetical protein
  misc_feature (255)..(487): Homolog of NCBI NO: 34902390 NR Description: Unknown protein [Oryza sativa (japonica
  misc_feature (138)..(255): Homolog of NCBI NO: 34902390 NR Description: Unknown protein [Oryza sativa (japonica
  misc_feature (138)..(480): Homolog of NCBI NO: 34907046 NR Description: contains EST D39982(S1682)~similar to Arabidopsis
  misc_feature (128)..(480): Homolog of NCBI NO: 34907044 NR Description: hypothetical protein~similar to Arabidopsis
  misc_feature (138)..(480): Homolog of NCBI NO: 34907048 NR Description: contains EST D24978(R2878)~similar to Arabidopsis
  misc_feature (138)..(484): Homolog of NCBI NO: 15223522 NR Description: hypothetical protein [Arabidopsis thaliana]
  misc_feature (138)..(480): Homolog of NCBI NO: 38347167 NR Description: OSJNBa0039C07.13 [Oryza sativa (japonica
  misc_feature (138)..(487): Homolog of NCBI NO: 18424516 NR Description: (AtGUT1) NpGUT1 homolog [Arabidopsis thaliana] AT5g61840/mac9_140 [Arabidopsis thaliana]
MSLDIKKPNITKTKKKKTGFVVKMQLNNNRGGNKRNIFIFFFFRNYYTWILWFCLSLYFFTSYFSVEDQSSPSSIRLLSNHKTSSSLPSRALIESSAIKTTSIGKKASIFISSLFQIFHFSSKIDFLGSLIKGLFTGMKIYVYDLPASYNDDWVTASDRCASHLFAAEVAIHRALLSSDVRTLDPDEADYFFVPVYVSCNFSTSNGFPSLSHARSLLSSAVDFLSDHYPFWNRSQGSDHVFVASHDFGACFHAMEDMAIEEGIPKFMKRSIILQTFGVKYKHPCQEVEHVVIPPYIPPESVQKAIEKAPVNGRRDIWAFFRGKMEVNPKNISGRFYSKGVRTAILKKFGGRRRFYLNRHRFAGYRSEIVRSVFCLCPLGWAPWSPRLVESAVLGCVPVVIADGIQLPFSETVQWPEISLTVAEKDVRNLRKVLEHVAATNLSAIQRNLHEPVFKRALLYNVPMKEGDATWHILESLWRKLDDRSYRRSRVLSQREVDM

SEQ ID NO: 100953 - protein, 475 aa, Arabidopsis thaliana
  peptide (1)..(475): Ceres Seq. ID no. 13606480
  misc_feature (117)..(425): Pfam Name: Exostosin family Pfam Description: Exostosin family
  misc_feature (1)..(475): Homolog of NCBI NO: 15237173 NR Description: expressed protein [Arabidopsis thaliana] gb|AAC98455.1~gene_id:MRN17.17~strong similarity to unknown
  misc_feature (20)..(465): Homolog of NCBI NO: 25407954 NR Description: hypothetical protein At2g28110 [imported] - thaliana >gi|4063747|gb|AAC98455.1| hypothetical protein
  misc_feature (232)..(464): Homolog of NCBI NO: 34902390 NR Description: Unknown protein [Oryza sativa (japonica
  misc_feature (115)..(232): Homolog of NCBI NO: 34902390 NR Description: Unknown protein [Oryza sativa (japonica
  misc_feature (115)..(457): Homolog of NCBI NO: 34907046 NR Description: contains EST D39982(S1682)~similar to Arabidopsis
  misc_feature (105)..(457): Homolog of NCBI NO: 34907044 NR Description: hypothetical protein~similar to Arabidopsis
  misc_feature (115)..(457): Homolog of NCBI NO: 34907048 NR Description: contains EST D24978(R2878)~similar to Arabidopsis
  misc_feature (115)..(461): Homolog of NCBI NO: 15223522 NR Description: hypothetical protein [Arabidopsis thaliana]
  misc_feature (115)..(457): Homolog of NCBI NO: 38347167 NR Description: OSJNBa0039C07.13 [Oryza sativa (japonica
  misc_feature (115)..(464): Homolog of NCBI NO: 18424516 NR Description: (AtGUT1) NpGUT1 homolog [Arabidopsis thaliana] AT5g61840/mac9_140 [Arabidopsis thaliana]
MQLNNNRGGNKRNIFIFFFFRNYYTWILWFCLSLYFFTSYFSVEDQSSPSSIRLLSNHKTSSSLPSRALIESSAIKTTSIGKKASIFISSLFQIFHFSSKIDFLGSLIKGLFTGMKIYVYDLPASYNDDWVTASDRCASHLFAAEVAIHRALLSSDVRTLDPDEADYFFVPVYVSCNFSTSNGFPSLSHARSLLSSAVDFLSDHYPFWNRSQGSDHVFVASHDFGACFHAMEDMAIEEGIPKFMKRSIILQTFGVKYKHPCQEVEHVVIPPYIPPESVQKAIEKAPVNGRRDIWAFFRGKMEVNPKNISGRFYSKGVRTAILKKFGGRRRFYLNRHRFAGYRSEIVRSVFCLCPLGWAPWSPRLVESAVLGCVPVVIADGIQLPFSETVQWPEISLTVAEKDVRNLRKVLEHVAATNLSAIQRNLHEPVFKRALLYNVPMKEGDATWHILESLWRKLDDRSYRRSRVLSQREVDM

SEQ ID NO: 100954 - protein, 361 aa, Arabidopsis thaliana; identical to SEQ ID NO: 78151
  peptide (1)..(361): Ceres Seq. ID no. 13606481
  misc_feature (3)..(311): Pfam Name: Exostosin family Pfam Description: Exostosin family
  misc_feature (1)..(361): Homolog of NCBI NO: 15237173 NR Description: expressed protein [Arabidopsis thaliana] gb|AAC98455.1~gene_id:MRN17.17~strong similarity to unknown
  misc_feature (1)..(351): Homolog of NCBI NO: 25407954 NR Description: hypothetical protein At2g28110 [imported] - thaliana >gi|4063747|gb|AAC98455.1| hypothetical protein
  misc_feature (118)..(350): Homolog of NCBI NO: 34902390 NR Description: Unknown protein [Oryza sativa (japonica
  misc_feature (1)..(118): Homolog of NCBI NO: 34902390 NR Description: Unknown protein [Oryza sativa (japonica
  misc_feature (1)..(343): Homolog of NCBI NO: 34907046 NR Description: contains EST D39982(S1682)~similar to Arabidopsis
  misc_feature (1)..(343): Homolog of NCBI NO: 34907044 NR Description: hypothetical protein~similar to Arabidopsis
  misc_feature (1)..(343): Homolog of NCBI NO: 34907048 NR Description: contains EST D24978(R2878)~similar to Arabidopsis
  misc_feature (1)..(347): Homolog of NCBI NO: 15223522 NR Description: hypothetical protein [Arabidopsis thaliana]
  misc_feature (1)..(343): Homolog of NCBI NO: 38347167 NR Description: OSJNBa0039C07.13 [Oryza sativa (japonica
  misc_feature (1)..(350): Homolog of NCBI NO: 18424516 NR Description: (AtGUT1) NpGUT1 homolog [Arabidopsis thaliana] AT5g61840/mac9_140 [Arabidopsis thaliana]

SEQ ID NO: 100955 - DNA, 2015 bp, Arabidopsis thaliana
  misc_feature (1)..(2015): Ceres Seq. ID no. 13606506
  misc_feature: MA Experiment ID: 20000307 Result: Down-regulated in Transcription
  misc_feature: MA Experiment 20000307 PARAMETER Experiment Name: At_Germinating_Seeds_Sub_P Parameter: Age (hr) Value: 24 vs. 0
  misc_feature: MA Experiment 20000307 PARAMETER Experiment Name: At_Germinating_Seeds_Sub_P Parameter: Organism Value: A. thaliana
  misc_feature: MA Experiment 20000307 PARAMETER Experiment Name: At_Germinating_Seeds_Sub_P Parameter: Plant Line Value: WS
  misc_feature: MA Experiment 20000307 PARAMETER Experiment Name: At_Germinating_Seeds_Sub_P Parameter: Tissue Value: Germinating Seeds
  misc_feature: MA Experiment ID: 20000328 Result: Down-regulated in Transcription
  misc_feature: MA Experiment 20000328 PARAMETER Experiment Name: At_42deg_Heat_Sub_P Parameter: Age (day) Value: 14
  misc_feature: MA Experiment 20000328 PARAMETER Experiment Name: At_42deg_Heat_Sub_P Parameter: Organism Value: A. thaliana
  misc_feature: MA Experiment 20000328 PARAMETER Experiment Name: At_42deg_Heat_Sub_P Parameter: Plant Line Value: WS
  misc_feature: MA Experiment 20000328 PARAMETER Experiment Name: At_42deg_Heat_Sub_P Parameter: Temperature (deg C) Value: 42 vs. 22
  misc_feature: MA Experiment 20000328 PARAMETER Experiment Name: At_42deg_Heat_Sub_P Parameter: Timepoint (hr) Value: 6
  misc_feature: MA Experiment 20000328 PARAMETER Experiment Name: At_42deg_Heat_Sub_P Parameter: Tissue Value: Aerial
  misc_feature: MA Experiment ID: 20000355 Result: Down-regulated in Transcription
  misc_feature: MA Experiment 20000355 PARAMETER Experiment Name: At_Siliques_Sub_P Parameter: Age (day) Value: 21
  misc_feature: MA Experiment 20000355 PARAMETER Experiment Name: At_Siliques_Sub_P Parameter: Organism Value: A. thaliana
  misc_feature: MA Experiment 20000355 PARAMETER Experiment Name: At_Siliques_Sub_P Parameter: Plant Line Value: WS
  misc_feature: MA Experiment 20000355 PARAMETER Experiment Name: At_Siliques_Sub_P Parameter: Tissue Value: Less Than 5mm Siliques vs. Whole Plant
acaggcgaaattataatggcctgcctctcttccttcttatctcttttacttacactctccaggtccctcacttccctcattggacctctctaactctcctctcttaccttctcctgtttaaattcttctcctttctttccacaatttctgtctaaccaattccaacaccaaaaaattccatttcttgacgatgaaacgaagccatcaagaaacgtctgtagaagaagaagctccttcaatggtggagaagttagaaaatggttgtggtggtggtggagacgataacatggacgagtttcttgctgttttgggttacaaggttcgatcttcagacatggcagatgttgcacagaagcttgaacagcttgaaatggtcttgtccaatgatattgcctcttctagtaatgccttcaatgacaccgttcattacaatccttctgatctctccggttgggctcagagcatgctctcggatcttaattactacccggatcttgacccgaaccggatttgcgatctgagaccaatcacagacgacgatgagtgttgcagtagcaatagtaacagcaacaagaggattcgactcggtccttggtgtgactcagtgaccagcgagtcaactcgttccgtggtgcttatcgaggagacaggagttagactcgttcaggcgctagtggcctgcgccgaggcggttcagctggagaatctgagcctcgcggatgctctcgtcaagcgcgtgggattactcgcggcttctcaagccggagccatggggaaagtcgctacctacttcgccgaagccctagctcgtcgaatttaccggattcatccttccgccgccgccattgatccttccttcgaagagattcttcagatgaacttctacgactcgtgtccctacctgaaattcgctcatttcacggccaatcaggcgattctagaagctgttacgacgtcgcgtgtcgtacacgtaatcgatctagggcttaatcaaggtatgcaatggccggcgttaatgcaagccttagctctccgacccggtggtccaccgtcgtttcgtctcaccggcgttgggaatccgtcgaatcgagaagggattcaagagttaggttggaagctagctcagctggctcaagccatcggcgtcgaattcaaattcaatggtctaacgacggagaggttatccgatttagaaccggatatgttcgagacccgaaccgaatcggagactctagtggttaattcggttttcgagcttcacccggttttatcccaacccggttcgatcgaaaagctgttagcgacggttaaggcggttaaaccgggtctcgtaacagtggtggaacaagaagcgaaccataacggtgacgttttcttagaccggtttaacgaagcgcttcactattactcgagcttgttcgactcgctcgaagatggtgttgtgataccgagtcaagaccgagtcatgtcggaggtttacttagggagacagatattgaacttggtggcgacggaaggaagcgataggatcgagcgacacgagacgctggctcagtggcgaaaacgtatgggatccgccgggtttgacccggttaacctcggatcagacgcgtttaagcaagcgagtttgctattggcgttatctggcggtggagatggatacagagtggaggagaacgacggaagcctaatgcttgcgtggcaaacgaaacctctaatcgctgcatcggcgtggaaactagcggcggagttgcggcggtagatacgtcgtcataaagaggagaagaaaaaagacttagcgaacgtgaccttatgtttttattttactttaacttaccccagtagtttcgttttgtgacaatttcgcccgaaatattccgtgccttatacttttgggacccagttggttcgttggtcgtggagattcgagaacgaggaacatgtgtgtatgtaacaacagcacgagcaagtgttttcatagtttgaataaatatgaaagaaatgacgtttatttt

SEQ ID NO: 100956 - protein, 523 aa, Arabidopsis thaliana
  peptide (1)..(523): Ceres Seq. ID no. 13606507
  misc_feature (131)..(425): Pfam Name: GRAS family transcription factor Pfam Description: GRAS family transcription factor
  misc_feature (1)..(523): Homolog of NCBI NO: 15237971 NR Description: gibberellin response modulator, putative
  misc_feature (62)..(518): Homolog of NCBI NO: 15228553 NR Description: gibberellin response modulator, putative
  misc_feature (62)..(518): Homolog of NCBI NO: 26451075 NR Description: putative RGA1 [Arabidopsis thaliana]
  misc_feature (121)..(518): Homolog of NCBI NO: 20334379 NR Description: GAI-like protein 1 [Vitis vinifera]
  misc_feature (30)..(137): Homolog of NCBI NO: 20334379 NR Description: GAI-like protein 1 [Vitis vinifera]
  misc_feature (1)..(517): Homolog of NCBI NO: 15219630 NR Description: gibberellin response modulator (RGAL)
  misc_feature (2)..(517): Homolog of NCBI NO: 3021336 NR Description: RGA-like [Arabidopsis thaliana]
  misc_feature (13)..(511): Homolog of NCBI NO: 29122893 NR Description: GIA/RGA-like gibberellin response modulator
  misc_feature (138)..(518): Homolog of NCBI NO: 2339978 NR Description: RGA1 protein [Arabidopsis thaliana]
  misc_feature (4)..(120): Homolog of NCBI NO: 2339978 NR Description: RGA1 protein [Arabidopsis thaliana]
MKRSHQETSVEEEAPSMVEKLENGCGGGGDDNMDEFLAVLGYKVRSSDMADVAQKLEQLEMVLSNDIASSSNAFNDTVHYNPSDLSGWAQSMLSDLNYYPDLDPNRICDLRPITDDDECCSSNSNSNKRIRLGPWCDSVTSESTRSVVLIEETGVRLVQALVACAEAVQLENLSLADALVKRVGLLAASQAGAMGKVATYFAEALARRIYRIHPSAAAIDPSFEEILQMNFYDSCPYLKFAHFTANQAILEAVTTSRVVHVIDLGLNQGMQWPALMQALALRPGGPPSFRLTGVGNPSNREGIQELGWKLAQLAQAIGVEFKFNGLTTERLSDLEPDMFETRTESETLVVNSVFELHPVLSQPGSIEKLLATVKAVKPGLVTVVEQEANHNGDVFLDRFNEALHYYSSLFDSLEDGVVIPSQDRVMSEVYLGRQILNLVATEGSDRIERHETLAQWRKRMGSAGFDPVNLGSDAFKQASLLLALSGGGDGYRVEENDGSLMLAWQTKPLIAASAWKLAAELRR

SEQ ID NO: 100957 - protein, 507 aa, Arabidopsis thaliana
  peptide (1)..(507): Ceres Seq. ID no. 13606508
  misc_feature (115)..(409): Pfam Name: GRAS family transcription factor Pfam Description: GRAS family transcription factor
  misc_feature (1)..(507): Homolog of NCBI NO: 15237971 NR Description: gibberellin response modulator, putative
  misc_feature (46)..(502): Homolog of NCBI NO: 15228553 NR Description: gibberellin response modulator, putative
  misc_feature (46)..(502): Homolog of NCBI NO: 26451075 NR Description: putative RGA1 [Arabidopsis thaliana]
  misc_feature (105)..(502): Homolog of NCBI NO: 20334379 NR Description: GAI-like protein 1 [Vitis vinifera]
  misc_feature (14)..(121): Homolog of NCBI NO: 20334379 NR Description: GAI-like protein 1 [Vitis vinifera]
  misc_feature (1)..(501): Homolog of NCBI NO: 15219630 NR Description: gibberellin response modulator (RGAL)
  misc_feature (1)..(501): Homolog of NCBI NO: 3021336 NR Description: RGA-like [Arabidopsis thaliana]
  misc_feature (1)..(495): Homolog of NCBI NO: 29122893 NR Description: GIA/RGA-like gibberellin response modulator
  misc_feature (122)..(502): Homolog of NCBI NO: 2339978 NR Description: RGA1 protein [Arabidopsis thaliana]
  misc_feature (1)..(104): Homolog of NCBI NO: 2339978 NR Description: RGA1 protein [Arabidopsis thaliana]
MVEKLENGCGGGGDDNMDEFLAVLGYKVRSSDMADVAQKLEQLEMVLSNDIASSSNAFNDTVHYNPSDLSGWAQSMLSDLNYYPDLDPNRICDLRPITDDDECCSSNSNSNKRIRLGPWCDSVTSESTRSVVLIEETGVRLVQALVACAEAVQLENLSLADALVKRVGLLAASQAGAMGKVATYFAEALARRIYRIHPSAAAIDPSFEEILQMNFYDSCPYLKFAHFTANQAILEAVTTSRVVHVIDLGLNQGMQWPALMQALALRPGGPPSFRLTGVGNPSNREGIQELGWKLAQLAQAIGVEFKFNGLTTERLSDLEPDMFETRTESETLVVNSVFELHPVLSQPGSIEKLLATVKAVKPGLVTVVEQEANHNGDVFLDRFNEALHYYSSLFDSLEDGVVIPSQDRVMSEVYLGRQILNLVATEGSDRIERHETLAQWRKRMGSAGFDPVNLGSDAFKQASLLLALSGGGDGYRVEENDGSLMLAWQTKPLIAASAWKLAAELRR

SEQ ID NO: 100958 - protein, 491 aa, Arabidopsis thaliana
  peptide (1)..(491): Ceres Seq. ID no. 13606509
  misc_feature (99)..(393): Pfam Name: GRAS family transcription factor Pfam Description: GRAS family transcription factor
  misc_feature (1)..(491): Homolog of NCBI NO: 15237971 NR Description: gibberellin response modulator, putative
  misc_feature (30)..(486): Homolog of NCBI NO: 15228553 NR Description: gibberellin response modulator, putative
  misc_feature (30)..(486): Homolog of NCBI NO: 26451075 NR Description: putative RGA1 [Arabidopsis thaliana]
  misc_feature (89)..(486): Homolog of NCBI NO: 20334379 NR Description: GAI-like protein 1 [Vitis vinifera]
  misc_feature (1)..(105): Homolog of NCBI NO: 20334379 NR Description: GAI-like protein 1 [Vitis vinifera]
  misc_feature (1)..(485): Homolog of NCBI NO: 15219630 NR Description: gibberellin response modulator (RGAL)
  misc_feature (1)..(485): Homolog of NCBI NO: 3021336 NR Description: RGA-like [Arabidopsis thaliana]
  misc_feature (1)..(479): Homolog of NCBI NO: 29122893 NR Description: GIA/RGA-like gibberellin response modulator
  misc_feature (106)..(486): Homolog of NCBI NO: 2339978 NR Description: RGA1 protein [Arabidopsis thaliana]
  misc_feature (1)..(88): Homolog of NCBI NO: 2339978 NR Description: RGA1 protein [Arabidopsis thaliana]
MDEFLAVLGYKVRSSDMADVAQKLEQLEMVLSNDIASSSNAFNDTVHYNPSDLSGWAQSMLSDLNYYPDLDPNRICDLRPITDDDECCSSNSNSNKRIRLGPWCDSVTSESTRSVVLIEETGVRLVQALVACAEAVQLENLSLADALVKRVGLLAASQAGAMGKVATYFAEALARRIYRIHPSAAAIDPSFEEILQMNFYDSCPYLKFAHFTANQAILEAVTTSRVVHVIDLGLNQGMQWPALMQALALRPGGPPSFRLTGVGNPSNREGIQELGWKLAQLAQAIGVEFKFNGLTTERLSDLEPDMFETRTESETLVVNSVFELHPVLSQPGSIEKLLATVKAVKPGLVTVVEQEANHNGDVFLDRFNEALHYYSSLFDSLEDGVVIPSQDRVMSEVYLGRQILNLVATEGSDRIERHETLAQWRKRMGSAGFDPVNLGSDAFKQASLLLALSGGGDGYRVEENDGSLMLAWQTKPLIAASAWKLAAELRR

SEQ ID NO: 100959 - DNA, 1238 bp, Arabidopsis thaliana
  misc_feature (1)..(1238): Ceres Seq. ID no. 13606510
  misc_feature: MA Experiment ID: 20000437 Result: Down-regulated in Transcription
  misc_feature: MA Experiment 20000437 PARAMETER Experiment Name: At_Drought_P Parameter: Age (day) Value: 8
  misc_feature: MA Experiment 20000437 PARAMETER Experiment Name: At_Drought_P Parameter: Organism Value: A. thaliana
  misc_feature: MA Experiment 20000437 PARAMETER Experiment Name: At_Drought_P Parameter: Plant Line Value: WS
  misc_feature: MA Experiment 20000437 PARAMETER Experiment Name: At_Drought_P Parameter: Timepoint (hr) Value: 24
  misc_feature: MA Experiment 20000437 PARAMETER Experiment Name: At_Drought_P Parameter: Tissue Value: Whole Plant
  misc_feature: MA Experiment 20000437 PARAMETER Experiment Name: At_Drought_P Parameter: Treatment Value: Drought vs. No Drought
  misc_feature: MA Experiment ID: 20000439 Result: Down-regulated in Transcription
  misc_feature: MA Experiment 20000439 PARAMETER Experiment Name: At_Roots__P Parameter: Age (day) Value: 14 vs. 21
  misc_feature: MA Experiment 20000439 PARAMETER Experiment Name: At_Roots__P Parameter: Organism Value: A. thaliana
  misc_feature: MA Experiment 20000439 PARAMETER Experiment Name: At_Roots__P Parameter: Tissue Value: Roots vs. Whole Plant
atcttccttatctctctccgccactctccttctctttctccgaactcttcgatggccggtctactcaaaacgccgtctttacatctcacaccaactcttcttcatgctccttctgtaccctttaagcccttttgcgtatctttcgccggaggaagaaacgttagcgtctcactctctcgccgagcttctctccggtctgtctctagcggctatcctctccgcttactaaacctcgtaccctttgcttcgggagaagctgagacgacggagacggaggtggaatcgaacgaacccgaagagacggatggtgctgttgatgtcgagaatgaaaatgccagtgctgaggagggtgaagctgaggaagaagaagcagctgttatcacagcgttgctgaaatcctataaagaagctttagcagacaacaacgaggggaagattgctgagatagaagcatctttaaagtccatagaagatgaaaaatttctgcttgcggataaagtagcgtctttatccaatgagttatcggtggagagggatcggcttataagaatcagtgcagatttcgacaacttcaggaagaggactgagagggaaaggctaaaccttgtttcaaatgctcaaggagaggttgtagagaatcttttggctgttttggataatttcgagagagctaaatcccaaattaaggtggagactgagggagaagagaaagtcactaatagctatcagagcatatacaaacagtttgtagaaattctgggatcacttggtgttatccatgtggagacagtcggcaagcagtttgatccaatgctacatgaggcaataatgagagaagactctgcggaatacgaagagggtatagtactagaagaatacaggaaaggtttcttgctaggtgaaaggcttttacgtccttcaatggtgaaagtatcagctggacctggaccagaaaagccccttgaagctgaaggagaagaagccacagcacaaggaagcgcagaagaagaatcatcttcatcttgaaattgaagatgatcaagactcagcagttttgtgtgcgtgtgtgtgagagagatacagagataaaagagggagaggtctgttttaccattattgttgttattgttattgatacgttatatcatttctacagagtctagaagtaatatagatcgacatttttaatgaattcttaagtattcaatccgaaagggaatgccataattgattttttt

SEQ ID NO: 100960 - protein, 341 aa, Arabidopsis thaliana
  peptide (1)..(341): Ceres Seq. ID no. 13606511
  misc_feature (151)..(313): Pfam Name: GrpE Pfam Description: GrpE
  misc_feature (18)..(341): Homolog of NCBI NO: 18418410 NR Description: chloroplast GrpE protein [Arabidopsis thaliana] putative chloroplast GrpE protein [Arabidopsis thaliana]
  misc_feature (18)..(341): Homolog of NCBI NO: 30686476 NR Description: chloroplast GrpE protein [Arabidopsis thaliana] GrpE protein [Arabidopsis thaliana] >gi|9759048|dbj|BAB09570.1|
  misc_feature (118)..(329): Homolog of NCBI NO: 18400095 NR Description: heat shock protein -related [Arabidopsis thaliana]
  misc_feature (118)..(329): Homolog of NCBI NO: 21593629 NR Description: putative heat shock protein [Arabidopsis thaliana]
  misc_feature (112)..(328): Homolog of NCBI NO: 32488078 NR Description: OSJNBa0084A10.6 [Oryza sativa (japonica
  misc_feature (110)..(317): Homolog of NCBI NO: 15384277 NR Description: co-chaperone CGE1 precursor isoform a
  misc_feature (108)..(317): Homolog of NCBI NO: 15384279 NR Description: co-chaperone CGE1 precursor isoform b
  misc_feature (83)..(322): Homolog of NCBI NO: 23041352 NR Description: hypothetical protein [Trichodesmium erythraeum
  misc_feature (107)..(315): Homolog of NCBI NO: 22298857 NR Description: heat shock protein [Thermosynechococcus elongatus >gi|22295038|dbj|BAC08866.1| heat shock protein
  misc_feature (87)..(330): Homolog of NCBI NO: 23130154 NR Description: hypothetical protein [Nostoc punctiforme]
IFLISLRHSPSLSPNSSMAGLLKTPSLHLTPTLLHAPSVPFKPFCVSFAGGRNVSVSLSRRASLRSVSSGYPLRLLNLVPFASGEAETTETEVESNEPEETDGAVDVENENASAEEGEAEEEEAAVITALLKSYKEALADNNEGKIAEIEASLKSIEDEKFLLADKVASLSNELSVERDRLIRISADFDNFRKRTERERLNLVSNAQGEVVENLLAVLDNFERAKSQIKVETEGEEKVTNSYQSIYKQFVEILGSLGVIHVETVGKQFDPMLHEAIMREDSAEYEEGIVLEEYRKGFLLGERLLRPSMVKVSAGPGPEKPLEAEGEEATAQGSAEEESSSS

SEQ ID NO: 100961 - protein, 324 aa, Arabidopsis thaliana
  peptide (1)..(324): Ceres Seq. ID no. 13606512
  misc_feature (134)..(296): Pfam Name: GrpE Pfam Description: GrpE
  misc_feature (1)..(324): Homolog of NCBI NO: 18418410 NR Description: chloroplast GrpE protein [Arabidopsis thaliana] putative chloroplast GrpE protein [Arabidopsis thaliana]
  misc_feature (1)..(324): Homolog of NCBI NO: 30686476 NR Description: chloroplast GrpE protein [Arabidopsis thaliana] GrpE protein [Arabidopsis thaliana] >gi|9759048|dbj|BAB09570.1|
  misc_feature (101)..(312): Homolog of NCBI NO: 18400095 NR Description: heat shock protein -related [Arabidopsis thaliana]
  misc_feature (101)..(312): Homolog of NCBI NO: 21593629 NR Description: putative heat shock protein [Arabidopsis thaliana]
  misc_feature (95)..(311): Homolog of NCBI NO: 32488078 NR Description: OSJNBa0084A10.6 [Oryza sativa (japonica
  misc_feature (93)..(300): Homolog of NCBI NO: 15384277 NR Description: co-chaperone CGE1 precursor isoform a
  misc_feature (91)..(300): Homolog of NCBI NO: 15384279 NR Description: co-chaperone CGE1 precursor isoform b
  misc_feature (66)..(305): Homolog of NCBI NO: 23041352 NR Description: hypothetical protein [Trichodesmium erythraeum
  misc_feature (90)..(298): Homolog of NCBI NO: 22298857 NR Description: heat shock protein [Thermosynechococcus elongatus >gi|22295038|dbj|BAC08866.1| heat shock protein
  misc_feature (70)..(313): Homolog of NCBI NO: 23130154 NR Description: hypothetical protein [Nostoc punctiforme]
MAGLLKTPSLHLTPTLLHAPSVPFKPFCVSFAGGRNVSVSLSRRASLRSVSSGYPLRLLNLVPFASGEAETTETEVESNEPEETDGAVDVENENASAEEGEAEEEEAAVITALLKSYKEALADNNEGKIAEIEASLKSIEDEKFLLADKVASLSNELSVERDRLIRISADFDNFRKRTERERLNLVSNAQGEVVENLLAVLDNFERAKSQIKVETEGEEKVTNSYQSIYKQFVEILGSLGVIHVETVGKQFDPMLHEAIMREDSAEYEEGIVLEEYRKGFLLGERLLRPSMVKVSAGPGPEKPLEAEGEEATAQGSAEEESSSS

SEQ ID NO: 100962 - DNA, 2295 bp, Arabidopsis thaliana
  misc_feature (1)..(2295): Ceres Seq. ID no. 13606516
  misc_feature: MA Experiment ID: 20000315 Result: Down-regulated in Transcription
  misc_feature: MA Experiment 20000315 PARAMETER Experiment Name: At_14day_Shoots-Roots_Sub_P Parameter: Age (day) Value: 14
  misc_feature: MA Experiment 20000315 PARAMETER Experiment Name: At_14day_Shoots-Roots_Sub_P Parameter: Organism Value: A. thaliana
  misc_feature: MA Experiment 20000315 PARAMETER Experiment Name: At_14day_Shoots-Roots_Sub_P Parameter: Plant Line Value: WS
  misc_feature: MA Experiment 20000315 PARAMETER Experiment Name: At_14day_Shoots-Roots_Sub_P Parameter: Tissue Value: Shoots vs. Whole Plant
atgccagagttaagaagtggagcacgtagattgagacaacctagccctcaggtgactggtcaggcggataatattgaacttcctcctcagcctgtaacaaggagaagaggcggtggtggtagaggaaggggaaacgccaaaggtgctgcacctccaagaccagctggtggtgtcggtaggggtcgaggcatcagattaatagatttagaggcagaaccttgtgaagttcgtccagcagtaggtgaacctgcttttaatcaagttgaagcggtagctgaaaaggatattgctatggaaggtggtagcgcagagaaggtagttggtgtggaagaagattctagcacagctccagtccctgaaagggtacaagttggaaattctcctgtatataagactgagaggaaactcggtaaaggaggctttggtcaagtttttgttggtagaagggtgagtggtggcagcgataggattggggccgatgcaattgaggtggccctgaaatttgagcatcgaaatagcaaaggatgcaattttggtccaccttacgagtggcaagtgtacaataccctcaatggttgctatggagttcctgcggtacatcataagggtcgtcaaggagatttttacattcttgtcatggacatgcttggtccgagtctctgggatgtttggaattcttcggggcaatcgatgtctccaaacatggtagcctgcattgcagttgagtccatatctattcttgagaaacttcatatgaaagggtttgtccacggagatgtgaagccggaaaactttttactcggtcaaccaggaacagcagatgagaaaaaactctaccttatcgatcttggtctggcatctaaatggaaagattcacactcaggccagcatgttgaatatgatcaaagacctgatgtgttcaggggaacgataaggtatgcaagtgttcatgcacacctaggtcgaactggaagtaggagagatgatctggagtcgctggcttatactttaatttttcttttgaagggaagattgccatggcaaggatatcagggtgacaacaagagctttcttgtttgcaagaaaaagatgtcaacttctcctgaattgatgtgctgtttttgtccacccccgtttaagctcttcctcgaggcagttacaaacatgaagtttgacgaagagcccaactatgcaaagcttatttcgatttttgattctcttattgaacaatgtgcactatctagaccaattaaaattgatggtgctcttaaggttgggcaaaaacgaggaagaatgcttcttaatttggatgaggatgaacagccaaagaagaaaatcagaattggcagtcctgcttgtcagtggatctcagtctataatgctcgtcgtcccatgaaacagagatatcactacaacgttgcagactcaaggttgcatcagcatgtacagaagggtaatgaggatggccttttaattagctgtgtagcatcagcagctaatctctgggccctcataatggatgctgggactggattcacctctcaagtttatgaattgtcaactgtcttccttcacaaggactggattatggaacaatgggaaaagaactactatatcagttccatagctggttcagataacgggaactcattagttgttatgtcaaaaggaacgtcttatactcagcaatcttacaaagtcagcgactcttttcctttcaagtggataaacaagaaatggaaagaagatttccatgtaacctccatgacaactgctgggaatcgttggggtgtggtaatgtcgaggaattctggctactctgatcaggtcgtggagctcgactttttgtacccaagcgatggaatacataggaggtgggaaagtgggtataggataacatcaatggcagcaactgcagatcaagcagctttcatattaagcgtaccaaaacgtaaaatgatggatgaaactcaagagactcttcgcaccaccgcctttccaagcactcatgtcaaggaaaaatgggcgaaaaatctgtacattgcatcaatatgctttgggaggacagtttgctgaggtacttagcatcatatgaaagccaagaagacaattggaggataaggatcataatacgatcaagaaggtaacgcaacctgtttgttaaatgtaatgaaatggatgcgtgttcgtatgtatgtagaagtataaaaggatagaaaagatggtaacagagaagttgaattagttttaatagaaagttttgagggctttttaagccttcaagtgtgcttactt

SEQ ID NO: 100963 - protein, 691 aa, Arabidopsis thaliana
  peptide (1)..(691): Ceres Seq. ID no. 13606517
  misc_feature (1)..(690): Homolog of NCBI NO: 34909952 NR Description: putative casein kinase [Oryza sativa (japonica group)] >gi|20160915|dbj|BAB89852.1| putative casein kinase
  misc_feature (10)..(691): Homolog of NCBI NO: 28269422 NR Description: putative serine/threonine protein kinase [Oryza
  misc_feature (1)..(691): Homolog of NCBI NO: 34394436 NR Description: putative casein kinase 1, delta isoform 1 [Oryza
  misc_feature (1)..(690): Homolog of NCBI NO: 15231321 NR Description: casein kinase -related [Arabidopsis thaliana]
  misc_feature (78)..(690): Homolog of NCBI NO: 30682888 NR Description: protein kinase family [Arabidopsis thaliana]
  misc_feature (231)..(691): Homolog of NCBI NO: 6006848 NR Description: unknown protein, 5' partial [Arabidopsis thaliana]
  misc_feature (110)..(690): Homolog of NCBI NO: 18139937 NR Description: serine/threonine protein kinase [Chlamydomonas
  misc_feature (385)..(691): Homolog of NCBI NO: 28392919 NR Description: putative casein kinase [Arabidopsis thaliana]
  misc_feature (122)..(464): Homolog of NCBI NO: 39645523 NR Description: Unknown (protein for MGC:77627) [Danio rerio]
  misc_feature (122)..(449): Homolog of NCBI NO: 6007766 NR Description: casein kinase I epsilon [Xenopus laevis]
MPELRSGARRLRQPSPQVTGQADNIELPPQPVTRRRGGGGRGRGNAKGAAPPRPAGGVGRGRGIRLIDLEAEPCEVRPAVGEPAFNQVEAVAEKDIAMEGGSAEKVVGVEEDSSTAPVPERVQVGNSPVYKTERKLGKGGFGQVFVGRRVSGGSDRIGADAIEVALKFEHRNSKGCNFGPPYEWQVYNTLNGCYGVPAVHHKGRQGDFYILVMDMLGPSLWDVWNSSGQSMSPNMVACIAVESISILEKLHMKGFVHGDVKPENFLLGQPGTADEKKLYLIDLGLASKWKDSHSGQHVEYDQRPDVFRGTIRYASVHAHLGRTGSRRDDLESLAYTLIFLLKGRLPWQGYQGDNKSFLVCKKKMSTSPELMCCFCPPPFKLFLEAVTNMKFDEEPNYAKLISIFDSLIEQCALSRPIKIDGALKVGQKRGRMLLNLDEDEQPKKKIRIGSPACQWISVYNARRPMKQRYHYNVADSRLHQHVQKGNEDGLLISCVASAANLWALIMDAGTGFTSQVYELSTVFLHKDWIMEQWEKNYYISSIAGSDNGNSLVVMSKGTSYTQQSYKVSDSFPFKWINKKWKEDFHVTSMTTAGNRWGVVMSRNSGYSDQVVELDFLYPSDGIHRRWESGYRITSMAATADQAAFILSVPKRKMMDETQETLRTTAFPSTHVKEKWAKNLYIASICFGRTVC

SEQ ID NO: 100964 - protein, 594 aa, Arabidopsis thaliana
  peptide (1)..(594): Ceres Seq. ID no. 13606518
  misc_feature (1)..(593): Homolog of NCBI NO: 34909952 NR Description: putative casein kinase [Oryza sativa (japonica group)] >gi|20160915|dbj|BAB89852.1| putative casein kinase
  misc_feature (1)..(594): Homolog of NCBI NO: 28269422 NR Description: putative serine/threonine protein kinase [Oryza
  misc_feature (1)..(594): Homolog of NCBI NO: 34394436 NR Description: putative casein kinase 1, delta isoform 1 [Oryza
  misc_feature (1)..(593): Homolog of NCBI NO: 15231321 NR Description: casein kinase -related [Arabidopsis thaliana]
  misc_feature (1)..(593): Homolog of NCBI NO: 30682888 NR Description: protein kinase family [Arabidopsis thaliana]
  misc_feature (134)..(594): Homolog of NCBI NO: 6006848 NR Description: unknown protein, 5' partial [Arabidopsis thaliana]
  misc_feature (13)..(593): Homolog of NCBI NO: 18139937 NR Description: serine/threonine protein kinase [Chlamydomonas
  misc_feature (288)..(594): Homolog of NCBI NO: 28392919 NR Description: putative casein kinase [Arabidopsis thaliana]
  misc_feature (25)..(367): Homolog of NCBI NO: 39645523 NR Description: Unknown (protein for MGC:77627) [Danio rerio]
  misc_feature (25)..(352): Homolog of NCBI NO: 6007766 NR Description: casein kinase I epsilon [Xenopus laevis]
MEGGSAEKVVGVEEDSSTAPVPERVQVGNSPVYKTERKLGKGGFGQVFVGRRVSGGSDRIGADAIEVALKFEHRNSKGCNFGPPYEWQVYNTLNGCYGVPAVHHKGRQGDFYILVMDMLGPSLWDVWNSSGQSMSPNMVACIAVESISILEKLHMKGFVHGDVKPENFLLGQPGTADEKKLYLIDLGLASKWKDSHSGQHVEYDQRPDVFRGTIRYASVHAHLGRTGSRRDDLESLAYTLIFLLKGRLPWQGYQGDNKSFLVCKKKMSTSPELMCCFCPPPFKLFLEAVTNMKFDEEPNYAKLISIFDSLIEQCALSRPIKIDGALKVGQKRGRMLLNLDEDEQPKKKIRIGSPACQWISVYNARRPMKQRYHYNVADSRLHQHVQKGNEDGLLISCVASAANLWALIMDAGTGFTSQVYELSTVFLHKDWIMEQWEKNYYISSIAGSDNGNSLVVMSKGTSYTQQSYKVSDSFPFKWINKKWKEDFHVTSMTTAGNRWGVVMSRNSGYSDQVVELDFLYPSDGIHRRWESGYRITSMAATADQAAFILSVPKRKMMDETQETLRTTAFPSTHVKEKWAKNLYIASICFGRTVC

SEQ ID NO: 100965 - protein, 479 aa, Arabidopsis thaliana
  peptide (1)..(479): Ceres Seq. ID no. 13606519
  misc_feature (1)..(478): Homolog of NCBI NO: 34909952 NR Description: putative casein kinase [Oryza sativa (japonica group)] >gi|20160915|dbj|BAB89852.1| putative casein kinase
  misc_feature (1)..(479): Homolog of NCBI NO: 28269422 NR Description: putative serine/threonine protein kinase [Oryza
  misc_feature (1)..(479): Homolog of NCBI NO: 34394436 NR Description: putative casein kinase 1, delta isoform 1 [Oryza
  misc_feature (1)..(478): Homolog of NCBI NO: 15231321 NR Description: casein kinase -related [Arabidopsis thaliana]
  misc_feature (1)..(478): Homolog of NCBI NO: 30682888 NR Description: protein kinase family [Arabidopsis thaliana]
  misc_feature (19)..(479): Homolog of NCBI NO: 6006848 NR Description: unknown protein, 5' partial [Arabidopsis thaliana]
  misc_feature (1)..(478): Homolog of NCBI NO: 18139937 NR Description: serine/threonine protein kinase [Chlamydomonas
  misc_feature (173)..(479): Homolog of NCBI NO: 28392919 NR Description: putative casein kinase [Arabidopsis thaliana]
  misc_feature (1)..(252): Homolog of NCBI NO: 39645523 NR Description: Unknown (protein for MGC:77627) [Danio rerio]
  misc_feature (1)..(237): Homolog of NCBI NO: 6007766 NR Description: casein kinase I epsilon [Xenopus laevis]
MDMLGPSLWDVWNSSGQSMSPNMVACIAVESISILEKLHMKGFVHGDVKPENFLLGQPGTADEKKLYLIDLGLASKWKDSHSGQHVEYDQRPDVFRGTIRYASVHAHLGRTGSRRDDLESLAYTLIFLLKGRLPWQGYQGDNKSFLVCKKKMSTSPELMCCFCPPPFKLFLEAVTNMKFDEEPNYAKLISIFDSLIEQCALSRPIKIDGALKVGQKRGRMLLNLDEDEQPKKKIRIGSPACQWISVYNARRPMKQRYHYNVADSRLHQHVQKGNEDGLLISCVASAANLWALIMDAGTGFTSQVYELSTVFLHKDWIMEQWEKNYYISSIAGSDNGNSLVVMSKGTSYTQQSYKVSDSFPFKWINKKWKEDFHVTSMTTAGNRWGVVMSRNSGYSDQVVELDFLYPSDGIHRRWESGYRITSMAATADQAAFILSVPKRKMMDETQETLRTTAFPSTHVKEKWAKNLYIASICFGRTVC

SEQ ID NO: 100966 - DNA, 1817 bp, Arabidopsis thaliana
  misc_feature (1)..(1817): Ceres Seq. ID no. 13606552
  misc_feature: MA Experiment ID: 20000184 Result: Down-regulated in Transcription
  misc_feature: MA Experiment 20000184 PARAMETER Experiment Name: At_Shoots__P Parameter: Age (day) Value: 7
  misc_feature: MA Experiment 20000184 PARAMETER Experiment Name: At_Shoots__P Parameter: Tissue Value: Shoots vs. Whole Plant
  misc_feature: MA Experiment ID: 20000234 Result: Down-regulated in Transcription
  misc_feature: MA Experiment 20000234 PARAMETER Experiment Name: At_Siliques_P Parameter: Age (day) Value: 21
  misc_feature: MA Experiment 20000234 PARAMETER Experiment Name: At_Siliques_P Parameter: Organism Value: A. thaliana
  misc_feature: MA Experiment 20000234 PARAMETER Experiment Name: At_Siliques_P Parameter: Plant Line Value: WS
  misc_feature: MA Experiment 20000234 PARAMETER Experiment Name: At_Siliques_P Parameter: Tissue Value: Less Than 5mm Siliques vs. Whole Plant
caatcgaaccctattcctcactgaccctgacgtttatggcagaggaaggattcatcggaattggagaaagcgaagaagaagcggcagagatcggcgctttctcctacagccaccaccagatctctgacctgcgacgaagaagttgactgaaacaattatttgtttcgtggctggaatccatggggaagggccccttatcgtttcgccgtctttcaagcatccgtcaccggaaaaaaggttctgcggtgaaggatgactccgcacagacatcgacgccttcatctccaccgcctcccctaccgattcatgctggcggatcggctgtgggagcgacggggaaggcgaagaagaaaaccggaggagctaggctgtggatgaggtttgatcggactggtgctatggaagtggtggagtgcgataagagtacaatcatcaaacgtgcttctgttcccgctagggatttgaggatacttggccctgtcttctctcactcctctaacattctcgccagagagaaagctattgttgtgaatttagaggtcataaaggcaatagttactgcagaagaagtgttgttgttggatcctctccgtcctgaagttcttccattcgttgaacgactaaagcaacagtttcctcagaggaatgggaatgaaaatgcactgcaagcttctgcgaatgtacaatctcctcttgatccagaagctgcagagggtttgcagagtgagcttccttttgagtttcaggtcctggagattgcacttgaggtcgtctgctcatttgttgataaaagtgtggctgctcttgagacagaagcttggcctgtccttgatgaactcactaagaatgtcagcactgagaatcttgaatatgtacgaagtttgaaaagtaatctcacccgcttgctagctcgtgtacaaaaggtgagagatgaactcgagcatttgttagatgacaacgaagacatggctgacttatacttaacaaggaaatggatccagaaccagcaaaccgaggcaatactggcgggtacagcatcaaacagcattgccctcccagcacataatacatcaaatcttcaccggctcacatcaaacagaagtgcgagtatggtgacgagcaatacagaggaagatgacgtggaggatttggagatgttgttggaggcatacttcatgcaactggatggaatgcggaacaagattcttacagtgagggagtacattgacgacacagaagactacgtgaacattcaactggataatcaacgaaacgaactgatccagctgcagctgacgctgaccatagcctcgtttgcaatagccgcagagacattgttggccagcttgtttggaatgaacataccatgtccattgtatagcatacatggcgtctttggttactttgtgtggagtgttactgcactttgcattgtgcttttcatggtcactcttggttacgccaggtggaagaagctgctaggctcataatctccctctctcttacaaaccatgtgccacttgtgtaataatttatacatatgttactggacagagttgtttcactcatatcttgtccagtgaagacgttagtgattcatatatgttgttgaggaacacatgtagatggaaatgatataagagtatatatgttgaagagaattatattcagacatcgaagtcattaaaatgtttaaactaattgtgcacataattgaactcttcaactagtttgctctcttctcaaagctctctcttattactcttccaatgatttttctctatattcctcacacaaaacattcatcctctaccttg

SEQ ID NO: 100967 - protein, 436 aa, Arabidopsis thaliana
  peptide (1)..(436): Ceres Seq. ID no. 13606553
  misc_feature (1)..(436): Homolog of NCBI NO: 11282358 NR Description: hypothetical protein F17J16.20 - Arabidopsis >gi|7529740|emb|CAB86925.1| putative protein [Arabidopsis
  misc_feature (1)..(436): Homolog of NCBI NO: 18411070 NR Description: expressed protein [Arabidopsis thaliana] AT3g58970/F17J16_20 [Arabidopsis thaliana]
  misc_feature (7)..(434): Homolog of NCBI NO: 30688025 NR Description: expressed protein [Arabidopsis thaliana]
  misc_feature (7)..(434): Homolog of NCBI NO: 25360918 NR Description: MRS2-6 [Arabidopsis thaliana]
  misc_feature (7)..(434): Homolog of NCBI NO: 7487682 NR Description: hypothetical protein T5F17.30 - Arabidopsis >gi|7269713|emb|CAB81446.1| putative protein [Arabidopsis
  misc_feature (115)..(435): Homolog of NCBI NO: 37536576 NR Description: putative CorA-like Mg2+ transporter protein
  misc_feature (56)..(436): Homolog of NCBI NO: 30698045 NR Description: expressed protein [Arabidopsis thaliana] contains similarity to unknown [Arabidopsis thaliana] >gi|17529326|gb|AAL38890.1| unknown
  misc_feature (55)..(436): Homolog of NCBI NO: 25360941 NR Description: MRS2-7 [Arabidopsis thaliana]
  misc_feature (55)..(436): Homolog of NCBI NO: 30682808 NR Description: expressed protein [Arabidopsis thaliana]
  misc_feature (56)..(408): Homolog of NCBI NO: 30698047 NR Description: expressed protein [Arabidopsis thaliana]
MGKGPLSFRRLSSIRHRKKGSAVKDDSAQTSTPSSPPPPLPIHAGGSAVGATGKAKKKTGGARLWMRFDRTGAMEVVECDKSTIIKRASVPARDLRILGPVFSHSSNILAREKAIVVNLEVIKAIVTAEEVLLLDPLRPEVLPFVERLKQQFPQRNGNENALQASANVQSPLDPEAAEGLQSELPFEFQVLEIALEVVCSFVDKSVAALETEAWPVLDELTKNVSTENLEYVRSLKSNLTRLLARVQKVRDELEHLLDDNEDMADLYLTRKWIQNQQTEAILAGTASNSIALPAHNTSNLHRLTSNRSASMVTSNTEEDDVEDLEMLLEAYFMQLDGMRNKILTVREYIDDTEDYVNIQLDNQRNELIQLQLTLTIASFAIAAETLLASLFGMNIPCPLYSIHGVFGYFVWSVTALCIVLFMVTLGYARWKKLLGS

SEQ ID NO: 100968 - protein, 371 aa, Arabidopsis thaliana
  peptide (1)..(371): Ceres Seq. ID no. 13606554
  misc_feature (1)..(371): Homolog of NCBI NO: 11282358 NR Description: hypothetical protein F17J16.20 - Arabidopsis >gi|7529740|emb|CAB86925.1| putative protein [Arabidopsis
  misc_feature (1)..(371): Homolog of NCBI NO: 18411070 NR Description: expressed protein [Arabidopsis thaliana] AT3g58970/F17J16_20 [Arabidopsis thaliana]
  misc_feature (1)..(369): Homolog of NCBI NO: 30688025 NR Description: expressed protein [Arabidopsis thaliana]
  misc_feature (1)..(369): Homolog of NCBI NO: 25360918 NR Description: MRS2-6 [Arabidopsis thaliana]
  misc_feature (1)..(369): Homolog of NCBI NO: 7487682 NR Description: hypothetical protein T5F17.30 - Arabidopsis >gi|7269713|emb|CAB81446.1| putative protein [Arabidopsis
  misc_feature (50)..(370): Homolog of NCBI NO: 37536576 NR Description: putative CorA-like Mg2+ transporter protein
  misc_feature (1)..(371): Homolog of NCBI NO: 30698045 NR Description: expressed protein [Arabidopsis thaliana] contains similarity to unknown [Arabidopsis thaliana] >gi|17529326|gb|AAL38890.1| unknown
  misc_feature (1)..(371): Homolog of NCBI NO: 25360941 NR Description: MRS2-7 [Arabidopsis thaliana]
  misc_feature (1)..(371): Homolog of NCBI NO: 30682808 NR Description: expressed protein [Arabidopsis thaliana]
  misc_feature (1)..(343): Homolog of NCBI NO: 30698047 NR Description: expressed protein [Arabidopsis thaliana]
MRFDRTGAMEVVECDKSTIIKRASVPARDLRILGPVFSHSSNILAREKAIVVNLEVIKAIVTAEEVLLLDPLRPEVLPFVERLKQQFPQRNGNENALQASANVQSPLDPEAAEGLQSELPFEFQVLEIALEVVCSFVDKSVAALETEAWPVLDELTKNVSTENLEYVRSLKSNLTRLLARVQKVRDELEHLLDDNEDMADLYLTRKWIQNQQTEAILAGTASNSIALPAHNTSNLHRLTSNRSASMVTSNTEEDDVEDLEMLLEAYFMQLDGMRNKILTVREYIDDTEDYVNIQLDNQRNELIQLQLTLTIASFAIAAETLLASLFGMNIPCPLYSIHGVFGYFVWSVTALCIVLFMVTLGYARWKKLLGS

SEQ ID NO: 100969 - protein, 363 aa, Arabidopsis thaliana
  peptide (1)..(363): Ceres Seq. ID no. 13606555
  misc_feature (1)..(363): Homolog of NCBI NO: 11282358 NR Description: hypothetical protein F17J16.20 - Arabidopsis >gi|7529740|emb|CAB86925.1| putative protein [Arabidopsis
  misc_feature (1)..(363): Homolog of NCBI NO: 18411070 NR Description: expressed protein [Arabidopsis thaliana] AT3g58970/F17J16_20 [Arabidopsis thaliana]
  misc_feature (1)..(361): Homolog of NCBI NO: 30688025 NR Description: expressed protein [Arabidopsis thaliana]
  misc_feature (1)..(361): Homolog of NCBI NO: 25360918 NR Description: MRS2-6 [Arabidopsis thaliana]
  misc_feature (1)..(361): Homolog of NCBI NO: 7487682 NR Description: hypothetical protein T5F17.30 - Arabidopsis >gi|7269713|emb|CAB81446.1| putative protein [Arabidopsis
  misc_feature (42)..(362): Homolog of NCBI NO: 37536576 NR Description: putative CorA-like Mg2+ transporter protein
  misc_feature (1)..(363): Homolog of NCBI NO: 30698045 NR Description: expressed protein [Arabidopsis thaliana] contains similarity to unknown [Arabidopsis thaliana] >gi|17529326|gb|AAL38890.1| unknown
  misc_feature (1)..(363): Homolog of NCBI NO: 25360941 NR Description: MRS2-7 [Arabidopsis thaliana]
  misc_feature (1)..(363): Homolog of NCBI NO: 30682808 NR Description: expressed protein [Arabidopsis thaliana]
  misc_feature (1)..(335): Homolog of NCBI NO: 30698047 NR Description: expressed protein [Arabidopsis thaliana]
MEVVECDKSTIIKRASVPARDLRILGPVFSHSSNILAREKAIVVNLEVIKAIVTAEEVLLLDPLRPEVLPFVERLKQQFPQRNGNENALQASANVQSPLDPEAAEGLQSELPFEFQVLEIALEVVCSFVDKSVAALETEAWPVLDELTKNVSTENLEYVRSLKSNLTRLLARVQKVRDELEHLLDDNEDMADLYLTRKWIQNQQTEAILAGTASNSIALPAHNTSNLHRLTSNRSASMVTSNTEEDDVEDLEMLLEAYFMQLDGMRNKILTVREYIDDTEDYVNIQLDNQRNELIQLQLTLTIASFAIAAETLLASLFGMNIPCPLYSIHGVFGYFVWSVTALCIVLFMVTLGYARWKKLLGS

SEQ ID NO: 100970 - DNA, 1836 bp, Arabidopsis thaliana
  misc_feature (1)..(1836): Ceres Seq. ID no. 13606566
  misc_feature: MA Experiment ID: 20000349 Result: Up-regulated in Transcription
  misc_feature: MA Experiment 20000349 PARAMETER Experiment Name: At_100uM_ABA_Sub_P Parameter: Age (day) Value: 14
  misc_feature: MA Experiment 20000349 PARAMETER Experiment Name: At_100uM_ABA_Sub_P Parameter: Organism Value: A. thaliana
  misc_feature: MA Experiment 20000349 PARAMETER Experiment Name: At_100uM_ABA_Sub_P Parameter: Plant Line Value: WS
  misc_feature: MA Experiment 20000349 PARAMETER Experiment Name: At_100uM_ABA_Sub_P Parameter: Timepoint (hr) Value: 6
  misc_feature: MA Experiment 20000349 PARAMETER Experiment Name: At_100uM_ABA_Sub_P Parameter: Tissue Value: Aerial
  misc_feature: MA Experiment 20000349 PARAMETER Experiment Name: At_100uM_ABA_Sub_P Parameter: Treatment Value: 100uM ABA vs. No Treatment
  misc_feature: MA Experiment ID: 20000352 Result: Up-regulated in Transcription
  misc_feature: MA Experiment 20000352 PARAMETER Experiment Name: At_Drought_Sub_P Parameter: Age (day) Value: 7
  misc_feature: MA Experiment 20000352 PARAMETER Experiment Name: At_Drought_Sub_P Parameter: Organism Value: A. thaliana
  misc_feature: MA Experiment 20000352 PARAMETER Experiment Name: At_Drought_Sub_P Parameter: Plant Line Value: WS
  misc_feature: MA Experiment 20000352 PARAMETER Experiment Name: At_Drought_Sub_P Parameter: Timepoint (hr) Value: 6
  misc_feature: MA Experiment 20000352 PARAMETER Experiment Name: At_Drought_Sub_P Parameter: Tissue Value: Whole Plant
  misc_feature: MA Experiment 20000352 PARAMETER Experiment Name: At_Drought_Sub_P Parameter: Treatment Value: Drought vs. No Drought
  misc_feature: MA Experiment ID: 20000355 Result: Up-regulated in Transcription
  misc_feature: MA Experiment 20000355 PARAMETER Experiment Name: At_Siliques_Sub_P Parameter: Age (day) Value: 21
  misc_feature: MA Experiment 20000355 PARAMETER Experiment Name: At_Siliques_Sub_P Parameter: Organism Value: A. thaliana
  misc_feature: MA Experiment 20000355 PARAMETER Experiment Name: At_Siliques_Sub_P Parameter: Plant Line Value: WS
  misc_feature: MA Experiment 20000355 PARAMETER Experiment Name: At_Siliques_Sub_P Parameter: Tissue Value: Less Than 5mm Siliques vs. Whole Plant
  misc_feature: MA Experiment ID: 20000440 Result: Up-regulated in Transcription
  misc_feature: MA Experiment 20000440 PARAMETER Experiment Name: At_Closed-Flower__Sub_P Parameter: Tissue Value: Closed Flower vs. Whole Plant
atgactacgtttctgaagtcactcatcttcttacaagattcatgtcttgccttcctctctctaatgttccatcgagggagttctgaggatgcagctgaagctctcaagaagcttgaaacatccataaatggtgcgaggataagcttcgacacgacatggacacgagaatttaggagcttatttatagttcccttattcaagtgtttggtggctttttgtttgataatctccctcttagttttcatagagggtatatacatgaaccttgtagtactctacgtcaaggtgtttgagcgaaaacccgaaaaagtttatagatgggaggcgatgcaagaggacattgagcttggacatgaaacctaccccatggtccttgtccaaattccaatgtacaacgaaaaagaggtccttcaattatctataggtgctgcatgtagactaatatggccattggaccgcctaattgttcaagttttagatgattccactgatcaaaccatcaaggagctggtgaacacagagtgtgcaaaatgggaaagcaaaggtgtaaatataaagtgtgagaggagagacaacagaaatggctacaaagccggagctcttaaagaaggcatgaagcacaactacgtgaagctatgcaattatgtcgtcatcttcgacgcagacttccaaccggagcctgattacctccaacactctgtccccttcctcgttcataaccccgaggtcgctctggttcaagcccgatggagattcatgaacgcaaacaagtgcttgatgacgaggatgcaagagatgtccctcaactaccactttatggcagagcaagaatctggatccactagacatgccttctttagcttcaatggaactgcgggtgtatggagaatggccgcgatggaagaagctggaggatggcatgaccggactactgtagaggacatggacttggccgttcgtgctggtcttctcggctggaaatttgtctttctcaatgacctcacggtgaaaagcgagttaccaagcaagtttaaggcctttagattccagcaacatcgatggtcttgtggtccagctaatctcttcaggaaaatgattatggagattattcgcaataagagagtgacgatttggaagaagttgtatctggtctacagcttctttttcttacggaagatcatagtccactgcttcacttttattttctactgtgttattcttcctacaagtgtcttctttcccgaagtcaacattccagcttggtcaactttttacattccctctatgatcactctctgcattgtcattgcgacaccaagatcattctacctcgtgatattttggatcttgtttgaaaacgtaatgtctatgcaccggacaaaaggaactttcatcggcatactcgaaagacaaagagtgaacgaatgggttgtcactgagaaattaggagatgctcttaagactaagctacttcctaggattggaaaacctagtaacatgtttcttgaaagagtaaactccaaggagataatggtggggatatacatcttgtgttgtgcttgctatggacttttctttgggaacacattgttatatctctatctcttcatgcaagcggttgcttttctcatatctggagttggctttgtcggcacttaaatattgatcacatttagacctcaattttagtgtctagctcttcaacaagttagttcatgctttgattactcagtctcaagttaattgtgtaaatttagattgataatttctagatgttttgtctagctacgttagttttatatcttgaatatcgaataagatggtgttgattgttat

SEQ ID NO: 100971 - protein, 552 aa, Arabidopsis thaliana
  peptide (1)..(552): Ceres Seq. ID no. 13606567
  misc_feature (125)..(303): Pfam Name: Glycosyl transferase Pfam Description: Glycosyl transferase
  misc_feature (1)..(552): Homolog of NCBI NO: 15221657 NR Description: glycosyltransferase family 2 [Arabidopsis
  misc_feature (1)..(409): Homolog of NCBI NO: 9369401 NR Description: T23E23.23 [Arabidopsis thaliana]
  misc_feature (392)..(552): Homolog of NCBI NO: 9369401 NR Description: T23E23.23 [Arabidopsis thaliana]
  misc_feature (1)..(552): Homolog of NCBI NO: 28393622 NR Description: putative cellulose synthase [Arabidopsis thaliana]
  misc_feature (1)..(552): Homolog of NCBI NO: 30688411 NR Description: glycosyltransferase family 2 [Arabidopsis >gi|8778578|gb|AAF79586.1|AC007945_6 F28C11.11 [Arabidopsis >gi|20466606|gb|AAM20620.1| unknown protein [Arabidopsis
  misc_feature (205)..(552): Homolog of NCBI NO: 26452420 NR Description: putative glucosyltransferase [Arabidopsis
  misc_feature (76)..(552): Homolog of NCBI NO: 30688416 NR Description: glycosyltransferase family 2 [Arabidopsis
  misc_feature (17)..(551): Homolog of NCBI NO: 18403914 NR Description: glycosyltransferase family 2 [Arabidopsis >gi|16604559|gb|AAL24081.1| putative glucosyltransferase thaliana] >gi|20197522|gb|AAD15455.2| putative
  misc_feature (17)..(551): Homolog of NCBI NO: 21536839 NR Description: putative glucosyltransferase [Arabidopsis
  misc_feature (56)..(552): Homolog of NCBI NO: 15237519 NR Description: glycosyltransferase family 2 [Arabidopsis
MTTFLKSLIFLQDSCLAFLSLMFHRGSSEDAAEALKKLETSINGARISFDTTWTREFRSLFIVPLFKCLVAFCLIISLLVFIEGIYMNLVVLYVKVFERKPEKVYRWEAMQEDIELGHETYPMVLVQIPMYNEKEVLQLSIGAACRLIWPLDRLIVQVLDDSTDQTIKELVNTECAKWESKGVNIKCERRDNRNGYKAGALKEGMKHNYVKLCNYVVIFDADFQPEPDYLQHSVPFLVHNPEVALVQARWRFMNANKCLMTRMQEMSLNYHFMAEQESGSTRHAFFSFNGTAGVWRMAAMEEAGGWHDRTTVEDMDLAVRAGLLGWKFVFLNDLTVKSELPSKFKAFRFQQHRWSCGPANLFRKMIMEIIRNKRVTIWKKLYLVYSFFFLRKIIVHCFTFIFYCVILPTSVFFPEVNIPAWSTFYIPSMITLCIVIATPRSFYLVIFWILFENVMSMHRTKGTFIGILERQRVNEWVVTEKLGDALKTKLLPRIGKPSNMFLERVNSKEIMVGIYILCCACYGLFFGNTLLYLYLFMQAVAFLISGVGFVGT

SEQ ID NO: 100972 - protein, 531 aa, Arabidopsis thaliana
  peptide (1)..(531): Ceres Seq. ID no. 13606568
  misc_feature (104)..(282): Pfam Name: Glycosyl transferase Pfam Description: Glycosyl transferase
  misc_feature (1)..(531): Homolog of NCBI NO: 15221657 NR Description: glycosyltransferase family 2 [Arabidopsis
  misc_feature (1)..(388): Homolog of NCBI NO: 9369401 NR Description: T23E23.23 [Arabidopsis thaliana]
  misc_feature (371)..(531): Homolog of NCBI NO: 9369401 NR Description: T23E23.23 [Arabidopsis thaliana]
  misc_feature (1)..(531): Homolog of NCBI NO: 28393622 NR Description: putative cellulose synthase [Arabidopsis thaliana]
  misc_feature (1)..(531): Homolog of NCBI NO: 30688411 NR Description: glycosyltransferase family 2 [Arabidopsis >gi|8778578|gb|AAF79586.1|AC007945_6 F28C11.11 [Arabidopsis >gi|20466606|gb|AAM20620.1| unknown protein [Arabidopsis
  misc_feature (184)..(531): Homolog of NCBI NO: 26452420 NR Description: putative glucosyltransferase [Arabidopsis
  misc_feature (55)..(531): Homolog of NCBI NO: 30688416 NR Description: glycosyltransferase family 2 [Arabidopsis
  misc_feature (1)..(530): Homolog of NCBI NO: 18403914 NR Description: glycosyltransferase family 2 [Arabidopsis >gi|16604559|gb|AAL24081.1| putative glucosyltransferase thaliana] >gi|20197522|gb|AAD15455.2| putative
  misc_feature (1)..(530): Homolog of NCBI NO: 21536839 NR Description: putative glucosyltransferase [Arabidopsis
  misc_feature (35)..(531): Homolog of NCBI NO: 15237519 NR Description: glycosyltransferase family 2 [Arabidopsis
MFHRGSSEDAAEALKKLETSINGARISFDTTWTREFRSLFIVPLFKCLVAFCLIISLLVFIEGIYMNLVVLYVKVFERKPEKVYRWEAMQEDIELGHETYPMVLVQIPMYNEKEVLQLSIGAACRLIWPLDRLIVQVLDDSTDQTIKELVNTECAKWESKGVNIKCERRDNRNGYKAGALKEGMKHNYVKLCNYVVIFDADFQPEPDYLQHSVPFLVHNPEVALVQARWRFMNANKCLMTRMQEMSLNYHFMAEQESGSTRHAFFSFNGTAGVWRMAAMEEAGGWHDRTTVEDMDLAVRAGLLGWKFVFLNDLTVKSELPSKFKAFRFQQHRWSCGPANLFRKMIMEIIRNKRVTIWKKLYLVYSFFFLRKIIVHCFTFIFYCVILPTSVFFPEVNIPAWSTFYIPSMITLCIVIATPRSFYLVIFWILFENVMSMHRTKGTFIGILERQRVNEWVVTEKLGDALKTKLLPRIGKPSNMFLERVNSKEIMVGIYILCCACYGLFFGNTLLYLYLFMQAVAFLISGVGFVGT

SEQ ID NO: 100973 - protein, 466 aa, Arabidopsis thaliana
  peptide (1)..(466): Ceres Seq. ID no. 13606569
  misc_feature (39)..(217): Pfam Name: Glycosyl transferase Pfam Description: Glycosyl transferase
  misc_feature (1)..(466): Homolog of NCBI NO: 15221657 NR Description: glycosyltransferase family 2 [Arabidopsis
  misc_feature (1)..(323): Homolog of NCBI NO: 9369401 NR Description: T23E23.23 [Arabidopsis thaliana]
  misc_feature (306)..(466): Homolog of NCBI NO: 9369401 NR Description: T23E23.23 [Arabidopsis thaliana]
  misc_feature (1)..(466): Homolog of NCBI NO: 28393622 NR Description: putative cellulose synthase [Arabidopsis thaliana]
  misc_feature (1)..(466): Homolog of NCBI NO: 30688411 NR Description: glycosyltransferase family 2 [Arabidopsis >gi|8778578|gb|AAF79586.1|AC007945_6 F28C11.11 [Arabidopsis >gi|20466606|gb|AAM20620.1| unknown protein [Arabidopsis
  misc_feature (119)..(466): Homolog of NCBI NO: 26452420 NR Description: putative glucosyltransferase [Arabidopsis
  misc_feature (1)..(466): Homolog of NCBI NO: 30688416 NR Description: glycosyltransferase family 2 [Arabidopsis
  misc_feature (1)..(465): Homolog of NCBI NO: 18403914 NR Description: glycosyltransferase family 2 [Arabidopsis >gi|16604559|gb|AAL24081.1| putative glucosyltransferase thaliana] >gi|20197522|gb|AAD15455.2| putative
  misc_feature (1)..(465): Homolog of NCBI NO: 21536839 NR Description: putative glucosyltransferase [Arabidopsis
  misc_feature (1)..(466): Homolog of NCBI NO: 15237519 NR Description: glycosyltransferase family 2 [Arabidopsis
MNLVVLYVKVFERKPEKVYRWEAMQEDIELGHETYPMVLVQIPMYNEKEVLQLSIGAACRLIWPLDRLIVQVLDDSTDQTIKELVNTECAKWESKGVNIKCERRDNRNGYKAGALKEGMKHNYVKLCNYVVIFDADFQPEPDYLQHSVPFLVHNPEVALVQARWRFMNANKCLMTRMQEMSLNYHFMAEQESGSTRHAFFSFNGTAGVWRMAAMEEAGGWHDRTTVEDMDLAVRAGLLGWKFVFLNDLTVKSELPSKFKAFRFQQHRWSCGPANLFRKMIMEIIRNKRVTIWKKLYLVYSFFFLRKIIVHCFTFIFYCVILPTSVFFPEVNIPAWSTFYIPSMITLCIVIATPRSFYLVIFWILFENVMSMHRTKGTFIGILERQRVNEWVVTEKLGDALKTKLLPRIGKPSNMFLERVNSKEIMVGIYILCCACYGLFFGNTLLYLYLFMQAVAFLISGVGFVGT

SEQ ID NO: 100974 - DNA, 1615 bp, Arabidopsis thaliana
  misc_feature (1)..(1615): Ceres Seq. ID no. 13606570
  misc_feature: MA Experiment ID: 20000315 Result: Up-regulated in Transcription
  misc_feature: MA Experiment 20000315 PARAMETER Experiment Name: At_14day_Shoots-Roots_Sub_P Parameter: Age (day) Value: 14
  misc_feature: MA Experiment 20000315 PARAMETER Experiment Name: At_14day_Shoots-Roots_Sub_P Parameter: Organism Value: A. thaliana
  misc_feature: MA Experiment 20000315 PARAMETER Experiment Name: At_14day_Shoots-Roots_Sub_P Parameter: Plant Line Value: WS
  misc_feature: MA Experiment 20000315 PARAMETER Experiment Name: At_14day_Shoots-Roots_Sub_P Parameter: Tissue Value: Shoots vs. Whole Plant
gactctttcataaccaatctttcttcttcttcttcttcttcttcttcctctttccttatctctccatctctgtggagagacacaaaacttccaaaaaggaacattctttcagttctttacttaatctttcacaatgctaaatcattagccgttgataaagtcttaatctttgattcattcaaacgcgtttttgtttagtaatgtcgtcgcgtttttctttgacggtggtgtgtttgattgctctgttaccgtttgttgttggtatacggttgattccggcgaggatcacgagtgtcggtgatggcggcggcggaggaggtaataatgggtttagtaaacttggtccgtttatggaagctccggagtatagaaacggcaaggagtgtgtatcttcatcagtgaacagagagaacttcgtgtcgtcttcttctagttctaatgatccttcgcttgttcacatcgctatgactttggactcagagtatctccgtggatcaatcgcagccgttcattctgttcttcgccacgcgtcttgtccagagaacgtcttcttccatttcatcgctgctgagtttgactctgcgagtcctcgtgttctgagtcaactcgtgaggtcgacttttccttcgttgaactttaaagtctacatttttagggaagatacggtgatcaatctcatatcttcttcgattagactagctttggagaatccgttgaactatgctcggaactatctcggagatattcttgatcgaagtgttgaacgagtcatttatcttgactcggatgttataactgtggatgatatcacaaagctttggaacacggttttgaccgggtcacgagtcatcggagctccggagtattgtcacgcgaacttcactcagtatttcacttccgggttctggtcagacccggctttaccgggtctaatctcgggtcaaaagccttgctatttcaacacaggagtgatggtgatggatcttgttagatggagagaagggaattacagagagaagttagagcaatggatgcaattgcagaagaagatgagaatctacgatcttggatcattaccaccgtttcttttggtgtttgcgggtaatgttgaagctattgatcatagatggaaccaacatggtttaggaggagacaatatacgaggaagttgtcggtcattgcatcctggtcctgtgagcttgttgcattggagtggtaaaggtaagccatgggttagacttgatgagaagaggccttgtccgttggatcatctttgggagccatatgatttgtataagcataagattgagagagctaaagatcagtctctgcttgggtttgcttctctgtcggagttgactgatgattcaagcttcttgtgagagttttaaagttacattctttttcaatatcttctgttgtattacagatgaaatatcattgttcaggtgagtgattctttgattttctgttgtacaaatctattttagagagggaagatatatattaggctgtggaaaagccattgatgatcctttttgttgagaattctttgtcattctggcgctcttgtgtttcaatcttttcttcttaataaaactcatcttgaagtgcc

SEQ ID NO: 100975 - protein, 393 aa, Arabidopsis thaliana
  peptide (1)..(393): Ceres Seq. ID no. 13606571
  misc_feature (1)..(393): Homolog of NCBI NO: 15221684 NR Description: glycosyltransferase family 8 [Arabidopsis
  misc_feature (7)..(392): Homolog of NCBI NO: 18409445 NR Description: glycosyltransferase family 8 [Arabidopsis
  misc_feature (50)..(366): Homolog of NCBI NO: 12003394 NR Description: Avr9/Cf-9 rapidly elicited protein 231 [Nicotiana
  misc_feature (51)..(366): Homolog of NCBI NO: 30689156 NR Description: galactinol synthase, putative [Arabidopsis
  misc_feature (50)..(367): Homolog of NCBI NO: 11281926 NR Description: hypothetical protein F26K9.90 - Arabidopsis >gi|7362746|emb|CAB83116.1| putative protein [Arabidopsis
  misc_feature (50)..(367): Homolog of NCBI NO: 22331906 NR Description: glycosyltransferase family 8 [Arabidopsis >gi|18175835|gb|AAL59936.1| unknown protein [Arabidopsis >gi|20465549|gb|AAM20257.1| unknown protein [Arabidopsis
  misc_feature (50)..(367): Homolog of NCBI NO: 15235247 NR Description: glycosyltransferase family 8 [Arabidopsis >gi|30679061|ref|NP_849285.1| glycosyltransferase family 8 thaliana] >gi|7484990|pir||T01514 glycosyl transferase predicted
  misc_feature (50)..(367): Homolog of NCBI NO: 21554300 NR Description: putative glycosyl transferase [Arabidopsis
  misc_feature (45)..(367): Homolog of NCBI NO: 15217851 NR Description: glycosyltransferase family 8 [Arabidopsis
  misc_feature (47)..(367): Homolog of NCBI NO: 18391493 NR Description: glycosyltransferase family 8 [Arabidopsis
MSSRFSLTVVCLIALLPFVVGIRLIPARITSVGDGGGGGGNNGFSKLGPFMEAPEYRNGKECVSSSVNRENFVSSSSSSNDPSLVHIAMTLDSEYLRGSIAAVHSVLRHASCPENVFFHFIAAEFDSASPRVLSQLVRSTFPSLNFKVYIFREDTVINLISSSIRLALENPLNYARNYLGDILDRSVERVIYLDSDVITVDDITKLWNTVLTGSRVIGAPEYCHANFTQYFTSGFWSDPALPGLISGQKPCYFNTGVMVMDLVRWREGNYREKLEQWMQLQKKMRIYDLGSLPPFLLVFAGNVEAIDHRWNQHGLGGDNIRGSCRSLHPGPVSLLHWSGKGKPWVRLDEKRPCPLDHLWEPYDLYKHKIERAKDQSLLGFASLSELTDDSSFL

SEQ ID NO: 100976 - protein, 343 aa, Arabidopsis thaliana
  peptide (1)..(343): Ceres Seq. ID no. 13606572
  misc_feature (1)..(343): Homolog of NCBI NO: 15221684 NR Description: glycosyltransferase family 8 [Arabidopsis
  misc_feature (1)..(342): Homolog of NCBI NO: 18409445 NR Description: glycosyltransferase family 8 [Arabidopsis
  misc_feature (1)..(316): Homolog of NCBI NO: 12003394 NR Description: Avr9/Cf-9 rapidly elicited protein 231 [Nicotiana
  misc_feature (1)..(316): Homolog of NCBI NO: 30689156 NR Description: galactinol synthase, putative [Arabidopsis
  misc_feature (1)..(317): Homolog of NCBI NO: 11281926 NR Description: hypothetical protein F26K9.90 - Arabidopsis >gi|7362746|emb|CAB83116.1| putative protein [Arabidopsis
  misc_feature (1)..(317): Homolog of NCBI NO: 22331906 NR Description: glycosyltransferase family 8 [Arabidopsis >gi|18175835|gb|AAL59936.1| unknown protein [Arabidopsis >gi|20465549|gb|AAM20257.1| unknown protein [Arabidopsis
  misc_feature (1)..(317): Homolog of NCBI NO: 15235247 NR Description: glycosyltransferase family 8 [Arabidopsis >gi|30679061|ref|NP_849285.1| glycosyltransferase family 8 thaliana] >gi|7484990|pir||T01514 glycosyl transferase predicted
  misc_feature (1)..(317): Homolog of NCBI NO: 21554300 NR Description: putative glycosyl transferase [Arabidopsis
  misc_feature (1)..(317): Homolog of NCBI NO: 15217851 NR Description: glycosyltransferase family 8 [Arabidopsis
  misc_feature (1)..(317): Homolog of NCBI NO: 18391493 NR Description: glycosyltransferase family 8 [Arabidopsis
MEAPEYRNGKECVSSSVNRENFVSSSSSSNDPSLVHIAMTLDSEYLRGSIAAVHSVLRHASCPENVFFHFIAAEFDSASPRVLSQLVRSTFPSLNFKVYIFREDTVINLISSSIRLALENPLNYARNYLGDILDRSVERVIYLDSDVITVDDITKLWNTVLTGSRVIGAPEYCHANFTQYFTSGFWSDPALPGLISGQKPCYFNTGVMVMDLVRWREGNYREKLEQWMQLQKKMRIYDLGSLPPFLLVFAGNVEAIDHRWNQHGLGGDNIRGSCRSLHPGPVSLLHWSGKGKPWVRLDEKRPCPLDHLWEPYDLYKHKIERAKDQSLLGFASLSELTDDSSFL

SEQ ID NO: 100977 - protein, 305 aa, Arabidopsis thaliana
  peptide (1)..(305): Ceres Seq. ID no. 13606573
  misc_feature (1)..(305): Homolog of NCBI NO: 15221684 NR Description: glycosyltransferase family 8 [Arabidopsis
  misc_feature (1)..(304): Homolog of NCBI NO: 18409445 NR Description: glycosyltransferase family 8 [Arabidopsis
  misc_feature (1)..(278): Homolog of NCBI NO: 12003394 NR Description: Avr9/Cf-9 rapidly elicited protein 231 [Nicotiana
  misc_feature (1)..(278): Homolog of NCBI NO: 30689156 NR Description: galactinol synthase, putative [Arabidopsis
  misc_feature (1)..(279): Homolog of NCBI NO: 11281926 NR Description: hypothetical protein F26K9.90 - Arabidopsis >gi|7362746|emb|CAB83116.1| putative protein [Arabidopsis
  misc_feature (1)..(279): Homolog of NCBI NO: 22331906 NR Description: glycosyltransferase family 8 [Arabidopsis >gi|18175835|gb|AAL59936.1| unknown protein [Arabidopsis >gi|20465549|gb|AAM20257.1| unknown protein [Arabidopsis
  misc_feature (1)..(279): Homolog of NCBI NO: 15235247 NR Description: glycosyltransferase family 8 [Arabidopsis >gi|30679061|ref|NP_849285.1| glycosyltransferase family 8 thaliana] >gi|7484990|pir||T01514 glycosyl transferase predicted
  misc_feature (1)..(279): Homolog of NCBI NO: 21554300 NR Description: putative glycosyl transferase [Arabidopsis
  misc_feature (1)..(279): Homolog of NCBI NO: 15217851 NR Description: glycosyltransferase family 8 [Arabidopsis
  misc_feature (1)..(279): Homolog of NCBI NO: 18391493 NR Description: glycosyltransferase family 8 [Arabidopsis
MTLDSEYLRGSIAAVHSVLRHASCPENVFFHFIAAEFDSASPRVLSQLVRSTFPSLNFKVYIFREDTVINLISSSIRLALENPLNYARNYLGDILDRSVERVIYLDSDVITVDDITKLWNTVLTGSRVIGAPEYCHANFTQYFTSGFWSDPALPGLISGQKPCYFNTGVMVMDLVRWREGNYREKLEQWMQLQKKMRIYDLGSLPPFLLVFAGNVEAIDHRWNQHGLGGDNIRGSCRSLHPGPVSLLHWSGKGKPWVRLDEKRPCPLDHLWEPYDLYKHKIERAKDQSLLGFASLSELTDDSSFL

SEQ ID NO: 100978 - DNA, 1661 bp, Arabidopsis thaliana
  misc_feature (1)..(1661): Ceres Seq. ID no. 13606582
  misc_feature: MA Experiment ID: 20000185 Result: Down-regulated in Transcription
  misc_feature: MA Experiment 20000185 PARAMETER Experiment Name: At_Roots__P Parameter: Age (day) Value: 7 vs. 21
  misc_feature: MA Experiment 20000185 PARAMETER Experiment Name: At_Roots__P Parameter: Organism Value: A. thaliana
  misc_feature: MA Experiment 20000185 PARAMETER Experiment Name: At_Roots__P Parameter: Tissue Value: Roots vs. Whole Plant
  misc_feature: MA Experiment ID: 20000234 Result: Up-regulated in Transcription
  misc_feature: MA Experiment 20000234 PARAMETER Experiment Name: At_Siliques_P Parameter: Age (day) Value: 21
  misc_feature: MA Experiment 20000234 PARAMETER Experiment Name: At_Siliques_P Parameter: Organism Value: A. thaliana
  misc_feature: MA Experiment 20000234 PARAMETER Experiment Name: At_Siliques_P Parameter: Plant Line Value: WS
  misc_feature: MA Experiment 20000234 PARAMETER Experiment Name: At_Siliques_P Parameter: Tissue Value: Less Than 5mm Siliques vs. Whole Plant
  misc_feature: MA Experiment ID: 20000235 Result: Up-regulated in Transcription
  misc_feature: MA Experiment 20000235 PARAMETER Experiment Name: At_Siliques_P Parameter: Age (day) Value: 21
  misc_feature: MA Experiment 20000235 PARAMETER Experiment Name: At_Siliques_P Parameter: Organism Value: A. thaliana
  misc_feature: MA Experiment 20000235 PARAMETER Experiment Name: At_Siliques_P Parameter: Plant Line Value: WS
  misc_feature: MA Experiment 20000235 PARAMETER Experiment Name: At_Siliques_P Parameter: Tissue Value: 5-10mm Siliques vs. Whole Plant
  misc_feature: MA Experiment ID: 20000264 Result: Down-regulated in Transcription
  misc_feature: MA Experiment 20000264 PARAMETER Experiment Name: At_Open_Flower_P Parameter: Age (day) Value: 21
  misc_feature: MA Experiment 20000264 PARAMETER Experiment Name: At_Open_Flower_P Parameter: Plant Line Value: WS
  misc_feature: MA Experiment 20000264 PARAMETER Experiment Name: At_Open_Flower_P Parameter: Tissue Value: Open Flower vs. Whole Plant
  misc_feature: MA Experiment ID: 20000265 Result: Down-regulated in Transcription
  misc_feature: MA Experiment 20000265 PARAMETER Experiment Name: At_Open_Flower_P Parameter: Age (day) Value: 21
  misc_feature: MA Experiment 20000265 PARAMETER Experiment Name: At_Open_Flower_P Parameter: Plant Line Value: WS
  misc_feature: MA Experiment 20000265 PARAMETER Experiment Name: At_Open_Flower_P Parameter: Tissue Value: Closed Flower vs. Whole Plant
  misc_feature: MA Experiment ID: 20000286 Result: Down-regulated in Transcription
  misc_feature: MA Experiment 20000286 PARAMETER Experiment Name: At_Open_Flower_P Parameter: Age (day) Value: 21
  misc_feature: MA Experiment 20000286 PARAMETER Experiment Name: At_Open_Flower_P Parameter: Plant Line Value: WS
  misc_feature: MA Experiment 20000286 PARAMETER Experiment Name: At_Open_Flower_P Parameter: Tissue Value: Half Open vs. Whole Plant
  misc_feature: MA Experiment ID: 20000437 Result: Down-regulated in Transcription
  misc_feature: MA Experiment 20000437 PARAMETER Experiment Name: At_Drought_P Parameter: Age (day) Value: 8
  misc_feature: MA Experiment 20000437 PARAMETER Experiment Name: At_Drought_P Parameter: Organism Value: A. thaliana
  misc_feature: MA Experiment 20000437 PARAMETER Experiment Name: At_Drought_P Parameter: Plant Line Value: WS
  misc_feature: MA Experiment 20000437 PARAMETER Experiment Name: At_Drought_P Parameter: Timepoint (hr) Value: 24
  misc_feature: MA Experiment 20000437 PARAMETER Experiment Name: At_Drought_P Parameter: Tissue Value: Whole Plant
  misc_feature: MA Experiment 20000437 PARAMETER Experiment Name: At_Drought_P Parameter: Treatment Value: Drought vs. No Drought
  misc_feature: MA Experiment ID: 20000439 Result: Down-regulated in Transcription
  misc_feature: MA Experiment 20000439 PARAMETER Experiment Name: At_Roots__P Parameter: Age (day) Value: 14 vs. 21
  misc_feature: MA Experiment 20000439 PARAMETER Experiment Name: At_Roots__P Parameter: Organism Value: A. thaliana
  misc_feature: MA Experiment 20000439 PARAMETER Experiment Name: At_Roots__P Parameter: Tissue Value: Roots vs. Whole Plant
  misc_feature: MA Experiment ID: 20000794 Result: Down-regulated in Transcription
  misc_feature: MA Experiment 20000794 PARAMETER Experiment Name: At_Petals_P Parameter: Age (day) Value: 23-25 days
  misc_feature: MA Experiment 20000794 PARAMETER Experiment Name: At_Petals_P Parameter: Plant Line Value: WS
  misc_feature: MA Experiment 20000794 PARAMETER Experiment Name: At_Petals_P Parameter: Tissue Value: Petals vs. Whole plant
  misc_feature: MA Experiment ID: 20001248 Result: Down-regulated in Transcription
  misc_feature: MA Experiment 20001248 PARAMETER Experiment Name: At_Far-red-induction_P Parameter: Age (day) Value: 7
  misc_feature: MA Experiment 20001248 PARAMETER Experiment Name: At_Far-red-induction_P Parameter: Light Value: Far-red vs. White
  misc_feature: MA Experiment 20001248 PARAMETER Experiment Name: At_Far-red-induction_P Parameter: Organism Value: A. thaliana
  misc_feature: MA Experiment 20001248 PARAMETER Experiment Name: At_Far-red-induction_P Parameter: Plant Line Value: Columbia
  misc_feature: MA Experiment 20001248 PARAMETER Experiment Name: At_Far-red-induction_P Parameter: Timepoint (hr) Value: 4
  misc_feature: MA Experiment 20001248 PARAMETER Experiment Name: At_Far-red-induction_P Parameter: Tissue Value: Whole Plant
  misc_feature: MA Experiment ID: 20001560 Result: Up-regulated in Transcription
  misc_feature: MA Experiment 20001560 PARAMETER Experiment Name: At_Drought_Soil_Dry_P Parameter: Age (day) Value: 28
  misc_feature: MA Experiment 20001560 PARAMETER Experiment Name: At_Drought_Soil_Dry_P Parameter: Organism Value: A. thaliana
  misc_feature: MA Experiment 20001560 PARAMETER Experiment Name: At_Drought_Soil_Dry_P Parameter: Plant Line Value: WS
  misc_feature: MA Experiment 20001560 PARAMETER Experiment Name: At_Drought_Soil_Dry_P Parameter: Post Timepoint (hr) Value: None
  misc_feature: MA Experiment 20001560 PARAMETER Experiment Name: At_Drought_Soil_Dry_P Parameter: Post-Treatment Value: None
  misc_feature: MA Experiment 20001560 PARAMETER Experiment Name: At_Drought_Soil_Dry_P Parameter: Timepoint (day) Value: 14
  misc_feature: MA Experiment 20001560 PARAMETER Experiment Name: At_Drought_Soil_Dry_P Parameter: Treatment Value: Drought vs. No Drought
aatgtattctctttgttcatttggttttacaaccaaaaaaaaaacaaaaaaaaacacttcatgcgtaagacataagcaaaatggccggtggaggattggctcttgatgtctccagcgccggaaacattgatgccaagatcacagccgcagttgtcatgagttgcattgtggctgcctcatgtggtctcatttttggctatgacatcggaatctcagggggtgtgacgactatgaagccgtttcttgagaaattctttccatcggttcttaaaaaagcttcggaagctaagacgaatgtctactgcgtctacgacagccaacttcttacggccttcacatctagcctttatgttgccggcttagtagcttccttagtggctagccgtctcacagcggcttatggtcgccgaaccaccatgatccttggcggtttcactttcctctttggtgctctgatcaatggcttagctgctaacatcgccatgctcatctccggtcggattttgctaggatttggtgtcggtttcaccaaccaggcggctccggtatatctatcggaagtagcaccaccgcgatggcgtggagcattcaacatcggcttttcatgcttcatcagtatgggagtagtagcagccaatctaataaattacggtaccgatagtcaccgtaacggctggcgtatctcgctaggtctagctgctgtaccagccgcgatcatgaccgtgggatgtctattcatttccgacacaccttctagcctcttggcgcgtgggaaacacgatgaagctcacacgtcgctgcttaagctacgtggcgtcgaaaacatagctgacgtggaaaccgagctagcagagttggttaggtcaagccagctagccattgaggctagagccgaactgtttatgaagacgatattgcagagacggtataggcctcatcttgtggttgctgtggtgataccatgttttcaacagttaactggaataacggtgaacgcgttctatgcgccggttctgtttcgatcggttgggtttggttctggtccggctcttattgcgacgttcatactcgggtttgttaatcttggttcgcttcttctctcaacaatggttattgaccggtttggtagacggtttttgttcattgctggcggtattctgatgcttctctgtcagattgcagtggctgtgttactagctgtgacagtgggagccaccggggacggagagatgaagaagggttacgccgtgacggtggtggtgttactttgcatatacgcagctgggtttggatggtcgtgggggccattaagctggcttgtcccaagtgagatattcccactcaagatacgaccagctggtcagagcttaagcgttgccgtgaacttcgccgcaacgtttgctctctctcaaacgttcttagcaacgctctgcgatttcaagtacggtgctttcttgttttacggcggttggatctttacaatgacgatattcgtcatcatgttcttgcccgagaccaaagggatacctgtggattctatgtatcaagtttgggagaagcattggtattggcaacggtttactaaaccgacgtcaacttaaaagatgcaatattgcaatgggttcgcattttcaatggattatgtttattaattagttagg

SEQ ID NO: 100979 - protein, 506 aa, Arabidopsis thaliana
  peptide (1)..(506): Ceres Seq. ID no. 13606583
  misc_feature (27)..(491): Pfam Name: Sugar (and other) transporter Pfam Description: Sugar (and other) transporter
  misc_feature (1)..(506): Homolog of NCBI NO: 15218693 NR Description: monosaccharide transporter, putative [Arabidopsis >gi|16945177|emb|CAC69071.2| STP5 protein [Arabidopsis thaliana]
  misc_feature (1)..(506): Homolog of NCBI NO: 25308938 NR Description: protein F12K21.8 [imported] - Arabidopsis >gi|8778264|gb|AAF79273.1|AC023279_22 F12K21.8 [Arabidopsis
  misc_feature (1)..(502): Homolog of NCBI NO: 30349813 NR Description: putative monosaccharide-H+ symporter [Medicago
  misc_feature (1)..(500): Homolog of NCBI NO: 34915514 NR Description: monosaccharide transporter 3 [Oryza sativa
  misc_feature (1)..(500): Homolog of NCBI NO: 100347 NR Description: monosaccharide transport protein MST1 - common >gi|19885|emb|CAA47324.1| monosaccharid transporter [Nicotiana
  misc_feature (1)..(502): Homolog of NCBI NO: 11991110 NR Description: monosaccharide transporter 1 [Oryza sativa]
  misc_feature (2)..(502): Homolog of NCBI NO: 81619 NR Description: glucose transport protein STP1 - Arabidopsis >gi|16520|emb|CAA39037.1| glucose transporter [Arabidopsis
  misc_feature (5)..(499): Homolog of NCBI NO: 1708191 NR Description: Hexose carrier protein HEX6
  misc_feature (1)..(506): Homolog of NCBI NO: 5734440 NR Description: hexose transporter [Lycopersicon esculentum]
  misc_feature (83)..(481): Homolog of NCBI NO: 23336284 NR Description: hypothetical protein [Bifidobacterium longum
MAGGGLALDVSSAGNIDAKITAAVVMSCIVAASCGLIFGYDIGISGGVTTMKPFLEKFFPSVLKKASEAKTNVYCVYDSQLLTAFTSSLYVAGLVASLVASRLTAAYGRRTTMILGGFTFLFGALINGLAANIAMLISGRILLGFGVGFTNQAAPVYLSEVAPPRWRGAFNIGFSCFISMGVVAANLINYGTDSHRNGWRISLGLAAVPAAIMTVGCLFISDTPSSLLARGKHDEAHTSLLKLRGVENIADVETELAELVRSSQLAIEARAELFMKTILQRRYRPHLVVAVVIPCFQQLTGITVNAFYAPVLFRSVGFGSGPALIATFILGFVNLGSLLLSTMVIDRFGRRFLFIAGGILMLLCQIAVAVLLAVTVGATGDGEMKKGYAVTVVVLLCIYAAGFGWSWGPLSWLVPSEIFPLKIRPAGQSLSVAVNFAATFALSQTFLATLCDFKYGAFLFYGGWIFTMTIFVIMFLPETKGIPVDSMYQVWEKHWYWQRFTKPTST

SEQ ID NO: 100980 - protein, 481 aa, Arabidopsis thaliana
  peptide (1)..(481): Ceres Seq. ID no. 13606584
  misc_feature (2)..(466): Pfam Name: Sugar (and other) transporter Pfam Description: Sugar (and other) transporter
  misc_feature (1)..(481): Homolog of NCBI NO: 15218693 NR Description: monosaccharide transporter, putative [Arabidopsis >gi|16945177|emb|CAC69071.2| STP5 protein [Arabidopsis thaliana]
  misc_feature (1)..(481): Homolog of NCBI NO: 25308938 NR Description: protein F12K21.8 [imported] - Arabidopsis >gi|8778264|gb|AAF79273.1|AC023279_22 F12K21.8 [Arabidopsis
  misc_feature (1)..(477): Homolog of NCBI NO: 30349813 NR Description: putative monosaccharide-H+ symporter [Medicago
  misc_feature (1)..(475): Homolog of NCBI NO: 34915514 NR Description: monosaccharide transporter 3 [Oryza sativa
  misc_feature (1)..(475): Homolog of NCBI NO: 100347 NR Description: monosaccharide transport protein MST1 - common >gi|19885|emb|CAA47324.1| monosaccharid transporter [Nicotiana
  misc_feature (1)..(477): Homolog of NCBI NO: 11991110 NR Description: monosaccharide transporter 1 [Oryza sativa]
  misc_feature (1)..(477): Homolog of NCBI NO: 81619 NR Description: glucose transport protein STP1 - Arabidopsis >gi|16520|emb|CAA39037.1| glucose transporter [Arabidopsis
  misc_feature (1)..(474): Homolog of NCBI NO: 1708191 NR Description: Hexose carrier protein HEX6
  misc_feature (1)..(481): Homolog of NCBI NO: 5734440 NR Description: hexose transporter [Lycopersicon esculentum]
  misc_feature (58)..(456): Homolog of NCBI NO: 23336284 NR Description: hypothetical protein [Bifidobacterium longum
MSCIVAASCGLIFGYDIGISGGVTTMKPFLEKFFPSVLKKASEAKTNVYCVYDSQLLTAFTSSLYVAGLVASLVASRLTAAYGRRTTMILGGFTFLFGALINGLAANIAMLISGRILLGFGVGFTNQAAPVYLSEVAPPRWRGAFNIGFSCFISMGVVAANLINYGTDSHRNGWRISLGLAAVPAAIMTVGCLFISDTPSSLLARGKHDEAHTSLLKLRGVENIADVETELAELVRSSQLAIEARAELFMKTILQRRYRPHLVVAVVIPCFQQLTGITVNAFYAPVLFRSVGFGSGPALIATFILGFVNLGSLLLSTMVIDRFGRRFLFIAGGILMLLCQIAVAVLLAVTVGATGDGEMKKGYAVTVVVLLCIYAAGFGWSWGPLSWLVPSEIFPLKIRPAGQSLSVAVNFAATFALSQTFLATLCDFKYGAFLFYGGWIFTMTIFVIMFLPETKGIPVDSMYQVWEKHWYWQRFTKPTST

SEQ ID NO: 100981 - protein, 456 aa, Arabidopsis thaliana
  peptide (1)..(456): Ceres Seq. ID no. 13606585
  misc_feature (1)..(441): Pfam Name: Sugar (and other) transporter Pfam Description: Sugar (and other) transporter
  misc_feature (1)..(456): Homolog of NCBI NO: 15218693 NR Description: monosaccharide transporter, putative [Arabidopsis >gi|16945177|emb|CAC69071.2| STP5 protein [Arabidopsis thaliana]
  misc_feature (1)..(456): Homolog of NCBI NO: 25308938 NR Description: protein F12K21.8 [imported] - Arabidopsis >gi|8778264|gb|AAF79273.1|AC023279_22 F12K21.8 [Arabidopsis
  misc_feature (1)..(452): Homolog of NCBI NO: 30349813 NR Description: putative monosaccharide-H+ symporter [Medicago
  misc_feature (1)..(450): Homolog of NCBI NO: 34915514 NR Description: monosaccharide transporter 3 [Oryza sativa
  misc_feature (1)..(450): Homolog of NCBI NO: 100347 NR Description: monosaccharide transport protein MST1 - common >gi|19885|emb|CAA47324.1| monosaccharid transporter [Nicotiana
  misc_feature (1)..(452): Homolog of NCBI NO: 11991110 NR Description: monosaccharide transporter 1 [Oryza sativa]
  misc_feature (1)..(452): Homolog of NCBI NO: 81619 NR Description: glucose transport protein STP1 - Arabidopsis >gi|16520|emb|CAA39037.1| glucose transporter [Arabidopsis
  misc_feature (1)..(449): Homolog of NCBI NO: 1708191 NR Description: Hexose carrier protein HEX6
  misc_feature (1)..(456): Homolog of NCBI NO: 5734440 NR Description: hexose transporter [Lycopersicon esculentum]
  misc_feature (33)..(431): Homolog of NCBI NO: 23336284 NR Description: hypothetical protein [Bifidobacterium longum
MKPFLEKFFPSVLKKASEAKTNVYCVYDSQLLTAFTSSLYVAGLVASLVASRLTAAYGRRTTMILGGFTFLFGALINGLAANIAMLISGRILLGFGVGFTNQAAPVYLSEVAPPRWRGAFNIGFSCFISMGVVAANLINYGTDSHRNGWRISLGLAAVPAAIMTVGCLFISDTPSSLLARGKHDEAHTSLLKLRGVENIADVETELAELVRSSQLAIEARAELFMKTILQRRYRPHLVVAVVIPCFQQLTGITVNAFYAPVLFRSVGFGSGPALIATFILGFVNLGSLLLSTMVIDRFGRRFLFIAGGILMLLCQIAVAVLLAVTVGATGDGEMKKGYAVTVVVLLCIYAAGFGWSWGPLSWLVPSEIFPLKIRPAGQSLSVAVNFAATFALSQTFLATLCDFKYGAFLFYGGWIFTMTIFVIMFLPETKGIPVDSMYQVWEKHWYWQRFTKPTST

SEQ ID NO: 100982 - DNA, 1810 bp, Arabidopsis thaliana
  misc_feature (1)..(1810): Ceres Seq. ID no. 13606592
  misc_feature: MA Experiment ID: 20000265 Result: Up-regulated in Transcription
  misc_feature: MA Experiment 20000265 PARAMETER Experiment Name: At_Open_Flower_P Parameter: Age (day) Value: 21
  misc_feature: MA Experiment 20000265 PARAMETER Experiment Name: At_Open_Flower_P Parameter: Plant Line Value: WS
  misc_feature: MA Experiment 20000265 PARAMETER Experiment Name: At_Open_Flower_P Parameter: Tissue Value: Closed Flower vs. Whole Plant
  misc_feature: MA Experiment ID: 20000286 Result: Up-regulated in Transcription
  misc_feature: MA Experiment 20000286 PARAMETER Experiment Name: At_Open_Flower_P Parameter: Age (day) Value: 21
  misc_feature: MA Experiment 20000286 PARAMETER Experiment Name: At_Open_Flower_P Parameter: Plant Line Value: WS
  misc_feature: MA Experiment 20000286 PARAMETER Experiment Name: At_Open_Flower_P Parameter: Tissue Value: Half Open vs. Whole Plant
tccctgagagattagaaacgccatggaggttctagattcttaaggcttcatcactcgaaactgaaattagatagttttgtttgtttttgaggaatcactaatctgattctcttgagaagttagctttcgttcgtaagaattcacttacgtttgaaatctcaagtctttgtttcttccaggcaacaatttctctcaaagatggcgttttttgggctctcccgtgtttcaagacggttgttgaaatcttccgtctccgtaactccatcttcttcctctgctcttttgcaatcacaacataaatccttgtccaatcctgtgactacccattacacaaatcctttcactaagtgttatccttcatggaatgataattaccaagtatggagtaaaggaagagaattgcatcaggagaagttttttggtgttggttggaattacagattaatttgtggaatgtcgtcgtcttcttcggttttggagggaaagccgaagaaagatgataaggagaagagtgatggtgttgttgttaaggaagcttcttggatagatttgtatttaccagaagaagttagaggttatgctaagcttgctcgattggataaacccattggaacttggttgcttgcgtggccttgtatgtggtcgattgcgttggctgctgatcctggaagccttccaagttttaaatatatggctttatttggttgcggagcattacttcttagaggtgctggttgtactataaatgatctgcttgatcaggacatagatacaaaggttgatcgtacaaaactaagacctatcgccagtggtcttttgacaccatttcaagggattggatttctcgggctgcagttgcttttaggcttagggattcttctccaacttaacaattacagccgtgttttaggggcttcatctttgttacttgtcttttcctacccacttatgaagaggtttacattttggcctcaagcctttttaggtttgaccataaactggggagcattgttaggatggactgcagttaaaggaagcatagcaccatctattgtactccctctctatctctccggagtctgctggacccttgtttatgatactatttatgcacatcaggacaaagaagatgatgtaaaagttggtgttaagtcaacagcccttagattcggtgataatacaaagctttggttaactggatttggcacagcatccataggttttcttgcactttctggattcagtgcagatctcgggtggcaatattacgcatcactggccgctgcatcaggacagttaggatggcaaatagggacagctgacttatcatctggtgctgactgcagtagaaaatttgtgtcgaacaagtggtttggtgctattatatttagtggagttgtacttggaagaagttttcaataaagactctctctctgtcaacgaatgaggatgaagctgtagtgtgaggaacctatatatgaagaattgaagtagacttttgagacacactgtaagtgaaacagaggacatggtcttgctacaaagtgggtctccttcaggattgaaatgatcaaggagccattgccagaaaagctgaaacttaactcttttagattagtgactagttactactggttcttgtaaaagaagctattgttgttgtttgggatccatgtcttttcttccaggaggtagtttggctgtatgtatacaatgatcatgaccttctggtcaaacaagaggctttacttttggcttttatagttgacatacgcaatatcattgattttgtaacctaaaggatgttaat

SEQ ID NO: 100983 - protein, 407 aa, Arabidopsis thaliana
  peptide (1)..(407): Ceres Seq. ID no. 13606593
  misc_feature (139)..(404): Pfam Name: UbiA prenyltransferase family Pfam Description: UbiA prenyltransferase family
  misc_feature (1)..(407): Homolog of NCBI NO: 18416190 NR Description: UbiA prenyltransferase family [Arabidopsis >gi|30686272|ref|NP_849431.1| UbiA prenyltransferase family thaliana] >gi|16648989|gb|AAL24346.1| polyprenyltransferase like
  misc_feature (1)..(355): Homolog of NCBI NO: 7486734 NR Description: hypothetical protein F9D16.130 - Arabidopsis >gi|4454035|emb|CAA23032.1| polyprenyltransferase like protein thaliana] >gi|7269214|emb|CAB79321.1| polyprenyltransferase like
  misc_feature (87)..(404): Homolog of NCBI NO: 38637096 NR Description: putative PGT-2 [Oryza sativa (japonica
  misc_feature (152)..(404): Homolog of NCBI NO: 40253783 NR Description: putative PGT-2 [Oryza sativa (japonica
  misc_feature (111)..(406): Homolog of NCBI NO: 18389308 NR Description: PGT-2 [Lithospermum erythrorhizon]
  misc_feature (111)..(406): Homolog of NCBI NO: 18389306 NR Description: PGT-1 [Lithospermum erythrorhizon]
  misc_feature (121)..(403): Homolog of NCBI NO: 31377825 NR Description: hypothetical protein CL640 [Homo sapiens] Hypothetical protein CL640 [Homo sapiens]
  misc_feature (83)..(401): Homolog of NCBI NO: 17553718 NR Description: UbiA prenyltransferase family [Caenorhabditis >gi|14916331|gb|AAK73883.1|U13876_5 Hypothetical protein F57B9.4a
  misc_feature (109)..(402): Homolog of NCBI NO: 39593939 NR Description: Hypothetical protein CBG16481 [Caenorhabditis
  misc_feature (120)..(403): Homolog of NCBI NO: 21355567 NR Description: CG9613-PA [Drosophila melanogaster]
MAFFGLSRVSRRLLKSSVSVTPSSSSALLQSQHKSLSNPVTTHYTNPFTKCYPSWNDNYQVWSKGRELHQEKFFGVGWNYRLICGMSSSSSVLEGKPKKDDKEKSDGVVVKEASWIDLYLPEEVRGYAKLARLDKPIGTWLLAWPCMWSIALAADPGSLPSFKYMALFGCGALLLRGAGCTINDLLDQDIDTKVDRTKLRPIASGLLTPFQGIGFLGLQLLLGLGILLQLNNYSRVLGASSLLLVFSYPLMKRFTFWPQAFLGLTINWGALLGWTAVKGSIAPSIVLPLYLSGVCWTLVYDTIYAHQDKEDDVKVGVKSTALRFGDNTKLWLTGFGTASIGFLALSGFSADLGWQYYASLAAASGQLGWQIGTADLSSGADCSRKFVSNKWFGAIIFSGVVLGRSFQ

SEQ ID NO: 100984 - protein, 322 aa, Arabidopsis thaliana
  peptide (1)..(322): Ceres Seq. ID no. 13606594
  misc_feature (54)..(319): Pfam Name: UbiA prenyltransferase family Pfam Description: UbiA prenyltransferase family
  misc_feature (1)..(322): Homolog of NCBI NO: 18416190 NR Description: UbiA prenyltransferase family [Arabidopsis >gi|30686272|ref|NP_849431.1| UbiA prenyltransferase family thaliana] >gi|16648989|gb|AAL24346.1| polyprenyltransferase like
  misc_feature (1)..(270): Homolog of NCBI NO: 7486734 NR Description: hypothetical protein F9D16.130 - Arabidopsis >gi|4454035|emb|CAA23032.1| polyprenyltransferase like protein thaliana] >gi|7269214|emb|CAB79321.1| polyprenyltransferase like
  misc_feature (2)..(319): Homolog of NCBI NO: 38637096 NR Description: putative PGT-2 [Oryza sativa (japonica
  misc_feature (67)..(319): Homolog of NCBI NO: 40253783 NR Description: putative PGT-2 [Oryza sativa (japonica
  misc_feature (26)..(321): Homolog of NCBI NO: 18389308 NR Description: PGT-2 [Lithospermum erythrorhizon]
  misc_feature (26)..(321): Homolog of NCBI NO: 18389306 NR Description: PGT-1 [Lithospermum erythrorhizon]
  misc_feature (36)..(318): Homolog of NCBI NO: 31377825 NR Description: hypothetical protein CL640 [Homo sapiens] Hypothetical protein CL640 [Homo sapiens]
  misc_feature (1)..(316): Homolog of NCBI NO: 17553718 NR Description: UbiA prenyltransferase family [Caenorhabditis >gi|14916331|gb|AAK73883.1|U13876_5 Hypothetical protein F57B9.4a
  misc_feature (24)..(317): Homolog of NCBI NO: 39593939 NR Description: Hypothetical protein CBG16481 [Caenorhabditis
  misc_feature (35)..(318): Homolog of NCBI NO: 21355567 NR Description: CG9613-PA [Drosophila melanogaster]
MSSSSSVLEGKPKKDDKEKSDGVVVKEASWIDLYLPEEVRGYAKLARLDKPIGTWLLAWPCMWSIALAADPGSLPSFKYMALFGCGALLLRGAGCTINDLLDQDIDTKVDRTKLRPIASGLLTPFQGIGFLGLQLLLGLGILLQLNNYSRVLGASSLLLVFSYPLMKRFTFWPQAFLGLTINWGALLGWTAVKGSIAPSIVLPLYLSGVCWTLVYDTIYAHQDKEDDVKVGVKSTALRFGDNTKLWLTGFGTASIGFLALSGFSADLGWQYYASLAAASGQLGWQIGTADLSSGADCSRKFVSNKWFGAIIFSGVVLGRSFQ

SEQ ID NO: 100985 - protein, 261 aa, Arabidopsis thaliana
  peptide (1)..(261): Ceres Seq. ID no. 13606595
  misc_feature (1)..(258): Pfam Name: UbiA prenyltransferase family Pfam Description: UbiA prenyltransferase family
  misc_feature (1)..(261): Homolog of NCBI NO: 18416190 NR Description: UbiA prenyltransferase family [Arabidopsis >gi|30686272|ref|NP_849431.1| UbiA prenyltransferase family thaliana] >gi|16648989|gb|AAL24346.1| polyprenyltransferase like
  misc_feature (1)..(209): Homolog of NCBI NO: 7486734 NR Description: hypothetical protein F9D16.130 - Arabidopsis >gi|4454035|emb|CAA23032.1| polyprenyltransferase like protein thaliana] >gi|7269214|emb|CAB79321.1| polyprenyltransferase like
  misc_feature (1)..(258): Homolog of NCBI NO: 38637096 NR Description: putative PGT-2 [Oryza sativa (japonica
  misc_feature (6)..(258): Homolog of NCBI NO: 40253783 NR Description: putative PGT-2 [Oryza sativa (japonica
  misc_feature (1)..(260): Homolog of NCBI NO: 18389308 NR Description: PGT-2 [Lithospermum erythrorhizon]
  misc_feature (1)..(260): Homolog of NCBI NO: 18389306 NR Description: PGT-1 [Lithospermum erythrorhizon]
  misc_feature (1)..(257): Homolog of NCBI NO: 31377825 NR Description: hypothetical protein CL640 [Homo sapiens] Hypothetical protein CL640 [Homo sapiens]
  misc_feature (1)..(255): Homolog of NCBI NO: 17553718 NR Description: UbiA prenyltransferase family [Caenorhabditis >gi|14916331|gb|AAK73883.1|U13876_5 Hypothetical protein F57B9.4a
  misc_feature (1)..(256): Homolog of NCBI NO: 39593939 NR Description: Hypothetical protein CBG16481 [Caenorhabditis
  misc_feature (1)..(257): Homolog of NCBI NO: 21355567 NR Description: CG9613-PA [Drosophila melanogaster]
MWSIALAADPGSLPSFKYMALFGCGALLLRGAGCTINDLLDQDIDTKVDRTKLRPIASGLLTPFQGIGFLGLQLLLGLGILLQLNNYSRVLGASSLLLVFSYPLMKRFTFWPQAFLGLTINWGALLGWTAVKGSIAPSIVLPLYLSGVCWTLVYDTIYAHQDKEDDVKVGVKSTALRFGDNTKLWLTGFGTASIGFLALSGFSADLGWQYYASLAAASGQLGWQIGTADLSSGADCSRKFVSNKWFGAIIFSGVVLGRSFQ

SEQ ID NO: 100986 - DNA, 1182 bp, Arabidopsis thaliana
  misc_feature (1)..(1182): Ceres Seq. ID no. 13606610
  misc_feature: MA Experiment ID: 108434 Result: Down-regulated in Transcription
  misc_feature: MA Experiment 108434 PARAMETER Experiment Name: At_Root_Tips_cDNA_P Parameter: Tissue Value: Root Tips
  misc_feature: MA Experiment ID: 108577 Result: Down-regulated in Transcription
  misc_feature: MA Experiment 108577 PARAMETER Experiment Name: At_42deg_Heat_cDNA_P Parameter: Temperature (deg C) Value: 42 vs. 22
  misc_feature: MA Experiment 108577 PARAMETER Experiment Name: At_42deg_Heat_cDNA_P Parameter: Timepoint (hr) Value: 6
  misc_feature: MA Experiment 108577 PARAMETER Experiment Name: At_42deg_Heat_cDNA_P Parameter: Tissue Value: Aerial
  misc_feature: MA Experiment ID: 20000111 Result: Down-regulated in Transcription
  misc_feature: MA Experiment 20000111 PARAMETER Experiment Name: At_42deg_Heat_cDNA_P Parameter: Temperature (deg C) Value: 42 vs. 22
  misc_feature: MA Experiment 20000111 PARAMETER Experiment Name: At_42deg_Heat_cDNA_P Parameter: Timepoint (hr) Value: 6
  misc_feature: MA Experiment 20000111 PARAMETER Experiment Name: At_42deg_Heat_cDNA_P Parameter: Tissue Value: Aerial
  misc_feature: MA Experiment ID: 20000113 Result: Down-regulated in Transcription
  misc_feature: MA Experiment 20000113 PARAMETER Experiment Name: At_42deg_Heat_cDNA_P Parameter: Temperature (deg C) Value: 42 vs. 22
  misc_feature: MA Experiment 20000113 PARAMETER Experiment Name: At_42deg_Heat_cDNA_P Parameter: Timepoint (hr) Value: 8
  misc_feature: MA Experiment 20000113 PARAMETER Experiment Name: At_42deg_Heat_cDNA_P Parameter: Tissue Value: Aerial
  misc_feature: MA Experiment ID: 20000171 Result: Down-regulated in Transcription
  misc_feature: MA Experiment 20000171 PARAMETER Experiment Name: At_42deg_Heat_P Parameter: Age (day) Value: 14
  misc_feature: MA Experiment 20000171 PARAMETER Experiment Name: At_42deg_Heat_P Parameter: Organism Value: A. thaliana
  misc_feature: MA Experiment 20000171 PARAMETER Experiment Name: At_42deg_Heat_P Parameter: Plant Line Value: WS
  misc_feature: MA Experiment 20000171 PARAMETER Experiment Name: At_42deg_Heat_P Parameter: Temperature (deg C) Value: 42 vs. 22
  misc_feature: MA Experiment 20000171 PARAMETER Experiment Name: At_42deg_Heat_P Parameter: Timepoint (hr) Value: 1
  misc_feature: MA Experiment 20000171 PARAMETER Experiment Name: At_42deg_Heat_P Parameter: Tissue Value: Aerial
  misc_feature: MA Experiment ID: 20000173 Result: Down-regulated in Transcription
  misc_feature: MA Experiment 20000173 PARAMETER Experiment Name: At_42deg_Heat_P Parameter: Age (day) Value: 14
  misc_feature: MA Experiment 20000173 PARAMETER Experiment Name: At_42deg_Heat_P Parameter: Organism Value: A. thaliana
  misc_feature: MA Experiment 20000173 PARAMETER Experiment Name: At_42deg_Heat_P Parameter: Plant Line Value: WS
  misc_feature: MA Experiment 20000173 PARAMETER Experiment Name: At_42deg_Heat_P Parameter: Temperature (deg C) Value: 42 vs. 22
  misc_feature: MA Experiment 20000173 PARAMETER Experiment Name: At_42deg_Heat_P Parameter: Timepoint (hr) Value: 6
  misc_feature: MA Experiment 20000173 PARAMETER Experiment Name: At_42deg_Heat_P Parameter: Tissue Value: Aerial
  misc_feature: MA Experiment ID: 20000180 Result: Up-regulated in Transcription
  misc_feature: MA Experiment 20000180 PARAMETER Experiment Name: At_Germinating_Seeds_P Parameter: Age (hr) Value: 24 vs. 0
  misc_feature: MA Experiment 20000180 PARAMETER Experiment Name: At_Germinating_Seeds_P Parameter: Tissue Value: Germinating Seeds
  misc_feature: MA Experiment ID: 20000184 Result: Down-regulated in Transcription
  misc_feature: MA Experiment 20000184 PARAMETER Experiment Name: At_Shoots__P Parameter: Age (day) Value: 7
  misc_feature: MA Experiment 20000184 PARAMETER Experiment Name: At_Shoots__P Parameter: Tissue Value: Shoots vs. Whole Plant
  misc_feature: MA Experiment ID: 20000264 Result: Down-regulated in Transcription
  misc_feature: MA Experiment 20000264 PARAMETER Experiment Name: At_Open_Flower_P Parameter: Age (day) Value: 21
  misc_feature: MA Experiment 20000264 PARAMETER Experiment Name: At_Open_Flower_P Parameter: Plant Line Value: WS
  misc_feature: MA Experiment 20000264 PARAMETER Experiment Name: At_Open_Flower_P Parameter: Tissue Value: Open Flower vs. Whole Plant
  misc_feature: MA Experiment ID: 20000265 Result: Down-regulated in Transcription
  misc_feature: MA Experiment 20000265 PARAMETER Experiment Name: At_Open_Flower_P Parameter: Age (day) Value: 21
  misc_feature: MA Experiment 20000265 PARAMETER Experiment Name: At_Open_Flower_P Parameter: Plant Line Value: WS
  misc_feature: MA Experiment 20000265 PARAMETER Experiment Name: At_Open_Flower_P Parameter: Tissue Value: Closed Flower vs. Whole Plant
  misc_feature: MA Experiment ID: 20000451 Result: Up-regulated in Transcription
  misc_feature: MA Experiment 20000451 PARAMETER Experiment Name: At_CS6879_Shoots-Roots_P Parameter: Age (day) Value: 14
  misc_feature: MA Experiment 20000451 PARAMETER Experiment Name: At_CS6879_Shoots-Roots_P Parameter: Organism Value: A. thaliana
  misc_feature: MA Experiment 20000451 PARAMETER Experiment Name: At_CS6879_Shoots-Roots_P Parameter: Plant Line Value: CS6879 vs. WS
  misc_feature: MA Experiment 20000451 PARAMETER Experiment Name: At_CS6879_Shoots-Roots_P Parameter: Tissue Value: Roots
  misc_feature: MA Experiment ID: 20000452 Result: Up-regulated in Transcription
  misc_feature: MA Experiment 20000452 PARAMETER Experiment Name: At_CS6879_Shoots-Roots_P Parameter: Age (day) Value: 14
  misc_feature: MA Experiment 20000452 PARAMETER Experiment Name: At_CS6879_Shoots-Roots_P Parameter: Organism Value: A. thaliana
  misc_feature: MA Experiment 20000452 PARAMETER Experiment Name: At_CS6879_Shoots-Roots_P Parameter: Plant Line Value: CS6879 vs. WS
  misc_feature: MA Experiment 20000452 PARAMETER Experiment Name: At_CS6879_Shoots-Roots_P Parameter: Tissue Value: Shoots
  misc_feature: MA Experiment ID: 20001558 Result: Down-regulated in Transcription
  misc_feature: MA Experiment 20001558 PARAMETER Experiment Name: At_Drought_Soil_Dry_P Parameter: Age (day) Value: 27
  misc_feature: MA Experiment 20001558 PARAMETER Experiment Name: At_Drought_Soil_Dry_P Parameter: Organism Value: A. thaliana
  misc_feature: MA Experiment 20001558 PARAMETER Experiment Name: At_Drought_Soil_Dry_P Parameter: Plant Line Value: WS
  misc_feature: MA Experiment 20001558 PARAMETER Experiment Name: At_Drought_Soil_Dry_P Parameter: Post Timepoint (hr) Value: 6
  misc_feature: MA Experiment 20001558 PARAMETER Experiment Name: At_Drought_Soil_Dry_P Parameter: Post-Treatment Value: Re-Water vs. No Drought
  misc_feature: MA Experiment 20001558 PARAMETER Experiment Name: At_Drought_Soil_Dry_P Parameter: Timepoint (day) Value: 13
  misc_feature: MA Experiment 20001558 PARAMETER Experiment Name: At_Drought_Soil_Dry_P Parameter: Treatment Value: Drought vs. No Drought
acacactttaacgcatttctcaaaattacgttgccaaagtctggtcagagctacaaatcaaatttgacagactgcaatttccaatccaacgactgcgaatgaagtttaatggcgactagatcgccttataagagacaaacgaagcgatccatgattcagtctcttccagcttcttcttctgcatcatctcgccgccgattcatttctcggaagaggttcgcgatgatgattcctcttgctctcctctccggcgccgttttcctattctttatgccattcaatagctggggccaatcatctggttcttctctggatctctcccataggatcaatgaaattgaagtagttgctgagtttcctcatgatccggacgcctttactcagggtcttctttatgcgggaaacgatacactgttcgaatccactggtctatacgggaagtcttcagtgaggaaagtggatctacgaacaggaaaggttgaaattcttgaaaaaatggacaatacatattttggagagggtttaacactccttggagaaaggctctttcaagtcgcatggttgacaaacacgggtttcacatatgaccttcgcaacttaagtaaagtaaaaccatttaaacatcatatgaaagatggatggggactggctaccgatggaaaagcgttatttggaagtgatggcacttctacattatatcggatggaccctcaaacaatgaaagttactgataagcatatagtcagatataatggccgtgaggtacgttaccttaatgagctcgagtacataaacaacgaagtttgggcaaatgtgtggcagtctgattgtattgctagaatttcacccaaggacggatctctgcttggatggatactgctttcaaaattaagtcggggattgctgaaatctggacataggggtattgatgttttgaatggcatagcatgggacagtgacaagcaacgcctctttgtaacggggaaactgtggccaaagctgtaccaaatcaagctaaaacaagcatcagcaaagagcggaaattatatcgagcaacaatgcttggtatgaaaatattgcgcttggtaatggttagaatgtatactggctataatttaccataatttctgaacattagcatttagcaaacttcaatgattgaagatgagaatcaaaacctcg

SEQ ID NO: 100987 - protein, 320 aa, Arabidopsis thaliana
  peptide (1)..(320): Ceres Seq. ID no. 13606611
  misc_feature (40)..(310): Pfam Name: Glutamine cyclotransferase Pfam Description: Glutamine cyclotransferase
  misc_feature (1)..(320): Homolog of NCBI NO: 18416607 NR Description: glutamine cyclotransferase precursor - like [Arabidopsis thaliana] >gi|25054886|gb|AAN71928.1| putative
  misc_feature (1)..(320): Homolog of NCBI NO: 21536884 NR Description: glutamine cyclotransferase precursor-like protein
  misc_feature (1)..(320): Homolog of NCBI NO: 7484984 NR Description: glutaminyl-peptide cyclotransferase homolog - Arabidopsis thaliana >gi|4914464|emb|CAB43703.1| glutamine
  misc_feature (71)..(319): Homolog of NCBI NO: 7484740 NR Description: glutaminyl-peptide cyclotransferase (EC 2.3.2.5) - papaya >gi|3342798|gb|AAC27745.1| glutamine cyclotransferase
  misc_feature (78)..(318): Homolog of NCBI NO: 24413973 NR Description: putative glutaminyl-peptide cyclotransferase
  misc_feature (78)..(307): Homolog of NCBI NO: 16126885 NR Description: glutamine cyclotransferase [Caulobacter
  misc_feature (35)..(303): Homolog of NCBI NO: 31790364 NR Description: putative glutamine cyclotransferase [uncultured
  misc_feature (79)..(303): Homolog of NCBI NO: 21231655 NR Description: glutamine cyclotransferase [Xanthomonas pv. campestris str. ATCC 33913] >gi|21113351|gb|AAM41496.1| cyclotransferase [Xanthomonas campestris pv. campestris str. ATCC
  misc_feature (79)..(305): Homolog of NCBI NO: 22970826 NR Description: hypothetical protein [Chloroflexus aurantiacus]
  misc_feature (79)..(305): Homolog of NCBI NO: 21243055 NR Description: glutamine cyclotransferase [Xanthomonas pv. citri str. 306] >gi|21108567|gb|AAM37173.1| glutamine
MATRSPYKRQTKRSMIQSLPASSSASSRRRFISRKRFAMMIPLALLSGAVFLFFMPFNSWGQSSGSSLDLSHRINEIEVVAEFPHDPDAFTQGLLYAGNDTLFESTGLYGKSSVRKVDLRTGKVEILEKMDNTYFGEGLTLLGERLFQVAWLTNTGFTYDLRNLSKVKPFKHHMKDGWGLATDGKALFGSDGTSTLYRMDPQTMKVTDKHIVRYNGREVRYLNELEYINNEVWANVWQSDCIARISPKDGSLLGWILLSKLSRGLLKSGHRGIDVLNGIAWDSDKQRLFVTGKLWPKLYQIKLKQASAKSGNYIEQQCLV

SEQ ID NO: 100988 - protein, 306 aa, Arabidopsis thaliana
  peptide (1)..(306): Ceres Seq. ID no. 13606612
  misc_feature (26)..(296): Pfam Name: Glutamine cyclotransferase Pfam Description: Glutamine cyclotransferase
  misc_feature (1)..(306): Homolog of NCBI NO: 18416607 NR Description: glutamine cyclotransferase precursor - like [Arabidopsis thaliana] >gi|25054886|gb|AAN71928.1| putative
  misc_feature (1)..(306): Homolog of NCBI NO: 21536884 NR Description: glutamine cyclotransferase precursor-like protein
  misc_feature (1)..(306): Homolog of NCBI NO: 7484984 NR Description: glutaminyl-peptide cyclotransferase homolog - Arabidopsis thaliana >gi|4914464|emb|CAB43703.1| glutamine
  misc_feature (57)..(305): Homolog of NCBI NO: 7484740 NR Description: glutaminyl-peptide cyclotransferase (EC 2.3.2.5) - papaya >gi|3342798|gb|AAC27745.1| glutamine cyclotransferase
  misc_feature (64)..(304): Homolog of NCBI NO: 24413973 NR Description: putative glutaminyl-peptide cyclotransferase
  misc_feature (64)..(293): Homolog of NCBI NO: 16126885 NR Description: glutamine cyclotransferase [Caulobacter
  misc_feature (21)..(289): Homolog of NCBI NO: 31790364 NR Description: putative glutamine cyclotransferase [uncultured
  misc_feature (65)..(289): Homolog of NCBI NO: 21231655 NR Description: glutamine cyclotransferase [Xanthomonas pv. campestris str. ATCC 33913] >gi|21113351|gb|AAM41496.1| cyclotransferase [Xanthomonas campestris pv. campestris str. ATCC
  misc_feature (65)..(291): Homolog of NCBI NO: 22970826 NR Description: hypothetical protein [Chloroflexus aurantiacus]
  misc_feature (65)..(291): Homolog of NCBI NO: 21243055 NR Description: glutamine cyclotransferase [Xanthomonas pv. citri str. 306] >gi|21108567|gb|AAM37173.1| glutamine
MIQSLPASSSASSRRRFISRKRFAMMIPLALLSGAVFLFFMPFNSWGQSSGSSLDLSHRINEIEVVAEFPHDPDAFTQGLLYAGNDTLFESTGLYGKSSVRKVDLRTGKVEILEKMDNTYFGEGLTLLGERLFQVAWLTNTGFTYDLRNLSKVKPFKHHMKDGWGLATDGKALFGSDGTSTLYRMDPQTMKVTDKHIVRYNGREVRYLNELEYINNEVWANVWQSDCIARISPKDGSLLGWILLSKLSRGLLKSGHRGIDVLNGIAWDSDKQRLFVTGKLWPKLYQIKLKQASAKSGNYIEQQCLV

SEQ ID NO: 100989 - protein, 282 aa, Arabidopsis thaliana
  peptide (1)..(282): Ceres Seq. ID no. 13606613
  misc_feature (2)..(272): Pfam Name: Glutamine cyclotransferase Pfam Description: Glutamine cyclotransferase
  misc_feature (1)..(282): Homolog of NCBI NO: 18416607 NR Description: glutamine cyclotransferase precursor - like [Arabidopsis thaliana] >gi|25054886|gb|AAN71928.1| putative
  misc_feature (1)..(282): Homolog of NCBI NO: 21536884 NR Description: glutamine cyclotransferase precursor-like protein
  misc_feature (1)..(282): Homolog of NCBI NO: 7484984 NR Description: glutaminyl-peptide cyclotransferase homolog - Arabidopsis thaliana >gi|4914464|emb|CAB43703.1| glutamine
  misc_feature (33)..(281): Homolog of NCBI NO: 7484740 NR Description: glutaminyl-peptide cyclotransferase (EC 2.3.2.5) - papaya >gi|3342798|gb|AAC27745.1| glutamine cyclotransferase
  misc_feature (40)..(280): Homolog of NCBI NO: 24413973 NR Description: putative glutaminyl-peptide cyclotransferase
  misc_feature (40)..(269): Homolog of NCBI NO: 16126885 NR Description: glutamine cyclotransferase [Caulobacter
  misc_feature (1)..(265): Homolog of NCBI NO: 31790364 NR Description: putative glutamine cyclotransferase [uncultured
  misc_feature (41)..(265): Homolog of NCBI NO: 21231655 NR Description: glutamine cyclotransferase [Xanthomonas pv. campestris str. ATCC 33913] >gi|21113351|gb|AAM41496.1| cyclotransferase [Xanthomonas campestris pv. campestris str. ATCC
  misc_feature (41)..(267): Homolog of NCBI NO: 22970826 NR Description: hypothetical protein [Chloroflexus aurantiacus]
  misc_feature (41)..(267): Homolog of NCBI NO: 21243055 NR Description: glutamine cyclotransferase [Xanthomonas pv. citri str. 306] >gi|21108567|gb|AAM37173.1| glutamine
MMIPLALLSGAVFLFFMPFNSWGQSSGSSLDLSHRINEIEVVAEFPHDPDAFTQGLLYAGNDTLFESTGLYGKSSVRKVDLRTGKVEILEKMDNTYFGEGLTLLGERLFQVAWLTNTGFTYDLRNLSKVKPFKHHMKDGWGLATDGKALFGSDGTSTLYRMDPQTMKVTDKHIVRYNGREVRYLNELEYINNEVWANVWQSDCIARISPKDGSLLGWILLSKLSRGLLKSGHRGIDVLNGIAWDSDKQRLFVTGKLWPKLYQIKLKQASAKSGNYIEQQCLV

SEQ ID NO: 100990 - DNA, 881 bp, Arabidopsis thaliana
  misc_feature (1)..(881): Ceres Seq. ID no. 13606614
  misc_feature: MA Experiment ID: 20000171 Result: Down-regulated in Transcription
  misc_feature: MA Experiment 20000171 PARAMETER Experiment Name: At_42deg_Heat_P Parameter: Age (day) Value: 14
  misc_feature: MA Experiment 20000171 PARAMETER Experiment Name: At_42deg_Heat_P Parameter: Organism Value: A. thaliana
  misc_feature: MA Experiment 20000171 PARAMETER Experiment Name: At_42deg_Heat_P Parameter: Plant Line Value: WS
  misc_feature: MA Experiment 20000171 PARAMETER Experiment Name: At_42deg_Heat_P Parameter: Temperature (deg C) Value: 42 vs. 22
  misc_feature: MA Experiment 20000171 PARAMETER Experiment Name: At_42deg_Heat_P Parameter: Timepoint (hr) Value: 1
  misc_feature: MA Experiment 20000171 PARAMETER Experiment Name: At_42deg_Heat_P Parameter: Tissue Value: Aerial
  misc_feature: MA Experiment ID: 20000182 Result: Down-regulated in Transcription
  misc_feature: MA Experiment 20000182 PARAMETER Experiment Name: At_2mM_SA_P Parameter: Age (day) Value: 14
  misc_feature: MA Experiment 20000182 PARAMETER Experiment Name: At_2mM_SA_P Parameter: Organism Value: A. thaliana
  misc_feature: MA Experiment 20000182 PARAMETER Experiment Name: At_2mM_SA_P Parameter: Plant Line Value: WS
  misc_feature: MA Experiment 20000182 PARAMETER Experiment Name: At_2mM_SA_P Parameter: Timepoint (hr) Value: 6
  misc_feature: MA Experiment 20000182 PARAMETER Experiment Name: At_2mM_SA_P Parameter: Tissue Value: Aerial
  misc_feature: MA Experiment 20000182 PARAMETER Experiment Name: At_2mM_SA_P Parameter: Treatment Value: 2mM SA vs. No Treatment
  misc_feature: MA Experiment ID: 20000184 Result: Up-regulated in Transcription
  misc_feature: MA Experiment 20000184 PARAMETER Experiment Name: At_Shoots__P Parameter: Age (day) Value: 7
  misc_feature: MA Experiment 20000184 PARAMETER Experiment Name: At_Shoots__P Parameter: Tissue Value: Shoots vs. Whole Plant
  misc_feature: MA Experiment ID: 20000234 Result: Up-regulated in Transcription
  misc_feature: MA Experiment 20000234 PARAMETER Experiment Name: At_Siliques_P Parameter: Age (day) Value: 21
  misc_feature: MA Experiment 20000234 PARAMETER Experiment Name: At_Siliques_P Parameter: Organism Value: A. thaliana
  misc_feature: MA Experiment 20000234 PARAMETER Experiment Name: At_Siliques_P Parameter: Plant Line Value: WS
  misc_feature: MA Experiment 20000234 PARAMETER Experiment Name: At_Siliques_P Parameter: Tissue Value: Less Than 5mm Siliques vs. Whole Plant
  misc_feature: MA Experiment ID: 20000264 Result: Up-regulated in Transcription
  misc_feature: MA Experiment 20000264 PARAMETER Experiment Name: At_Open_Flower_P Parameter: Age (day) Value: 21
  misc_feature: MA Experiment 20000264 PARAMETER Experiment Name: At_Open_Flower_P Parameter: Plant Line Value: WS
  misc_feature: MA Experiment 20000264 PARAMETER Experiment Name: At_Open_Flower_P Parameter: Tissue Value: Open Flower vs. Whole Plant
  misc_feature: MA Experiment ID: 20000265 Result: Up-regulated in Transcription
  misc_feature: MA Experiment 20000265 PARAMETER Experiment Name: At_Open_Flower_P Parameter: Age (day) Value: 21
  misc_feature: MA Experiment 20000265 PARAMETER Experiment Name: At_Open_Flower_P Parameter: Plant Line Value: WS
  misc_feature: MA Experiment 20000265 PARAMETER Experiment Name: At_Open_Flower_P Parameter: Tissue Value: Closed Flower vs. Whole Plant
  misc_feature: MA Experiment ID: 20000286 Result: Up-regulated in Transcription
  misc_feature: MA Experiment 20000286 PARAMETER Experiment Name: At_Open_Flower_P Parameter: Age (day) Value: 21
  misc_feature: MA Experiment 20000286 PARAMETER Experiment Name: At_Open_Flower_P Parameter: Plant Line Value: WS
  misc_feature: MA Experiment 20000286 PARAMETER Experiment Name: At_Open_Flower_P Parameter: Tissue Value: Half Open vs. Whole Plant
  misc_feature: MA Experiment ID: 20000438 Result: Up-regulated in Transcription
  misc_feature: MA Experiment 20000438 PARAMETER Experiment Name: At_Shoots__P Parameter: Age (day) Value: 14
  misc_feature: MA Experiment 20000438 PARAMETER Experiment Name: At_Shoots__P Parameter: Tissue Value: Shoots vs. Whole Plant
  misc_feature: MA Experiment ID: 20000439 Result: Down-regulated in Transcription
  misc_feature: MA Experiment 20000439 PARAMETER Experiment Name: At_Roots__P Parameter: Age (day) Value: 14 vs. 21
  misc_feature: MA Experiment 20000439 PARAMETER Experiment Name: At_Roots__P Parameter: Organism Value: A. thaliana
  misc_feature: MA Experiment 20000439 PARAMETER Experiment Name: At_Roots__P Parameter: Tissue Value: Roots vs. Whole Plant
  misc_feature: MA Experiment ID: 20000460 Result: Down-regulated in Transcription
  misc_feature: MA Experiment 20000460 PARAMETER Experiment Name: At_10percent_PEG_P Parameter: Age (day) Value: 12
  misc_feature: MA Experiment 20000460 PARAMETER Experiment Name: At_10percent_PEG_P Parameter: Organism Value: A. thaliana
  misc_feature: MA Experiment 20000460 PARAMETER Experiment Name: At_10percent_PEG_P Parameter: Plant Line Value: WS
  misc_feature: MA Experiment 20000460 PARAMETER Experiment Name: At_10percent_PEG_P Parameter: Timepoint (day) Value: 12
  misc_feature: MA Experiment 20000460 PARAMETER Experiment Name: At_10percent_PEG_P Parameter: Tissue Value: Whole Plant
  misc_feature: MA Experiment 20000460 PARAMETER Experiment Name: At_10percent_PEG_P Parameter: Treatment Value: 10percent PEG vs. No Treatment
  misc_feature: MA Experiment ID: 20000606 Result: Down-regulated in Transcription
  misc_feature: MA Experiment 20000606 PARAMETER Experiment Name: At_CS8548_Mutant_P Parameter: Age (day) Value: 14
  misc_feature: MA Experiment 20000606 PARAMETER Experiment Name: At_CS8548_Mutant_P Parameter: Plant Line Value: CS8548 vs. wt
  misc_feature: MA Experiment 20000606 PARAMETER Experiment Name: At_CS8548_Mutant_P Parameter: Tissue Value: Whole Plant
  misc_feature: MA Experiment ID: 20000794 Result: Up-regulated in Transcription
  misc_feature: MA Experiment 20000794 PARAMETER Experiment Name: At_Petals_P Parameter: Age (day) Value: 23-25 days
  misc_feature: MA Experiment 20000794 PARAMETER Experiment Name: At_Petals_P Parameter: Plant Line Value: WS
  misc_feature: MA Experiment 20000794 PARAMETER Experiment Name: At_Petals_P Parameter: Tissue Value: Petals vs. Whole plant
  misc_feature: MA Experiment ID: 20001248 Result: Down-regulated in Transcription
  misc_feature: MA Experiment 20001248 PARAMETER Experiment Name: At_Far-red-induction_P Parameter: Age (day) Value: 7
  misc_feature: MA Experiment 20001248 PARAMETER Experiment Name: At_Far-red-induction_P Parameter: Light Value: Far-red vs. White
  misc_feature: MA Experiment 20001248 PARAMETER Experiment Name: At_Far-red-induction_P Parameter: Organism Value: A. thaliana
  misc_feature: MA Experiment 20001248 PARAMETER Experiment Name: At_Far-red-induction_P Parameter: Plant Line Value: Columbia
  misc_feature: MA Experiment 20001248 PARAMETER Experiment Name: At_Far-red-induction_P Parameter: Timepoint (hr) Value: 4
  misc_feature: MA Experiment 20001248 PARAMETER Experiment Name: At_Far-red-induction_P Parameter: Tissue Value: Whole Plant
  misc_feature: MA Experiment ID: 20001450 Result: Down-regulated in Transcription
  misc_feature: MA Experiment 20001450 PARAMETER Experiment Name: At_Far-red-induction_P Parameter: Age (day) Value: 7
  misc_feature: MA Experiment 20001450 PARAMETER Experiment Name: At_Far-red-induction_P Parameter: Light Value: Far-red vs. White
  misc_feature: MA Experiment 20001450 PARAMETER Experiment Name: At_Far-red-induction_P Parameter: Organism Value: A. thaliana
  misc_feature: MA Experiment 20001450 PARAMETER Experiment Name: At_Far-red-induction_P Parameter: Plant Line Value: Columbia
  misc_feature: MA Experiment 20001450 PARAMETER Experiment Name: At_Far-red-induction_P Parameter: Timepoint (hr) Value: 8
  misc_feature: MA Experiment 20001450 PARAMETER Experiment Name: At_Far-red-induction_P Parameter: Tissue Value: Whole Plant
  misc_feature: MA Experiment ID: 20001556 Result: Up-regulated in Transcription
  misc_feature: MA Experiment 20001556 PARAMETER Experiment Name: At_Drought_Soil_Dry_P Parameter: Age (day) Value: 26
  misc_feature: MA Experiment 20001556 PARAMETER Experiment Name: At_Drought_Soil_Dry_P Parameter: Organism Value: A. thaliana
  misc_feature: MA Experiment 20001556 PARAMETER Experiment Name: At_Drought_Soil_Dry_P Parameter: Plant Line Value: WS
  misc_feature: MA Experiment 20001556 PARAMETER Experiment Name: At_Drought_Soil_Dry_P Parameter: Post Timepoint (hr) Value: None
  misc_feature: MA Experiment 20001556 PARAMETER Experiment Name: At_Drought_Soil_Dry_P Parameter: Post-Treatment Value: None
  misc_feature: MA Experiment 20001556 PARAMETER Experiment Name: At_Drought_Soil_Dry_P Parameter: Timepoint (day) Value: 12
  misc_feature: MA Experiment 20001556 PARAMETER Experiment Name: At_Drought_Soil_Dry_P Parameter: Treatment Value: Drought vs. No Drought
  misc_feature: MA Experiment ID: 20001905 Result: Up-regulated in Transcription
  misc_feature: MA Experiment 20001905 PARAMETER Experiment Name: At_Drought_Reproduction_P Parameter: Age (day) Value: 40
  misc_feature: MA Experiment 20001905 PARAMETER Experiment Name: At_Drought_Reproduction_P Parameter: Organism Value: A. thaliana
  misc_feature: MA Experiment 20001905 PARAMETER Experiment Name: At_Drought_Reproduction_P Parameter: Plant Line Value: WS
  misc_feature: MA Experiment 20001905 PARAMETER Experiment Name: At_Drought_Reproduction_P Parameter: Timepoint (day) Value: 10
  misc_feature: MA Experiment 20001905 PARAMETER Experiment Name: At_Drought_Reproduction_P Parameter: Tissue Value: Rosettes
  misc_feature: MA Experiment 20001905 PARAMETER Experiment Name: At_Drought_Reproduction_P Parameter: Treatment Value: Drought vs. No Drought
  misc_feature: MA Experiment ID: 20001910 Result: Up-regulated in Transcription
  misc_feature: MA Experiment 20001910 PARAMETER Experiment Name: At_Drought_Reproduction_P Parameter: Age (day) Value: 37
  misc_feature: MA Experiment 20001910 PARAMETER Experiment Name: At_Drought_Reproduction_P Parameter: Organism Value: A. thaliana
  misc_feature: MA Experiment 20001910 PARAMETER Experiment Name: At_Drought_Reproduction_P Parameter: Plant Line Value: WS
  misc_feature: MA Experiment 20001910 PARAMETER Experiment Name: At_Drought_Reproduction_P Parameter: Timepoint (day) Value: 7
  misc_feature: MA Experiment 20001910 PARAMETER Experiment Name: At_Drought_Reproduction_P Parameter: Tissue Value: Flowers
  misc_feature: MA Experiment 20001910 PARAMETER Experiment Name: At_Drought_Reproduction_P Parameter: Treatment Value: Drought vs. No Drought
agcacctacaaaacaatataatctcagaaaagagagaggatgagctcatcctatttacgagtaatattactcttaggtgcccttaatgtcgtcgtttctttatcaataaccaattctttaataaccaaatcagcaacactcggtcaggtgttccgaatctgtaagaatttgtgtccgggatgtgaccacgactccttgcagttcttgttccgacacaacctggtccgtgccgcaagattcgaacctcctttgatatgggaccgcagactccagaactacgcccaagggtgggctaatcaaagaaggggagattgtgctttgagacactctgtctcaaacggagagtttaatctcggcgagaacatctactggggatacggcgccaactggtctccggccgacgcggtggttgcatgggccagcgagaagaggttttatcattacggctccaacacgtgcgacgctggtcagatgtgtggtcattacacacagattgtgtggaagagcactaggagggtcggatgtgcacgtgtggtgtgcgacaatggtgggatcttcatgacttgtaactatgatcctcccggtaactacatcggccagaaaccctattaatttatcatcatttatctattaaaaattctccaaaataaagtcatcttactaattttttagaaattatgatgactttttaaaggagattaggtgggtgtatttgtgtattttactagaaaatagatctatttgtgggggttgtgatactaattatgtatcttgattattttaattgatggttgtaattgcatcaacggttatttatatatccgtaagaatgcccagtgtacaagaatatataaaatataaaaagatgatatgatttttgc

SEQ ID NO: 100991 - protein, 190 aa, Arabidopsis thaliana
  peptide (1)..(190): Ceres Seq. ID no. 13606615
  misc_feature (56)..(177): Pfam Name: SCP-like extracellular protein Pfam Description: SCP-like extracellular protein
  misc_feature (1)..(190): Homolog of NCBI NO: 15235992 NR Description: pathogenesis-related protein, putative
  misc_feature (54)..(190): Homolog of NCBI NO: 2500715 NR Description: Pathogenesis-related protein PR-1 precursor
  misc_feature (55)..(190): Homolog of NCBI NO: 22327916 NR Description: pathogenesis-related protein family [Arabidopsis
  misc_feature (45)..(190): Homolog of NCBI NO: 15234704 NR Description: pathogenesis-related protein family [Arabidopsis
  misc_feature (54)..(190): Homolog of NCBI NO: 15235994 NR Description: pathogenesis-related protein, putative
  misc_feature (55)..(190): Homolog of NCBI NO: 3702665 NR Description: pathogenisis-related protein 1.2 [Triticum
  misc_feature (55)..(190): Homolog of NCBI NO: 480679 NR Description: pathogenesis-related protein 1a - barley
  misc_feature (52)..(190): Homolog of NCBI NO: 15223370 NR Description: pathogenesis-related protein family [Arabidopsis
  misc_feature (52)..(190): Homolog of NCBI NO: 25518458 NR Description: hypothetical protein F6F3.11 - Arabidopsis
  misc_feature (55)..(190): Homolog of NCBI NO: 14334165 NR Description: pathogenesis-related protein 1 [Triticum aestivum]
MSSSYLRVILLLGALNVVVSLSITNSLITKSATLGQVFRICKNLCPGCDHDSLQFLFRHNLVRAARFEPPLIWDRRLQNYAQGWANQRRGDCALRHSVSNGEFNLGENIYWGYGANWSPADAVVAWASEKRFYHYGSNTCDAGQMCGHYTQIVWKSTRRVGCARVVCDNGGIFMTCNYDPPGNYIGQKPY

SEQ ID NO: 100992 - DNA, 1929 bp, Arabidopsis thaliana
  misc_feature (1)..(1929): Ceres Seq. ID no. 13606623
  misc_feature: MA Experiment ID: 20001557 Result: Up-regulated in Transcription
  misc_feature: MA Experiment 20001557 PARAMETER Experiment Name: At_Drought_Soil_Dry_P Parameter: Age (day) Value: 27
  misc_feature: MA Experiment 20001557 PARAMETER Experiment Name: At_Drought_Soil_Dry_P Parameter: Organism Value: A. thaliana
  misc_feature: MA Experiment 20001557 PARAMETER Experiment Name: At_Drought_Soil_Dry_P Parameter: Plant Line Value: WS
  misc_feature: MA Experiment 20001557 PARAMETER Experiment Name: At_Drought_Soil_Dry_P Parameter: Post Timepoint (hr) Value: 3
  misc_feature: MA Experiment 20001557 PARAMETER Experiment Name: At_Drought_Soil_Dry_P Parameter: Post-Treatment Value: Re-Water vs. No Drought
  misc_feature: MA Experiment 20001557 PARAMETER Experiment Name: At_Drought_Soil_Dry_P Parameter: Timepoint (day) Value: 13
  misc_feature: MA Experiment 20001557 PARAMETER Experiment Name: At_Drought_Soil_Dry_P Parameter: Treatment Value: Drought vs. No Drought
atgagtaaagaagagtttatgaagatccagacttgtgttctcaaagtgaatattcattgtgatggttgtaagcagaaagtgaagaaaatcttgcagaaaattgaaggtgttttcacgacaaagatagacgcagagctagggaaagtgactgtatctggaaacgtcgacccatcagttcttatcaagaagctcttgaaatctggtaaacatgccgaaatctggggagctcccaagggaggatctaacaacaatcagaaccaacccaacttggccaatcagttcaaagccatgcagattgatcatggcggcaaaggcggtggcggtggtggtggaggccctgctaacaataacaaaggccaaaagatcggtggaggcggtggtggaggaggaggcggcggcggaggtggtggtggcggaccaccgaagatggttattccacagttaacaccacaacagatgcagcagttgaatcctcaacagcttcagcagctacaacaacttcagcagatgaaagggtttcaagatctgaagcttcctcctcagttaaagggtggtccaggtccgggacctggctctgttcctatgaacaagaatcctcagatgcctaataatcctaatcagaaggctgtgaagttcaatgttcctgatgatgatgatgaggaagattttagtgatgaattcgatgatgagtttgatgaagatgacgacgagtttgatgatgatttggaagatgatgagtttgacgaccacccacctccgcctaacaaaatgaagcctatgatgggtggtggtaacatgatcatgcctaataacatgatgcctaacatgatgatgcctaacgctcaacaaatgttaaacgctcataagaatggtggtggtcctggacccgccggaggtaaaattgagggtaaaggtatgccttttccggttcaaatgggcggcggtggtggaggtcccggtggtaagaagggaggtcccggtggaggcgggggtaatatggggaatcagaaccaaggaggaggaggcaagaacggtggaaaaggcggtggtggacatccgttagatggaaaaatgggcggcggaggtggcggtcccaacggtaataaaggaggtggcggagtccagatgaacggaggtcccaacggtgggaaaaagggtggtggtggaggcggcggcggaggaggaggacccatgagtggaggcctcccgccaggtttccggccaatgggaggcggtggtggtggagggggaggacctcagagcatgagtatgccaatgggcggtgcaatgggtggtccaatgggaagtctaccacaaatgggtggtggtcccggtccaatgagtaataatatgcaggcggttcaaggattacccgcaatgggtccaggaggtggtggtggcggtggcccatccgcagaagcaccaccaggatatttccaaggccaagtctccggaaacggcggaggcggacaagactcaatgccgggaaacccctacttacaacagcagcaacagcaacaacaacaacaatacttagcggcggttatgaaccagcaacgatccatgggaaacgaacggttccagccgatgatgtacgctagaccaccgccagctgtcaactatatgccaccacaaccgcaaccgcaccaacaacatccatacccgtatccatatccgtatccaccccagtatccgcctcacaatggtgaccagtattctgattacttcaatgacgagaacacatcaagctgcaatattatgtgaacaacaacaacaaaactttccatagtttgtgtccggtctgtgattatacatggaaatgttttttttttcataattattgggggttcttagaatccttttttttcctccaacggatcaaatcctaaattatattaggatttttttttataatttgtgatagttctt

SEQ ID NO: 100993 - protein, 587 aa, Arabidopsis thaliana
  peptide (1)..(587): Ceres Seq. ID no. 13606624
  misc_feature (13)..(73): Pfam Name: Heavy-metal-associated domain Pfam Description: Heavy-metal-associated domain
  misc_feature (115)..(587): Homolog of NCBI NO: 27754558 NR Description: unknown protein [Arabidopsis thaliana]
  misc_feature (1)..(380): Homolog of NCBI NO: 30687142 NR Description: heavy-metal-associated domain-containing protein
  misc_feature (343)..(587): Homolog of NCBI NO: 18397481 NR Description: heavy-metal-associated domain-containing protein thaliana] >gi|6862917|gb|AAF30306.1|AC018907_6 hypothetical [Arabidopsis thaliana] >gi|11908104|gb|AAG41481.1|AF326899_1
  misc_feature (1)..(233): Homolog of NCBI NO: 18397481 NR Description: heavy-metal-associated domain-containing protein thaliana] >gi|6862917|gb|AAF30306.1|AC018907_6 hypothetical [Arabidopsis thaliana] >gi|11908104|gb|AAG41481.1|AF326899_1
  misc_feature (335)..(560): Homolog of NCBI NO: 18397481 NR Description: heavy-metal-associated domain-containing protein thaliana] >gi|6862917|gb|AAF30306.1|AC018907_6 hypothetical [Arabidopsis thaliana] >gi|11908104|gb|AAG41481.1|AF326899_1
  misc_feature (315)..(446): Homolog of NCBI NO: 18397481 NR Description: heavy-metal-associated domain-containing protein thaliana] >gi|6862917|gb|AAF30306.1|AC018907_6 hypothetical [Arabidopsis thaliana] >gi|11908104|gb|AAG41481.1|AF326899_1
  misc_feature (413)..(587): Homolog of NCBI NO: 30687142 NR Description: heavy-metal-associated domain-containing protein
  misc_feature (47)..(587): Homolog of NCBI NO: 6729032 NR Description: unknown protein [Arabidopsis thaliana]
  misc_feature (90)..(422): Homolog of NCBI NO: 18397481 NR Description: heavy-metal-associated domain-containing protein thaliana] >gi|6862917|gb|AAF30306.1|AC018907_6 hypothetical [Arabidopsis thaliana] >gi|11908104|gb|AAG41481.1|AF326899_1
  misc_feature (291)..(496): Homolog of NCBI NO: 34394704 NR Description: putative glycine-rich cell wall structural
MSKEEFMKIQTCVLKVNIHCDGCKQKVKKILQKIEGVFTTKIDAELGKVTVSGNVDPSVLIKKLLKSGKHAEIWGAPKGGSNNNQNQPNLANQFKAMQIDHGGKGGGGGGGGPANNNKGQKIGGGGGGGGGGGGGGGGGPPKMVIPQLTPQQMQQLNPQQLQQLQQLQQMKGFQDLKLPPQLKGGPGPGPGSVPMNKNPQMPNNPNQKAVKFNVPDDDDEEDFSDEFDDEFDEDDDEFDDDLEDDEFDDHPPPPNKMKPMMGGGNMIMPNNMMPNMMMPNAQQMLNAHKNGGGPGPAGGKIEGKGMPFPVQMGGGGGGPGGKKGGPGGGGGNMGNQNQGGGGKNGGKGGGGHPLDGKMGGGGGGPNGNKGGGGVQMNGGPNGGKKGGGGGGGGGGGPMSGGLPPGFRPMGGGGGGGGGPQSMSMPMGGAMGGPMGSLPQMGGGPGPMSNNMQAVQGLPAMGPGGGGGGGPSAEAPPGYFQGQVSGNGGGGQDSMPGNPYLQQQQQQQQQQYLAAVMNQQRSMGNERFQPMMYARPPPAVNYMPPQPQPHQQHPYPYPYPYPPQYPPHNGDQYSDYFNDENTSSCNIM

SEQ ID NO: 100994 - protein, 581 aa, Arabidopsis thaliana
  peptide (1)..(581): Ceres Seq. ID no. 13606625
  misc_feature (7)..(67): Pfam Name: Heavy-metal-associated domain Pfam Description: Heavy-metal-associated domain
  misc_feature (109)..(581): Homolog of NCBI NO: 27754558 NR Description: unknown protein [Arabidopsis thaliana]
  misc_feature (1)..(374): Homolog of NCBI NO: 30687142 NR Description: heavy-metal-associated domain-containing protein
  misc_feature (337)..(581): Homolog of NCBI NO: 18397481 NR Description: heavy-metal-associated domain-containing protein thaliana] >gi|6862917|gb|AAF30306.1|AC018907_6 hypothetical [Arabidopsis thaliana] >gi|11908104|gb|AAG41481.1|AF326899_1
  misc_feature (1)..(227): Homolog of NCBI NO: 18397481 NR Description: heavy-metal-associated domain-containing protein thaliana] >gi|6862917|gb|AAF30306.1|AC018907_6 hypothetical [Arabidopsis thaliana] >gi|11908104|gb|AAG41481.1|AF326899_1
  misc_feature (329)..(554): Homolog of NCBI NO: 18397481 NR Description: heavy-metal-associated domain-containing protein thaliana] >gi|6862917|gb|AAF30306.1|AC018907_6 hypothetical [Arabidopsis thaliana] >gi|11908104|gb|AAG41481.1|AF326899_1
  misc_feature (309)..(440): Homolog of NCBI NO: 18397481 NR Description: heavy-metal-associated domain-containing protein thaliana] >gi|6862917|gb|AAF30306.1|AC018907_6 hypothetical [Arabidopsis thaliana] >gi|11908104|gb|AAG41481.1|AF326899_1
  misc_feature (407)..(581): Homolog of NCBI NO: 30687142 NR Description: heavy-metal-associated domain-containing protein
  misc_feature (41)..(581): Homolog of NCBI NO: 6729032 NR Description: unknown protein [Arabidopsis thaliana]
  misc_feature (84)..(416): Homolog of NCBI NO: 18397481 NR Description: heavy-metal-associated domain-containing protein thaliana] >gi|6862917|gb|AAF30306.1|AC018907_6 hypothetical [Arabidopsis thaliana] >gi|11908104|gb|AAG41481.1|AF326899_1
  misc_feature (285)..(490): Homolog of NCBI NO: 34394704 NR Description: putative glycine-rich cell wall structural
MKIQTCVLKVNIHCDGCKQKVKKILQKIEGVFTTKIDAELGKVTVSGNVDPSVLIKKLLKSGKHAEIWGAPKGGSNNNQNQPNLANQFKAMQIDHGGKGGGGGGGGPANNNKGQKIGGGGGGGGGGGGGGGGGPPKMVIPQLTPQQMQQLNPQQLQQLQQLQQMKGFQDLKLPPQLKGGPGPGPGSVPMNKNPQMPNNPNQKAVKFNVPDDDDEEDFSDEFDDEFDEDDDEFDDDLEDDEFDDHPPPPNKMKPMMGGGNMIMPNNMMPNMMMPNAQQMLNAHKNGGGPGPAGGKIEGKGMPFPVQMGGGGGGPGGKKGGPGGGGGNMGNQNQGGGGKNGGKGGGGHPLDGKMGGGGGGPNGNKGGGGVQMNGGPNGGKKGGGGGGGGGGGPMSGGLPPGFRPMGGGGGGGGGPQSMSMPMGGAMGGPMGSLPQMGGGPGPMSNNMQAVQGLPAMGPGGGGGGGPSAEAPPGYFQGQVSGNGGGGQDSMPGNPYLQQQQQQQQQQYLAAVMNQQRSMGNERFQPMMYARPPPAVNYMPPQPQPHQQHPYPYPYPYPPQYPPHNGDQYSDYFNDENTSSCNIM

SEQ ID NO: 100995 - protein, 491 aa, Arabidopsis thaliana; identical to SEQ ID NO: 75851
  peptide (1)..(491): Ceres Seq. ID no. 13606626
  misc_feature (120)..(397): Pfam Name: S-antigen protein Pfam Description: S-antigen protein
  misc_feature (19)..(491): Homolog of NCBI NO: 27754558 NR Description: unknown protein [Arabidopsis thaliana]
  misc_feature (1)..(284): Homolog of NCBI NO: 30687142 NR Description: heavy-metal-associated domain-containing protein
  misc_feature (247)..(491): Homolog of NCBI NO: 18397481 NR Description: heavy-metal-associated domain-containing protein thaliana] >gi|6862917|gb|AAF30306.1|AC018907_6 hypothetical [Arabidopsis thaliana] >gi|11908104|gb|AAG41481.1|AF326899_1
  misc_feature (1)..(137): Homolog of NCBI NO: 18397481 NR Description: heavy-metal-associated domain-containing protein thaliana] >gi|6862917|gb|AAF30306.1|AC018907_6 hypothetical [Arabidopsis thaliana] >gi|11908104|gb|AAG41481.1|AF326899_1
  misc_feature (239)..(464): Homolog of NCBI NO: 18397481 NR Description: heavy-metal-associated domain-containing protein thaliana] >gi|6862917|gb|AAF30306.1|AC018907_6 hypothetical [Arabidopsis thaliana] >gi|11908104|gb|AAG41481.1|AF326899_1
  misc_feature (219)..(350): Homolog of NCBI NO: 18397481 NR Description: heavy-metal-associated domain-containing protein thaliana] >gi|6862917|gb|AAF30306.1|AC018907_6 hypothetical [Arabidopsis thaliana] >gi|11908104|gb|AAG41481.1|AF326899_1
  misc_feature (317)..(491): Homolog of NCBI NO: 30687142 NR Description: heavy-metal-associated domain-containing protein
  misc_feature (1)..(491): Homolog of NCBI NO: 6729032 NR Description: unknown protein [Arabidopsis thaliana]
  misc_feature (1)..(326): Homolog of NCBI NO: 18397481 NR Description: heavy-metal-associated domain-containing protein thaliana] >gi|6862917|gb|AAF30306.1|AC018907_6 hypothetical [Arabidopsis thaliana] >gi|11908104|gb|AAG41481.1|AF326899_1
  misc_feature (195)..(400): Homolog of NCBI NO: 34394704 NR Description: putative glycine-rich cell wall structural

SEQ ID NO: 100996 - DNA, 1339 bp, Arabidopsis thaliana
  misc_feature (1)..(1339): Ceres Seq. ID no. 13606634
  misc_feature: MA Experiment ID: 108462 Result: Up-regulated in Transcription
  misc_feature: MA Experiment 108462 PARAMETER Experiment Name: At_Germinating_Seeds_cDNA_P Parameter: Age (day) Value: 2 vs. 0
  misc_feature: MA Experiment 108462 PARAMETER Experiment Name: At_Germinating_Seeds_cDNA_P Parameter: Tissue Value: Germinating Seeds
  misc_feature: MA Experiment ID: 108463 Result: Up-regulated in Transcription
  misc_feature: MA Experiment 108463 PARAMETER Experiment Name: At_Germinating_Seeds_cDNA_P Parameter: Age (day) Value: 3 vs. 0
  misc_feature: MA Experiment 108463 PARAMETER Experiment Name: At_Germinating_Seeds_cDNA_P Parameter: Tissue Value: Germinating Seeds
  misc_feature: MA Experiment ID: 108464 Result: Up-regulated in Transcription
  misc_feature: MA Experiment 108464 PARAMETER Experiment Name: At_Germinating_Seeds_cDNA_P Parameter: Age (day) Value: 4 vs. 0
  misc_feature: MA Experiment 108464 PARAMETER Experiment Name: At_Germinating_Seeds_cDNA_P Parameter: Tissue Value: Germinating Seeds
  misc_feature: MA Experiment ID: 108501 Result: Up-regulated in Transcription
  misc_feature: MA Experiment 108501 PARAMETER Experiment Name: At_ap2_floral_buds_cDNA_P Parameter: Plant Line Value: ap2 (Ler.)
  misc_feature: MA Experiment 108501 PARAMETER Experiment Name: At_ap2_floral_buds_cDNA_P Parameter: Tissue Value: Closed Flower
  misc_feature: MA Experiment ID: 108595 Result: Up-regulated in Transcription
  misc_feature: MA Experiment 108595 PARAMETER Experiment Name: At_Ler-pi_Ovule_cDNA_P Parameter: Plant Line Value: null
  misc_feature: MA Experiment ID: 20000070 Result: Down-regulated in Transcription
  misc_feature: MA Experiment 20000070 PARAMETER Experiment Name: At_100uM_ABA_Mutants_cDNA_P Parameter: Plant Line Value: CS24
  misc_feature: MA Experiment 20000070 PARAMETER Experiment Name: At_100uM_ABA_Mutants_cDNA_P Parameter: Timepoint (hr) Value: 6
  misc_feature: MA Experiment 20000070 PARAMETER Experiment Name: At_100uM_ABA_Mutants_cDNA_P Parameter: Tissue Value: Aerial
  misc_feature: MA Experiment 20000070 PARAMETER Experiment Name: At_100uM_ABA_Mutants_cDNA_P Parameter: Treatment Value: 100uM ABA vs. No Treatment
  misc_feature: MA Experiment ID: 20000071 Result: Down-regulated in Transcription
  misc_feature: MA Experiment 20000071 PARAMETER Experiment Name: At_100uM_ABA_Mutants_cDNA_P Parameter: Plant Line Value: CS8104
  misc_feature: MA Experiment 20000071 PARAMETER Experiment Name: At_100uM_ABA_Mutants_cDNA_P Parameter: Timepoint (hr) Value: 6
  misc_feature: MA Experiment 20000071 PARAMETER Experiment Name: At_100uM_ABA_Mutants_cDNA_P Parameter: Tissue Value: Aerial
  misc_feature: MA Experiment 20000071 PARAMETER Experiment Name: At_100uM_ABA_Mutants_cDNA_P Parameter: Treatment Value: 100uM ABA vs. No Treatment
  misc_feature: MA Experiment ID: 20000086 Result: Down-regulated in Transcription
  misc_feature: MA Experiment 20000086 PARAMETER Experiment Name: At_100uM_ABA_Mutants_cDNA_P Parameter: Plant Line Value: CS22
  misc_feature: MA Experiment 20000086 PARAMETER Experiment Name: At_100uM_ABA_Mutants_cDNA_P Parameter: Timepoint (hr) Value: 6
  misc_feature: MA Experiment 20000086 PARAMETER Experiment Name: At_100uM_ABA_Mutants_cDNA_P Parameter: Tissue Value: Aerial
  misc_feature: MA Experiment 20000086 PARAMETER Experiment Name: At_100uM_ABA_Mutants_cDNA_P Parameter: Treatment Value: 100uM ABA vs. No Treatment
  misc_feature: MA Experiment ID: 20000088 Result: Down-regulated in Transcription
  misc_feature: MA Experiment 20000088 PARAMETER Experiment Name: At_100uM_ABA_Mutants_cDNA_P Parameter: Plant Line Value: Landsberg
  misc_feature: MA Experiment 20000088 PARAMETER Experiment Name: At_100uM_ABA_Mutants_cDNA_P Parameter: Timepoint (hr) Value: 6
  misc_feature: MA Experiment 20000088 PARAMETER Experiment Name: At_100uM_ABA_Mutants_cDNA_P Parameter: Tissue Value: Aerial
  misc_feature: MA Experiment 20000088 PARAMETER Experiment Name: At_100uM_ABA_Mutants_cDNA_P Parameter: Treatment Value: 100uM ABA vs. No Treatment
  misc_feature: MA Experiment ID: 20000089 Result: Down-regulated in Transcription
  misc_feature: MA Experiment ID: 20000090 Result: Down-regulated in Transcription
  misc_feature: MA Experiment ID: 20000117 Result: Down-regulated in Transcription
  misc_feature: MA Experiment 20000117 PARAMETER Experiment Name: At_100uM_ABA_Mutants_cDNA_P Parameter: Plant Line Value: Columbia
  misc_feature: MA Experiment 20000117 PARAMETER Experiment Name: At_100uM_ABA_Mutants_cDNA_P Parameter: Timepoint (hr) Value: 6
  misc_feature: MA Experiment 20000117 PARAMETER Experiment Name: At_100uM_ABA_Mutants_cDNA_P Parameter: Tissue Value: Aerial
  misc_feature: MA Experiment 20000117 PARAMETER Experiment Name: At_100uM_ABA_Mutants_cDNA_P Parameter: Treatment Value: 100uM ABA vs. No Treatment
  misc_feature: MA Experiment ID: 20000184 Result: Up-regulated in Transcription
  misc_feature: MA Experiment 20000184 PARAMETER Experiment Name: At_Shoots__P Parameter: Age (day) Value: 7
  misc_feature: MA Experiment 20000184 PARAMETER Experiment Name: At_Shoots__P Parameter: Tissue Value: Shoots vs. Whole Plant
  misc_feature: MA Experiment ID: 20000185 Result: Up-regulated in Transcription
  misc_feature: MA Experiment 20000185 PARAMETER Experiment Name: At_Roots__P Parameter: Age (day) Value: 7 vs. 21
  misc_feature: MA Experiment 20000185 PARAMETER Experiment Name: At_Roots__P Parameter: Organism Value: A. thaliana
  misc_feature: MA Experiment 20000185 PARAMETER Experiment Name: At_Roots__P Parameter: Tissue Value: Roots vs. Whole Plant
  misc_feature: MA Experiment ID: 20000234 Result: Up-regulated in Transcription
  misc_feature: MA Experiment 20000234 PARAMETER Experiment Name: At_Siliques_P Parameter: Age (day) Value: 21
  misc_feature: MA Experiment 20000234 PARAMETER Experiment Name: At_Siliques_P Parameter: Organism Value: A. thaliana
  misc_feature: MA Experiment 20000234 PARAMETER Experiment Name: At_Siliques_P Parameter: Plant Line Value: WS
  misc_feature: MA Experiment 20000234 PARAMETER Experiment Name: At_Siliques_P Parameter: Tissue Value: Less Than 5mm Siliques vs. Whole Plant
  misc_feature: MA Experiment ID: 20000264 Result: Up-regulated in Transcription
  misc_feature: MA Experiment 20000264 PARAMETER Experiment Name: At_Open_Flower_P Parameter: Age (day) Value: 21
  misc_feature: MA Experiment 20000264 PARAMETER Experiment Name: At_Open_Flower_P Parameter: Plant Line Value: WS
  misc_feature: MA Experiment 20000264 PARAMETER Experiment Name: At_Open_Flower_P Parameter: Tissue Value: Open Flower vs. Whole Plant
  misc_feature: MA Experiment ID: 20000265 Result: Up-regulated in Transcription
  misc_feature: MA Experiment 20000265 PARAMETER Experiment Name: At_Open_Flower_P Parameter: Age (day) Value: 21
  misc_feature: MA Experiment 20000265 PARAMETER Experiment Name: At_Open_Flower_P Parameter: Plant Line Value: WS
  misc_feature: MA Experiment 20000265 PARAMETER Experiment Name: At_Open_Flower_P Parameter: Tissue Value: Closed Flower vs. Whole Plant
  misc_feature: MA Experiment ID: 20000286 Result: Up-regulated in Transcription
  misc_feature: MA Experiment 20000286 PARAMETER Experiment Name: At_Open_Flower_P Parameter: Age (day) Value: 21
  misc_feature: MA Experiment 20000286 PARAMETER Experiment Name: At_Open_Flower_P Parameter: Plant Line Value: WS
  misc_feature: MA Experiment 20000286 PARAMETER Experiment Name: At_Open_Flower_P Parameter: Tissue Value: Half Open vs. Whole Plant
  misc_feature: MA Experiment ID: 20000438 Result: Up-regulated in Transcription
  misc_feature: MA Experiment 20000438 PARAMETER Experiment Name: At_Shoots__P Parameter: Age (day) Value: 14
  misc_feature: MA Experiment 20000438 PARAMETER Experiment Name: At_Shoots__P Parameter: Tissue Value: Shoots vs. Whole Plant
  misc_feature: MA Experiment ID: 20000439 Result: Up-regulated in Transcription
  misc_feature: MA Experiment 20000439 PARAMETER Experiment Name: At_Roots__P Parameter: Age (day) Value: 14 vs. 21
  misc_feature: MA Experiment 20000439 PARAMETER Experiment Name: At_Roots__P Parameter: Organism Value: A. thaliana
  misc_feature: MA Experiment 20000439 PARAMETER Experiment Name: At_Roots__P Parameter: Tissue Value: Roots vs. Whole Plant
  misc_feature: MA Experiment ID: 20000451 Result: Up-regulated in Transcription
  misc_feature: MA Experiment 20000451 PARAMETER Experiment Name: At_CS6879_Shoots-Roots_P Parameter: Age (day) Value: 14
  misc_feature: MA Experiment 20000451 PARAMETER Experiment Name: At_CS6879_Shoots-Roots_P Parameter: Organism Value: A. thaliana
  misc_feature: MA Experiment 20000451 PARAMETER Experiment Name: At_CS6879_Shoots-Roots_P Parameter: Plant Line Value: CS6879 vs. WS
  misc_feature: MA Experiment 20000451 PARAMETER Experiment Name: At_CS6879_Shoots-Roots_P Parameter: Tissue Value: Roots
  misc_feature: MA Experiment ID: 20000495 Result: Up-regulated in Transcription
  misc_feature: MA Experiment 20000495 PARAMETER Experiment Name: At_Guard_Cells_P Parameter: Harvest Date Value: 8/2/2002
  misc_feature: MA Experiment 20000495 PARAMETER Experiment Name: At_Guard_Cells_P Parameter: Organism Value: A. thaliana
  misc_feature: MA Experiment 20000495 PARAMETER Experiment Name: At_Guard_Cells_P Parameter: Tissue Value: Guard Cells vs. Leaves
  misc_feature: MA Experiment ID: 20000794 Result: Up-regulated in Transcription
  misc_feature: MA Experiment 20000794 PARAMETER Experiment Name: At_Petals_P Parameter: Age (day) Value: 23-25 days
  misc_feature: MA Experiment 20000794 PARAMETER Experiment Name: At_Petals_P Parameter: Plant Line Value: WS
  misc_feature: MA Experiment 20000794 PARAMETER Experiment Name: At_Petals_P Parameter: Tissue Value: Petals vs. Whole plant
  misc_feature: MA Experiment ID: 20001247 Result: Down-regulated in Transcription
  misc_feature: MA Experiment 20001247 PARAMETER Experiment Name: At_Far-red-induction_P Parameter: Age (day) Value: 7
  misc_feature: MA Experiment 20001247 PARAMETER Experiment Name: At_Far-red-induction_P Parameter: Light Value: Far-red vs. White
  misc_feature: MA Experiment 20001247 PARAMETER Experiment Name: At_Far-red-induction_P Parameter: Organism Value: A. thaliana
  misc_feature: MA Experiment 20001247 PARAMETER Experiment Name: At_Far-red-induction_P Parameter: Plant Line Value: Columbia
  misc_feature: MA Experiment 20001247 PARAMETER Experiment Name: At_Far-red-induction_P Parameter: Timepoint (hr) Value: 1
  misc_feature: MA Experiment 20001247 PARAMETER Experiment Name: At_Far-red-induction_P Parameter: Tissue Value: Whole Plant
  misc_feature: MA Experiment ID: 20001248 Result: Down-regulated in Transcription
  misc_feature: MA Experiment 20001248 PARAMETER Experiment Name: At_Far-red-induction_P Parameter: Age (day) Value: 7
  misc_feature: MA Experiment 20001248 PARAMETER Experiment Name: At_Far-red-induction_P Parameter: Light Value: Far-red vs. White
  misc_feature: MA Experiment 20001248 PARAMETER Experiment Name: At_Far-red-induction_P Parameter: Organism Value: A. thaliana
  misc_feature: MA Experiment 20001248 PARAMETER Experiment Name: At_Far-red-induction_P Parameter: Plant Line Value: Columbia
  misc_feature: MA Experiment 20001248 PARAMETER Experiment Name: At_Far-red-induction_P Parameter: Timepoint (hr) Value: 4
  misc_feature: MA Experiment 20001248 PARAMETER Experiment Name: At_Far-red-induction_P Parameter: Tissue Value: Whole Plant
  misc_feature: MA Experiment ID: 20001450 Result: Down-regulated in Transcription
  misc_feature: MA Experiment 20001450 PARAMETER Experiment Name: At_Far-red-induction_P Parameter: Age (day) Value: 7
  misc_feature: MA Experiment 20001450 PARAMETER Experiment Name: At_Far-red-induction_P Parameter: Light Value: Far-red vs. White
  misc_feature: MA Experiment 20001450 PARAMETER Experiment Name: At_Far-red-induction_P Parameter: Organism Value: A. thaliana
  misc_feature: MA Experiment 20001450 PARAMETER Experiment Name: At_Far-red-induction_P Parameter: Plant Line Value: Columbia
  misc_feature: MA Experiment 20001450 PARAMETER Experiment Name: At_Far-red-induction_P Parameter: Timepoint (hr) Value: 8
  misc_feature: MA Experiment 20001450 PARAMETER Experiment Name: At_Far-red-induction_P Parameter: Tissue Value: Whole Plant
acatagccatatatttttttggtcgtactttgtatctttggcaaaacacaaaaaacaaaaacaaaaaaactccttatatttttgtatttgatgctaattgtcgtatagatgcccaaactcaattcaacccaagctcccaatttattccttctccttctcgttatccttctttgttcaacgcaaacacaatgccacaccaaaggtctccgattacgaccaagaaaccagaagaatatgaacacgacgagtgatcggacacaaaacccggaagatgagttcatgaaatgggtgagattcgttggaagccttaaacactcagtgttcaaggcagccaagaacaaactcttcccttcttatacattaactgtccacaagaaatccaataaaggtgacttcactaaaatccaagacgccattgattctctccctctcatcaactttgttcgtgtcgtcatcaaagttcatgccggagtttacaaggagaaggtgagcatacccccactgaaggcatttataacaatagaaggagaaggagcagagaagacaacagtggaatggggagacacagcacaaacccctgactcaaaaggcaaccccatgggcacttacaactcggcctcgttcgcggtcaactctcctttctttgtcgctaagaatatcacattcaggaacacgaccccagtccccttgcccggtgcagttggtaaacaggcggtagcattgagggtgtcggcagacaatgccgcgttttttgggtgtagaatgcttggtgctcaagacactctctatgaccatttgggaagacattattacaaagattgttacattgagggatcagtggacttcatctttggaaatgccctttctctttatgaagggtgccacgtgcatgcgatagcggataagctaggagcagtgacggcacaggggaggagcagtgttctagaggacaccggattctcgttcgtaaagtgtaaggtgacagggacaggggttttgtatcttgggagggcatggggtcccttctcaagagtcgtttttgcttacacttacatggacaacatcatcctccctagaggctggtacaattggggagacccttcccgtgagatgacggtgttctatgggcagtacaagtgcacgggagcaggagcaaactatggagggagggtggcttgggcaagagagctcaccgacgaagaagctaagccttttctttctcttacctttatcgacggctctgaatggatcaaactctaaccatatacacctttttttattttctttccacctaattaataatgtacattttccctttaataaaataaaaataattttt

SEQ ID NO: 100997 - protein, 383 aa, Arabidopsis thaliana
  peptide (1)..(383): Ceres Seq. ID no. 13606635
  misc_feature (93)..(378): Pfam Name: Pectinesterase Pfam Description: Pectinesterase
  misc_feature (1)..(383): Homolog of NCBI NO: 15241163 NR Description: pectinesterase family [Arabidopsis thaliana] putative pectin methylesterase [Arabidopsis thaliana]
  misc_feature (29)..(383): Homolog of NCBI NO: 34909402 NR Description: putative pectin methylesterase [Oryza sativa
  misc_feature (91)..(381): Homolog of NCBI NO: 38345478 NR Description: OSJNBa0010H02.16 [Oryza sativa (japonica
  misc_feature (96)..(381): Homolog of NCBI NO: 15238111 NR Description: pectinesterase family [Arabidopsis thaliana] AT5g47500/MNJ7_9 [Arabidopsis thaliana]
  misc_feature (96)..(381): Homolog of NCBI NO: 9758778 NR Description: pectin methylesterase-like [Arabidopsis thaliana]
  misc_feature (94)..(382): Homolog of NCBI NO: 15228023 NR Description: pectinesterase family [Arabidopsis thaliana]
  misc_feature (94)..(382): Homolog of NCBI NO: 27754550 NR Description: putative pectinesterase family protein
  misc_feature (95)..(382): Homolog of NCBI NO: 15220471 NR Description: pectinesterase family [Arabidopsis thaliana]
  misc_feature (90)..(383): Homolog of NCBI NO: 15240544 NR Description: pectinesterase family [Arabidopsis thaliana] contains similarity to pectin methylesterase~gene_id:MDF20.3
  misc_feature (95)..(382): Homolog of NCBI NO: 25325338 NR Description: hypothetical protein [imported] - Arabidopsis >gi|2388565|gb|AAB71446.1| Similar to Prunus pectinesterase
MPKLNSTQAPNLFLLLLVILLCSTQTQCHTKGLRLRPRNQKNMNTTSDRTQNPEDEFMKWVRFVGSLKHSVFKAAKNKLFPSYTLTVHKKSNKGDFTKIQDAIDSLPLINFVRVVIKVHAGVYKEKVSIPPLKAFITIEGEGAEKTTVEWGDTAQTPDSKGNPMGTYNSASFAVNSPFFVAKNITFRNTTPVPLPGAVGKQAVALRVSADNAAFFGCRMLGAQDTLYDHLGRHYYKDCYIEGSVDFIFGNALSLYEGCHVHAIADKLGAVTAQGRSSVLEDTGFSFVKCKVTGTGVLYLGRAWGPFSRVVFAYTYMDNIILPRGWYNWGDPSREMTVFYGQYKCTGAGANYGGRVAWARELTDEEAKPFLSLTFIDGSEWIKL

SEQ ID NO: 100998 - protein, 341 aa, Arabidopsis thaliana
  peptide (1)..(341): Ceres Seq. ID no. 13606636
  misc_feature (51)..(336): Pfam Name: Pectinesterase Pfam Description: Pectinesterase
  misc_feature (1)..(341): Homolog of NCBI NO: 15241163 NR Description: pectinesterase family [Arabidopsis thaliana] putative pectin methylesterase [Arabidopsis thaliana]
  misc_feature (1)..(341): Homolog of NCBI NO: 34909402 NR Description: putative pectin methylesterase [Oryza sativa
  misc_feature (49)..(339): Homolog of NCBI NO: 38345478 NR Description: OSJNBa0010H02.16 [Oryza sativa (japonica
  misc_feature (54)..(339): Homolog of NCBI NO: 15238111 NR Description: pectinesterase family [Arabidopsis thaliana] AT5g47500/MNJ7_9 [Arabidopsis thaliana]
  misc_feature (54)..(339): Homolog of NCBI NO: 9758778 NR Description: pectin methylesterase-like [Arabidopsis thaliana]
  misc_feature (52)..(340): Homolog of NCBI NO: 15228023 NR Description: pectinesterase family [Arabidopsis thaliana]
  misc_feature (52)..(340): Homolog of NCBI NO: 27754550 NR Description: putative pectinesterase family protein
  misc_feature (53)..(340): Homolog of NCBI NO: 15220471 NR Description: pectinesterase family [Arabidopsis thaliana]
  misc_feature (48)..(341): Homolog of NCBI NO: 15240544 NR Description: pectinesterase family [Arabidopsis thaliana] contains similarity to pectin methylesterase~gene_id:MDF20.3
  misc_feature (53)..(340): Homolog of NCBI NO: 25325338 NR Description: hypothetical protein [imported] - Arabidopsis >gi|2388565|gb|AAB71446.1| Similar to Prunus pectinesterase
MNTTSDRTQNPEDEFMKWVRFVGSLKHSVFKAAKNKLFPSYTLTVHKKSNKGDFTKIQDAIDSLPLINFVRVVIKVHAGVYKEKVSIPPLKAFITIEGEGAEKTTVEWGDTAQTPDSKGNPMGTYNSASFAVNSPFFVAKNITFRNTTPVPLPGAVGKQAVALRVSADNAAFFGCRMLGAQDTLYDHLGRHYYKDCYIEGSVDFIFGNALSLYEGCHVHAIADKLGAVTAQGRSSVLEDTGFSFVKCKVTGTGVLYLGRAWGPFSRVVFAYTYMDNIILPRGWYNWGDPSREMTVFYGQYKCTGAGANYGGRVAWARELTDEEAKPFLSLTFIDGSEWIKL

SEQ ID NO: 100999 - protein, 326 aa, Arabidopsis thaliana
  peptide (1)..(326): Ceres Seq. ID no. 13606637
  misc_feature (36)..(321): Pfam Name: Pectinesterase Pfam Description: Pectinesterase
  misc_feature (1)..(326): Homolog of NCBI NO: 15241163 NR Description: pectinesterase family [Arabidopsis thaliana] putative pectin methylesterase [Arabidopsis thaliana]
  misc_feature (1)..(326): Homolog of NCBI NO: 34909402 NR Description: putative pectin methylesterase [Oryza sativa
  misc_feature (34)..(324): Homolog of NCBI NO: 38345478 NR Description: OSJNBa0010H02.16 [Oryza sativa (japonica
  misc_feature (39)..(324): Homolog of NCBI NO: 15238111 NR Description: pectinesterase family [Arabidopsis thaliana] AT5g47500/MNJ7_9 [Arabidopsis thaliana]
  misc_feature (39)..(324): Homolog of NCBI NO: 9758778 NR Description: pectin methylesterase-like [Arabidopsis thaliana]
  misc_feature (37)..(325): Homolog of NCBI NO: 15228023 NR Description: pectinesterase family [Arabidopsis thaliana]
  misc_feature (37)..(325): Homolog of NCBI NO: 27754550 NR Description: putative pectinesterase family protein
  misc_feature (38)..(325): Homolog of NCBI NO: 15220471 NR Description: pectinesterase family [Arabidopsis thaliana]
  misc_feature (33)..(326): Homolog of NCBI NO: 15240544 NR Description: pectinesterase family [Arabidopsis thaliana] contains similarity to pectin methylesterase~gene_id:MDF20.3
  misc_feature (38)..(325): Homolog of NCBI NO: 25325338 NR Description: hypothetical protein [imported] - Arabidopsis >gi|2388565|gb|AAB71446.1| Similar to Prunus pectinesterase
MKWVRFVGSLKHSVFKAAKNKLFPSYTLTVHKKSNKGDFTKIQDAIDSLPLINFVRVVIKVHAGVYKEKVSIPPLKAFITIEGEGAEKTTVEWGDTAQTPDSKGNPMGTYNSASFAVNSPFFVAKNITFRNTTPVPLPGAVGKQAVALRVSADNAAFFGCRMLGAQDTLYDHLGRHYYKDCYIEGSVDFIFGNALSLYEGCHVHAIADKLGAVTAQGRSSVLEDTGFSFVKCKVTGTGVLYLGRAWGPFSRVVFAYTYMDNIILPRGWYNWGDPSREMTVFYGQYKCTGAGANYGGRVAWARELTDEEAKPFLSLTFIDGSEWIKL

SEQ ID NO: 101000 - DNA, 1333 bp, Arabidopsis thaliana
  misc_feature (1)..(1333): Ceres Seq. ID no. 13606642
  misc_feature: MA Experiment ID: 108434 Result: Up-regulated in Transcription
  misc_feature: MA Experiment 108434 PARAMETER Experiment Name: At_Root_Tips_cDNA_P Parameter: Tissue Value: Root Tips
  misc_feature: MA Experiment ID: 108461 Result: Up-regulated in Transcription
  misc_feature: MA Experiment 108461 PARAMETER Experiment Name: At_Germinating_Seeds_cDNA_P Parameter: Age (day) Value: 1 vs. 0
  misc_feature: MA Experiment 108461 PARAMETER Experiment Name: At_Germinating_Seeds_cDNA_P Parameter: Tissue Value: Germinating Seeds
  misc_feature: MA Experiment ID: 20000171 Result: Up-regulated in Transcription
  misc_feature: MA Experiment 20000171 PARAMETER Experiment Name: At_42deg_Heat_P Parameter: Age (day) Value: 14
  misc_feature: MA Experiment 20000171 PARAMETER Experiment Name: At_42deg_Heat_P Parameter: Organism Value: A. thaliana
  misc_feature: MA Experiment 20000171 PARAMETER Experiment Name: At_42deg_Heat_P Parameter: Plant Line Value: WS
  misc_feature: MA Experiment 20000171 PARAMETER Experiment Name: At_42deg_Heat_P Parameter: Temperature (deg C) Value: 42 vs. 22
  misc_feature: MA Experiment 20000171 PARAMETER Experiment Name: At_42deg_Heat_P Parameter: Timepoint (hr) Value: 1
  misc_feature: MA Experiment 20000171 PARAMETER Experiment Name: At_42deg_Heat_P Parameter: Tissue Value: Aerial
  misc_feature: MA Experiment ID: 20000180 Result: Up-regulated in Transcription
  misc_feature: MA Experiment 20000180 PARAMETER Experiment Name: At_Germinating_Seeds_P Parameter: Age (hr) Value: 24 vs. 0
  misc_feature: MA Experiment 20000180 PARAMETER Experiment Name: At_Germinating_Seeds_P Parameter: Tissue Value: Germinating Seeds
  misc_feature: MA Experiment ID: 20000185 Result: Up-regulated in Transcription
  misc_feature: MA Experiment 20000185 PARAMETER Experiment Name: At_Roots__P Parameter: Age (day) Value: 7 vs. 21
  misc_feature: MA Experiment 20000185 PARAMETER Experiment Name: At_Roots__P Parameter: Organism Value: A. thaliana
  misc_feature: MA Experiment 20000185 PARAMETER Experiment Name: At_Roots__P Parameter: Tissue Value: Roots vs. Whole Plant
  misc_feature: MA Experiment ID: 20000227 Result: Up-regulated in Transcription
  misc_feature: MA Experiment 20000227 PARAMETER Experiment Name: At_Root-Tips-vs-Tops_P Parameter: Tissue Value: Root Tips vs. Root Tops
  misc_feature: MA Experiment ID: 20000234 Result: Up-regulated in Transcription
  misc_feature: MA Experiment 20000234 PARAMETER Experiment Name: At_Siliques_P Parameter: Age (day) Value: 21
  misc_feature: MA Experiment 20000234 PARAMETER Experiment Name: At_Siliques_P Parameter: Organism Value: A. thaliana
  misc_feature: MA Experiment 20000234 PARAMETER Experiment Name: At_Siliques_P Parameter: Plant Line Value: WS
  misc_feature: MA Experiment 20000234 PARAMETER Experiment Name: At_Siliques_P Parameter: Tissue Value: Less Than 5mm Siliques vs. Whole Plant
  misc_feature: MA Experiment ID: 20000286 Result: Up-regulated in Transcription
  misc_feature: MA Experiment 20000286 PARAMETER Experiment Name: At_Open_Flower_P Parameter: Age (day) Value: 21
  misc_feature: MA Experiment 20000286 PARAMETER Experiment Name: At_Open_Flower_P Parameter: Plant Line Value: WS
  misc_feature: MA Experiment 20000286 PARAMETER Experiment Name: At_Open_Flower_P Parameter: Tissue Value: Half Open vs. Whole Plant
  misc_feature: MA Experiment ID: 20000439 Result: Up-regulated in Transcription
  misc_feature: MA Experiment 20000439 PARAMETER Experiment Name: At_Roots__P Parameter: Age (day) Value: 14 vs. 21
  misc_feature: MA Experiment 20000439 PARAMETER Experiment Name: At_Roots__P Parameter: Organism Value: A. thaliana
  misc_feature: MA Experiment 20000439 PARAMETER Experiment Name: At_Roots__P Parameter: Tissue Value: Roots vs. Whole Plant
acagttctactatatggatgatggccctggcttcttcaaaccatctgtgtgtttagtcttctcatttgtgcacaactcaaagacaagtccactaagtttgaagcaaaatggcgatatggtttcagagaattttcctgttgcttctcgtttcctgttgcgcctcttcagattttttggaaaatccagacttcgaatctccaccgttaaacttacctacaaactcaaatgctagctctgtatcgctggatcagaacagtacactcccgggatggacattccaagggacagtgctttatgttgaactgcctgataccggacacgcggttcagctcggtgaagatggcaagatcaatcaaacattcattgccaaaggtgatgaattgaactacatcctcacattcgcactgatccacgcaggccagaactgtacaagctctgctggtctcagtgtctcggggccagacagcaatgcggtcttttcttacagacaaaactacagtaaggtttcatggcagagctacagtcataacttgggtagttgggggaatggtgagcctattaacttagttcttgaaagtcaggcaatagattctgattctgatacaaactccacatgttggcctatcattgacacattgcttatcaagactgttggtgtaacattggtccaagacagtggtaacctcttaatcaatggtggatttgagtctggacctggtttcttgcccaactcaaccgatggagttctgattgacgcggttccaagcctgattcaatcaccattaaggcagtggtctgtcataggaacagtcagatacatagactcggagcacttccatgtcccagaaggcaaagctgcaatagaaattctgtctaacacagctccatctggcatacagacagcaacaaaaggcacaagtgaaggttcaagatacaacctcacatttaccttaggcgatgctaacgatgcgtgcagaggacatttcgtggtgggtgctcaagctggctccgtaactcaaaacttcacattggagagtaatgggactggctctggtgagaagtttgggttagtgtttgaagcagacaaagatgcagcacagataagtttcaccagctactcagttacaatgacaaaagagaatgttgtttgtggtcctgtgattgatgaagtgatggtacatcctcttggtggaacagcctcagtaaaacccacttggctgctacttattttcgctttgttgtatgttgcagttctctgattgaaactgtttgggagagaggtcataaagaagatatttttgcaaggagatgtgataatcattctagcttcatg

SEQ ID NO: 101001 - protein, 383 aa, Arabidopsis thaliana
  peptide (1)..(383): Ceres Seq. ID no. 13606643
  misc_feature (41)..(361): Pfam Name: Protein of unknown function, DUF642 Pfam Description: Protein of unknown function, DUF642
  misc_feature (1)..(383): Homolog of NCBI NO: 15241320 NR Description: expressed protein [Arabidopsis thaliana] emb|CAB87702.1~gene_id:MUA22.15~similar to unknown protein
  misc_feature (13)..(383): Homolog of NCBI NO: 34909656 NR Description: OJ1414_E05.5 [Oryza sativa (japonica
  misc_feature (8)..(355): Homolog of NCBI NO: 21554402 NR Description: unknown [Arabidopsis thaliana]
  misc_feature (8)..(355): Homolog of NCBI NO: 23397043 NR Description: unknown protein [Arabidopsis thaliana]
  misc_feature (8)..(355): Homolog of NCBI NO: 15239049 NR Description: expressed protein [Arabidopsis thaliana]
  misc_feature (15)..(358): Homolog of NCBI NO: 38345426 NR Description: OSJNBb0091E11.17 [Oryza sativa (japonica
  misc_feature (25)..(380): Homolog of NCBI NO: 15226760 NR Description: expressed protein [Arabidopsis thaliana]
  misc_feature (8)..(355): Homolog of NCBI NO: 18418018 NR Description: expressed protein [Arabidopsis thaliana]
  misc_feature (10)..(355): Homolog of NCBI NO: 7488898 NR Description: hypothetical protein - castor bean
  misc_feature (10)..(354): Homolog of NCBI NO: 34912572 NR Description: P0410E03.24 [Oryza sativa (japonica
MAIWFQRIFLLLLVSCCASSDFLENPDFESPPLNLPTNSNASSVSLDQNSTLPGWTFQGTVLYVELPDTGHAVQLGEDGKINQTFIAKGDELNYILTFALIHAGQNCTSSAGLSVSGPDSNAVFSYRQNYSKVSWQSYSHNLGSWGNGEPINLVLESQAIDSDSDTNSTCWPIIDTLLIKTVGVTLVQDSGNLLINGGFESGPGFLPNSTDGVLIDAVPSLIQSPLRQWSVIGTVRYIDSEHFHVPEGKAAIEILSNTAPSGIQTATKGTSEGSRYNLTFTLGDANDACRGHFVVGAQAGSVTQNFTLESNGTGSGEKFGLVFEADKDAAQISFTSYSVTMTKENVVCGPVIDEVMVHPLGGTASVKPTWLLLIFALLYVAVL

SEQ ID NO: 101002 - DNA, 1156 bp, Arabidopsis thaliana
  misc_feature (1)..(1156): Ceres Seq. ID no. 13606660
  misc_feature: MA Experiment ID: 20000173 Result: Down-regulated in Transcription
  misc_feature: MA Experiment 20000173 PARAMETER Experiment Name: At_42deg_Heat_P Parameter: Age (day) Value: 14
  misc_feature: MA Experiment 20000173 PARAMETER Experiment Name: At_42deg_Heat_P Parameter: Organism Value: A. thaliana
  misc_feature: MA Experiment 20000173 PARAMETER Experiment Name: At_42deg_Heat_P Parameter: Plant Line Value: WS
  misc_feature: MA Experiment 20000173 PARAMETER Experiment Name: At_42deg_Heat_P Parameter: Temperature (deg C) Value: 42 vs. 22
  misc_feature: MA Experiment 20000173 PARAMETER Experiment Name: At_42deg_Heat_P Parameter: Timepoint (hr) Value: 6
  misc_feature: MA Experiment 20000173 PARAMETER Experiment Name: At_42deg_Heat_P Parameter: Tissue Value: Aerial
  misc_feature: MA Experiment ID: 20000182 Result: Up-regulated in Transcription
  misc_feature: MA Experiment 20000182 PARAMETER Experiment Name: At_2mM_SA_P Parameter: Age (day) Value: 14
  misc_feature: MA Experiment 20000182 PARAMETER Experiment Name: At_2mM_SA_P Parameter: Organism Value: A. thaliana
  misc_feature: MA Experiment 20000182 PARAMETER Experiment Name: At_2mM_SA_P Parameter: Plant Line Value: WS
  misc_feature: MA Experiment 20000182 PARAMETER Experiment Name: At_2mM_SA_P Parameter: Timepoint (hr) Value: 6
  misc_feature: MA Experiment 20000182 PARAMETER Experiment Name: At_2mM_SA_P Parameter: Tissue Value: Aerial
  misc_feature: MA Experiment 20000182 PARAMETER Experiment Name: At_2mM_SA_P Parameter: Treatment Value: 2mM SA vs. No Treatment
  misc_feature: MA Experiment ID: 20000185 Result: Up-regulated in Transcription
  misc_feature: MA Experiment 20000185 PARAMETER Experiment Name: At_Roots__P Parameter: Age (day) Value: 7 vs. 21
  misc_feature: MA Experiment 20000185 PARAMETER Experiment Name: At_Roots__P Parameter: Organism Value: A. thaliana
  misc_feature: MA Experiment 20000185 PARAMETER Experiment Name: At_Roots__P Parameter: Tissue Value: Roots vs. Whole Plant
  misc_feature: MA Experiment ID: 20000234 Result: Up-regulated in Transcription
  misc_feature: MA Experiment 20000234 PARAMETER Experiment Name: At_Siliques_P Parameter: Age (day) Value: 21
  misc_feature: MA Experiment 20000234 PARAMETER Experiment Name: At_Siliques_P Parameter: Organism Value: A. thaliana
  misc_feature: MA Experiment 20000234 PARAMETER Experiment Name: At_Siliques_P Parameter: Plant Line Value: WS
  misc_feature: MA Experiment 20000234 PARAMETER Experiment Name: At_Siliques_P Parameter: Tissue Value: Less Than 5mm Siliques vs. Whole Plant
  misc_feature: MA Experiment ID: 20000437 Result: Down-regulated in Transcription
  misc_feature: MA Experiment 20000437 PARAMETER Experiment Name: At_Drought_P Parameter: Age (day) Value: 8
  misc_feature: MA Experiment 20000437 PARAMETER Experiment Name: At_Drought_P Parameter: Organism Value: A. thaliana
  misc_feature: MA Experiment 20000437 PARAMETER Experiment Name: At_Drought_P Parameter: Plant Line Value: WS
  misc_feature: MA Experiment 20000437 PARAMETER Experiment Name: At_Drought_P Parameter: Timepoint (hr) Value: 24
  misc_feature: MA Experiment 20000437 PARAMETER Experiment Name: At_Drought_P Parameter: Tissue Value: Whole Plant
  misc_feature: MA Experiment 20000437 PARAMETER Experiment Name: At_Drought_P Parameter: Treatment Value: Drought vs. No Drought
  misc_feature: MA Experiment ID: 20000439 Result: Up-regulated in Transcription
  misc_feature: MA Experiment 20000439 PARAMETER Experiment Name: At_Roots__P Parameter: Age (day) Value: 14 vs. 21
  misc_feature: MA Experiment 20000439 PARAMETER Experiment Name: At_Roots__P Parameter: Organism Value: A. thaliana
  misc_feature: MA Experiment 20000439 PARAMETER Experiment Name: At_Roots__P Parameter: Tissue Value: Roots vs. Whole Plant
  misc_feature: MA Experiment ID: 20000443 Result: Down-regulated in Transcription
  misc_feature: MA Experiment 20000443 PARAMETER Experiment Name: At_1uM_BR-BRZ__P Parameter: Tissue Value: Shoot Apices
  misc_feature: MA Experiment 20000443 PARAMETER Experiment Name: At_1uM_BR-BRZ__P Parameter: Treatment Value: 1uM BRZ vs. No Treatment
  misc_feature: MA Experiment ID: 20000495 Result: Down-regulated in Transcription
  misc_feature: MA Experiment 20000495 PARAMETER Experiment Name: At_Guard_Cells_P Parameter: Harvest Date Value: 8/2/2002
  misc_feature: MA Experiment 20000495 PARAMETER Experiment Name: At_Guard_Cells_P Parameter: Organism Value: A. thaliana
  misc_feature: MA Experiment 20000495 PARAMETER Experiment Name: At_Guard_Cells_P Parameter: Tissue Value: Guard Cells vs. Leaves
  misc_feature: MA Experiment ID: 20000573 Result: Down-regulated in Transcription
  misc_feature: MA Experiment 20000573 PARAMETER Experiment Name: At_100uM_ABA_Mutants__P Parameter: Organism Value: A. thaliana
  misc_feature: MA Experiment 20000573 PARAMETER Experiment Name: At_100uM_ABA_Mutants__P Parameter: Plant Line Value: CS22 vs. Ler wt
  misc_feature: MA Experiment 20000573 PARAMETER Experiment Name: At_100uM_ABA_Mutants__P Parameter: Timepoint (hr) Value: N/A
  misc_feature: MA Experiment 20000573 PARAMETER Experiment Name: At_100uM_ABA_Mutants__P Parameter: Tissue Value: Whole Plant
  misc_feature: MA Experiment 20000573 PARAMETER Experiment Name: At_100uM_ABA_Mutants__P Parameter: Treatment Value: None
  misc_feature: MA Experiment ID: 20001248 Result: Down-regulated in Transcription
  misc_feature: MA Experiment 20001248 PARAMETER Experiment Name: At_Far-red-induction_P Parameter: Age (day) Value: 7
  misc_feature: MA Experiment 20001248 PARAMETER Experiment Name: At_Far-red-induction_P Parameter: Light Value: Far-red vs. White
  misc_feature: MA Experiment 20001248 PARAMETER Experiment Name: At_Far-red-induction_P Parameter: Organism Value: A. thaliana
  misc_feature: MA Experiment 20001248 PARAMETER Experiment Name: At_Far-red-induction_P Parameter: Plant Line Value: Columbia
  misc_feature: MA Experiment 20001248 PARAMETER Experiment Name: At_Far-red-induction_P Parameter: Timepoint (hr) Value: 4
  misc_feature: MA Experiment 20001248 PARAMETER Experiment Name: At_Far-red-induction_P Parameter: Tissue Value: Whole Plant
  misc_feature: MA Experiment ID: 20001450 Result: Down-regulated in Transcription
  misc_feature: MA Experiment 20001450 PARAMETER Experiment Name: At_Far-red-induction_P Parameter: Age (day) Value: 7
  misc_feature: MA Experiment 20001450 PARAMETER Experiment Name: At_Far-red-induction_P Parameter: Light Value: Far-red vs. White
  misc_feature: MA Experiment 20001450 PARAMETER Experiment Name: At_Far-red-induction_P Parameter: Organism Value: A. thaliana
  misc_feature: MA Experiment 20001450 PARAMETER Experiment Name: At_Far-red-induction_P Parameter: Plant Line Value: Columbia
  misc_feature: MA Experiment 20001450 PARAMETER Experiment Name: At_Far-red-induction_P Parameter: Timepoint (hr) Value: 8
  misc_feature: MA Experiment 20001450 PARAMETER Experiment Name: At_Far-red-induction_P Parameter: Tissue Value: Whole Plant
  misc_feature: MA Experiment ID: 20001451 Result: Down-regulated in Transcription
  misc_feature: MA Experiment 20001451 PARAMETER Experiment Name: At_Far-red-induction_P Parameter: Age (day) Value: 7
  misc_feature: MA Experiment 20001451 PARAMETER Experiment Name: At_Far-red-induction_P Parameter: Light Value: Far-red vs. White
  misc_feature: MA Experiment 20001451 PARAMETER Experiment Name: At_Far-red-induction_P Parameter: Organism Value: A. thaliana
  misc_feature: MA Experiment 20001451 PARAMETER Experiment Name: At_Far-red-induction_P Parameter: Plant Line Value: Columbia
  misc_feature: MA Experiment 20001451 PARAMETER Experiment Name: At_Far-red-induction_P Parameter: Timepoint (hr) Value: 24
  misc_feature: MA Experiment 20001451 PARAMETER Experiment Name: At_Far-red-induction_P Parameter: Tissue Value: Whole Plant
  misc_feature: MA Experiment ID: 20001911 Result: Down-regulated in Transcription
  misc_feature: MA Experiment 20001911 PARAMETER Experiment Name: At_Drought_Reproduction_P Parameter: Age (day) Value: 40
  misc_feature: MA Experiment 20001911 PARAMETER Experiment Name: At_Drought_Reproduction_P Parameter: Organism Value: A. thaliana
  misc_feature: MA Experiment 20001911 PARAMETER Experiment Name: At_Drought_Reproduction_P Parameter: Plant Line Value: WS
  misc_feature: MA Experiment 20001911 PARAMETER Experiment Name: At_Drought_Reproduction_P Parameter: Timepoint (day) Value: 10
  misc_feature: MA Experiment 20001911 PARAMETER Experiment Name: At_Drought_Reproduction_P Parameter: Tissue Value: Flowers
  misc_feature: MA Experiment 20001911 PARAMETER Experiment Name: At_Drought_Reproduction_P Parameter: Treatment Value: Drought vs. No Drought
aacgtagtctcaaaggtcacagcagcagcagcaacaatcagagcaacaatggagtctgctaaatcaaaaaatcccgatagctaccaaaatatcttgatgatgcgtcacggtgatcgcattgacaaaatcgatccactctggcttgatacagctgcgagaccttgggatcctcctctcgttcaagacggtatggttcgtgcgtttcaaactggtcaacggattcgatctcagatccaatttccgattcaccgtgtcttcgtctctccttttatccgatgtatacagactgcttccgaagtcatcgctgctctctccgccgtcgatttcgatcctaacgctacttcgtccaaagacgtcacttcaatcgataaatataagcttaaggtttccattgaatttggtttgagtgagatgctgaattcaattgctattaagcctgagattgctcccaaagatgggaaattcgatttcatgatttcagaacttgaagcgatttttcctgatggaatggttgatcatagtgtagatcctgtttataaagagatgccacaatgggaagagactgtggaaggctgcacagatagatttcttagtttgataaagactcttgctgataagtatccttcagagaacttgctcttggtcactcacggggaaggagtaaggactacatttgcaacctttaaaggcgtacatgtgtacgacgtagagtattgtggttgtgctgaattgagaagacaggtgtcgagtaaagatgggtctactaaagctggagactttgaggtgatcacaagtcttagtcaatgtggaatcaagtaccattccttgagcaccacagaccaaacttctgcttaagtcaatgatgttccggatgatcatggcactagtaaaccggaatcaaaccggatactggttatctagaaacaattctgtagaagatgagaaccttgccggaatactacaatagtaatgtgttgcttccgacagattggagatacggtttcgaagagagaacttctttttaagtgttgtaccggcggttgaaaatgattttgttgtttattattgattctaaacgtaattttgggcagatactattgattaaactgattttgcgtttttatttttacaatgtcatgtgttttgatgtcttctt

SEQ ID NO: 101003 - protein, 284 aa, Arabidopsis thaliana
  peptide (1)..(284): Ceres Seq. ID no. 13606661
  misc_feature (29)..(104): Pfam Name: Phosphoglycerate mutase family Pfam Description: Phosphoglycerate mutase family
  misc_feature (17)..(284): Homolog of NCBI NO: 15232328 NR Description: expressed protein [Arabidopsis thaliana]
  misc_feature (17)..(273): Homolog of NCBI NO: 15232331 NR Description: expressed protein [Arabidopsis thaliana]
  misc_feature (17)..(273): Homolog of NCBI NO: 21553703 NR Description: pRIB5 protein [Arabidopsis thaliana]
  misc_feature (18)..(273): Homolog of NCBI NO: 15232326 NR Description: hypothetical protein [Arabidopsis thaliana]
  misc_feature (17)..(280): Homolog of NCBI NO: 15232324 NR Description: expressed protein [Arabidopsis thaliana]
  misc_feature (34)..(280): Homolog of NCBI NO: 21592687 NR Description: unknown [Arabidopsis thaliana]
  misc_feature (55)..(273): Homolog of NCBI NO: 25347741 NR Description: pRIB5 protein [imported] - Ribes nigrum
  misc_feature (29)..(110): Homolog of NCBI NO: 23042637 NR Description: hypothetical protein [Trichodesmium erythraeum
  misc_feature (29)..(104): Homolog of NCBI NO: 17230464 NR Description: hypothetical protein [Nostoc sp. PCC 7120]
  misc_feature (29)..(105): Homolog of NCBI NO: 23128704 NR Description: hypothetical protein [Nostoc punctiforme]
NVVSKVTAAAATIRATMESAKSKNPDSYQNILMMRHGDRIDKIDPLWLDTAARPWDPPLVQDGMVRAFQTGQRIRSQIQFPIHRVFVSPFIRCIQTASEVIAALSAVDFDPNATSSKDVTSIDKYKLKVSIEFGLSEMLNSIAIKPEIAPKDGKFDFMISELEAIFPDGMVDHSVDPVYKEMPQWEETVEGCTDRFLSLIKTLADKYPSENLLLVTHGEGVRTTFATFKGVHVYDVEYCGCAELRRQVSSKDGSTKAGDFEVITSLSQCGIKYHSLSTTDQTSA

SEQ ID NO: 101004 - protein, 268 aa, Arabidopsis thaliana
  peptide (1)..(268): Ceres Seq. ID no. 13606662
  misc_feature (13)..(88): Pfam Name: Phosphoglycerate mutase family Pfam Description: Phosphoglycerate mutase family
  misc_feature (1)..(268): Homolog of NCBI NO: 15232328 NR Description: expressed protein [Arabidopsis thaliana]
  misc_feature (1)..(257): Homolog of NCBI NO: 15232331 NR Description: expressed protein [Arabidopsis thaliana]
  misc_feature (1)..(257): Homolog of NCBI NO: 21553703 NR Description: pRIB5 protein [Arabidopsis thaliana]
  misc_feature (2)..(257): Homolog of NCBI NO: 15232326 NR Description: hypothetical protein [Arabidopsis thaliana]
  misc_feature (1)..(264): Homolog of NCBI NO: 15232324 NR Description: expressed protein [Arabidopsis thaliana]
  misc_feature (18)..(264): Homolog of NCBI NO: 21592687 NR Description: unknown [Arabidopsis thaliana]
  misc_feature (39)..(257): Homolog of NCBI NO: 25347741 NR Description: pRIB5 protein [imported] - Ribes nigrum
  misc_feature (13)..(94): Homolog of NCBI NO: 23042637 NR Description: hypothetical protein [Trichodesmium erythraeum
  misc_feature (13)..(88): Homolog of NCBI NO: 17230464 NR Description: hypothetical protein [Nostoc sp. PCC 7120]
  misc_feature (13)..(89): Homolog of NCBI NO: 23128704 NR Description: hypothetical protein [Nostoc punctiforme]
MESAKSKNPDSYQNILMMRHGDRIDKIDPLWLDTAARPWDPPLVQDGMVRAFQTGQRIRSQIQFPIHRVFVSPFIRCIQTASEVIAALSAVDFDPNATSSKDVTSIDKYKLKVSIEFGLSEMLNSIAIKPEIAPKDGKFDFMISELEAIFPDGMVDHSVDPVYKEMPQWEETVEGCTDRFLSLIKTLADKYPSENLLLVTHGEGVRTTFATFKGVHVYDVEYCGCAELRRQVSSKDGSTKAGDFEVITSLSQCGIKYHSLSTTDQTSA

SEQ ID NO: 101005 - protein, 252 aa, Arabidopsis thaliana
  peptide (1)..(252): Ceres Seq. ID no. 13606663
  misc_feature (1)..(72): Pfam Name: Phosphoglycerate mutase family Pfam Description: Phosphoglycerate mutase family
  misc_feature (1)..(252): Homolog of NCBI NO: 15232328 NR Description: expressed protein [Arabidopsis thaliana]
  misc_feature (1)..(241): Homolog of NCBI NO: 15232331 NR Description: expressed protein [Arabidopsis thaliana]
  misc_feature (1)..(241): Homolog of NCBI NO: 21553703 NR Description: pRIB5 protein [Arabidopsis thaliana]
  misc_feature (1)..(241): Homolog of NCBI NO: 15232326 NR Description: hypothetical protein [Arabidopsis thaliana]
  misc_feature (1)..(248): Homolog of NCBI NO: 15232324 NR Description: expressed protein [Arabidopsis thaliana]
  misc_feature (2)..(248): Homolog of NCBI NO: 21592687 NR Description: unknown [Arabidopsis thaliana]
  misc_feature (23)..(241): Homolog of NCBI NO: 25347741 NR Description: pRIB5 protein [imported] - Ribes nigrum
  misc_feature (1)..(78): Homolog of NCBI NO: 23042637 NR Description: hypothetical protein [Trichodesmium erythraeum
  misc_feature (1)..(72): Homolog of NCBI NO: 17230464 NR Description: hypothetical protein [Nostoc sp. PCC 7120]
  misc_feature (1)..(73): Homolog of NCBI NO: 23128704 NR Description: hypothetical protein [Nostoc punctiforme]
MMRHGDRIDKIDPLWLDTAARPWDPPLVQDGMVRAFQTGQRIRSQIQFPIHRVFVSPFIRCIQTASEVIAALSAVDFDPNATSSKDVTSIDKYKLKVSIEFGLSEMLNSIAIKPEIAPKDGKFDFMISELEAIFPDGMVDHSVDPVYKEMPQWEETVEGCTDRFLSLIKTLADKYPSENLLLVTHGEGVRTTFATFKGVHVYDVEYCGCAELRRQVSSKDGSTKAGDFEVITSLSQCGIKYHSLSTTDQTSA

SEQ ID NO: 101006 - DNA, 857 bp, Arabidopsis thaliana
  misc_feature (1)..(857): Ceres Seq. ID no. 13606675
  misc_feature: MA Experiment ID: 108579 Result: Down-regulated in Transcription
  misc_feature: MA Experiment 108579 PARAMETER Experiment Name: At_4deg_Cold_cDNA_P Parameter: Temperature (deg C) Value: 4 vs. 22
  misc_feature: MA Experiment 108579 PARAMETER Experiment Name: At_4deg_Cold_cDNA_P Parameter: Timepoint (hr) Value: 6
  misc_feature: MA Experiment 108579 PARAMETER Experiment Name: At_4deg_Cold_cDNA_P Parameter: Tissue Value: Aerial
  misc_feature: MA Experiment ID: 20000113 Result: Up-regulated in Transcription
  misc_feature: MA Experiment 20000113 PARAMETER Experiment Name: At_42deg_Heat_cDNA_P Parameter: Temperature (deg C) Value: 42 vs. 22
  misc_feature: MA Experiment 20000113 PARAMETER Experiment Name: At_42deg_Heat_cDNA_P Parameter: Timepoint (hr) Value: 8
  misc_feature: MA Experiment 20000113 PARAMETER Experiment Name: At_42deg_Heat_cDNA_P Parameter: Tissue Value: Aerial
  misc_feature: MA Experiment ID: 20000224 Result: Down-regulated in Transcription
ccgatggaccgccatagtcaccgactaaaaaaaccagcgaccacgtaaatctttgacgacgaggaggaggaggaggagaagaataaacggaagaaactaagagatgaatagtccaccggagaacgatctttgttcgatatgtcattcccacttcaccgctccttgtcaagccaattgttcccattggttctgcgggaactgcattatgctggtgtggaggcatggatctacattacagccatgtaaatgccctttgtgtcgtcgtcatattagtttgttggttccttcagaggacacaatcagagaccgtaatgacgctacagttaaggaggttcttggtaatcttgaaacttacaaccgactctttggcgggcgttcaagtagtttagttcagaggatgcaagacctgcccttcttactacggaggttgttgcgggaaatgatggatccacaaagaacgcttccacttgtcattagggctcgggtttatatcgcaatgattctcagtgctgtttacataatcagtccaatagatatcattccagaaggagttctgggggtagtcggtttgcttgatgatctactcatagcactgatttgtttcctccatgttgctgctctgtaccgctcggttctctatttccgtcatgccggttcgtgaatcaatgagtgtctttgacattatacgttgcagttcaagaactagagatgtgtgcttaccttttcttctgtctttgatcctttccctttacaaatacacaattgttctgtttagctaaggaaaactgaaatgtgtgatgataaagatcacagcacaaaaagcttggaagtacatatcaatcatcttcctaccactt

SEQ ID NO: 101007 - protein, 185 aa, Arabidopsis thaliana; identical to SEQ ID NO: 40575
  peptide (1)..(185): Ceres Seq. ID no. 13606676
  misc_feature (10)..(52): Pfam Name: Zinc finger, C3HC4 type (RING finger) Pfam Description: Zinc finger, C3HC4 type (RING finger)
  misc_feature (1)..(185): Homolog of NCBI NO: 18410010 NR Description: zinc finger (C3HC4-type RING finger) protein [Arabidopsis thaliana] >gi|13878189|gb|AAK44172.1|AF370357_1 protein [Arabidopsis thaliana] >gi|16323398|gb|AAL15193.1|
  misc_feature (1)..(185): Homolog of NCBI NO: 18395127 NR Description: zinc finger (C3HC4-type RING finger) protein
  misc_feature (1)..(185): Homolog of NCBI NO: 21554064 NR Description: unknown [Arabidopsis thaliana]
  misc_feature (4)..(184): Homolog of NCBI NO: 28376707 NR Description: unknown protein [Oryza sativa (japonica
  misc_feature (58)..(185): Homolog of NCBI NO: 25518502 NR Description: hypothetical protein F12K8.14 - Arabidopsis >gi|6587838|gb|AAF18527.1|AC006551_13 Hypothetical protein
  misc_feature (62)..(184): Homolog of NCBI NO: 25406151 NR Description: unknown protein T9N14.2 [imported] - Arabidopsis
  misc_feature (1)..(175): Homolog of NCBI NO: 18418331 NR Description: zinc finger (C3HC4-type RING finger) protein
  misc_feature (1)..(175): Homolog of NCBI NO: 26453304 NR Description: unknown protein [Arabidopsis thaliana]
  misc_feature (1)..(175): Homolog of NCBI NO: 21553438 NR Description: unknown [Arabidopsis thaliana]
  misc_feature (10)..(184): Homolog of NCBI NO: 33604158 NR Description: Unknown (protein for MGC:65779) [Danio rerio]

SEQ ID NO: 101008 - protein, 151 aa, Arabidopsis thaliana; identical to SEQ ID NO: 40576
  peptide (1)..(151): Ceres Seq. ID no. 13606677
  misc_feature (1)..(151): Homolog of NCBI NO: 18410010 NR Description: zinc finger (C3HC4-type RING finger) protein [Arabidopsis thaliana] >gi|13878189|gb|AAK44172.1|AF370357_1 protein [Arabidopsis thaliana] >gi|16323398|gb|AAL15193.1|
  misc_feature (1)..(151): Homolog of NCBI NO: 18395127 NR Description: zinc finger (C3HC4-type RING finger) protein
  misc_feature (1)..(151): Homolog of NCBI NO: 21554064 NR Description: unknown [Arabidopsis thaliana]
  misc_feature (1)..(150): Homolog of NCBI NO: 28376707 NR Description: unknown protein [Oryza sativa (japonica
  misc_feature (24)..(151): Homolog of NCBI NO: 25518502 NR Description: hypothetical protein F12K8.14 - Arabidopsis >gi|6587838|gb|AAF18527.1|AC006551_13 Hypothetical protein
  misc_feature (28)..(150): Homolog of NCBI NO: 25406151 NR Description: unknown protein T9N14.2 [imported] - Arabidopsis
  misc_feature (1)..(141): Homolog of NCBI NO: 18418331 NR Description: zinc finger (C3HC4-type RING finger) protein
  misc_feature (1)..(141): Homolog of NCBI NO: 26453304 NR Description: unknown protein [Arabidopsis thaliana]
  misc_feature (1)..(141): Homolog of NCBI NO: 21553438 NR Description: unknown [Arabidopsis thaliana]
  misc_feature (1)..(150): Homolog of NCBI NO: 33604158 NR Description: Unknown (protein for MGC:65779) [Danio rerio]

SEQ ID NO: 101009 - DNA, 528 bp, Arabidopsis thaliana
  misc_feature (1)..(528): Ceres Seq. ID no. 13606678
  misc_feature: MA Experiment ID: 108434 Result: Up-regulated in Transcription
  misc_feature: MA Experiment 108434 PARAMETER Experiment Name: At_Root_Tips_cDNA_P Parameter: Tissue Value: Root Tips
  misc_feature: MA Experiment ID: 108462 Result: Down-regulated in Transcription
  misc_feature: MA Experiment 108462 PARAMETER Experiment Name: At_Germinating_Seeds_cDNA_P Parameter: Age (day) Value: 2 vs. 0
  misc_feature: MA Experiment 108462 PARAMETER Experiment Name: At_Germinating_Seeds_cDNA_P Parameter: Tissue Value: Germinating Seeds
  misc_feature: MA Experiment ID: 108463 Result: Down-regulated in Transcription
  misc_feature: MA Experiment 108463 PARAMETER Experiment Name: At_Germinating_Seeds_cDNA_P Parameter: Age (day) Value: 3 vs. 0
  misc_feature: MA Experiment 108463 PARAMETER Experiment Name: At_Germinating_Seeds_cDNA_P Parameter: Tissue Value: Germinating Seeds
  misc_feature: MA Experiment ID: 108464 Result: Down-regulated in Transcription
  misc_feature: MA Experiment 108464 PARAMETER Experiment Name: At_Germinating_Seeds_cDNA_P Parameter: Age (day) Value: 4 vs. 0
  misc_feature: MA Experiment 108464 PARAMETER Experiment Name: At_Germinating_Seeds_cDNA_P Parameter: Tissue Value: Germinating Seeds
acgaacaacggaagaacaaaactctgagcgaatcaatcaatcggaaaaaggagataggtttcgcgaaaatggcggagaaaaaggatagtgtgccaccggaatacgatgtgaatgctaagtgggacgcatgtctcgatctcactgtccgccgcttcgtttactcttccctcggcggcgcatttgccggtcttctgttcttcaggagtcctgttacaagatgggcatcgattgctttaggtgctggaattggtattggctctgcatattcagattgttctcgtgcttttgattcaccttcttcatcttcagctaatttagcagctcccaagaataatattacagagacttctcctgtatctcaggctgcagacgagtagacaatgtcgataaagtggaagttagtaacacatccaatgatcggggtgttcagaaacagagctattatcatgcaatgctttgttgaattgtttcctaaacctgcaaagacaagagtctattgagataatgtcaaatgtaaaaacctttttt

SEQ ID NO: 101010 - protein, 124 aa, Arabidopsis thaliana; identical to SEQ ID NO: 29652
  peptide (1)..(124): Ceres Seq. ID no. 13606679
  misc_feature (23)..(96): Pfam Name: Domain of unknown function (DUF543) Pfam Description: Domain of unknown function (DUF543)
  misc_feature (23)..(124): Homolog of NCBI NO: 18410008 NR Description: expressed protein [Arabidopsis thaliana] unknown protein [Arabidopsis thaliana]
  misc_feature (23)..(124): Homolog of NCBI NO: 21553491 NR Description: unknown [Arabidopsis thaliana]
  misc_feature (23)..(120): Homolog of NCBI NO: 25406151 NR Description: unknown protein T9N14.2 [imported] - Arabidopsis
  misc_feature (25)..(124): Homolog of NCBI NO: 18395129 NR Description: expressed protein [Arabidopsis thaliana]

SEQ ID NO: 101011 - protein, 102 aa, Arabidopsis thaliana; identical to SEQ ID NO: 29653
  peptide (1)..(102): Ceres Seq. ID no. 13606680
  misc_feature (1)..(74): Pfam Name: Domain of unknown function (DUF543) Pfam Description: Domain of unknown function (DUF543)
  misc_feature (1)..(102): Homolog of NCBI NO: 18410008 NR Description: expressed protein [Arabidopsis thaliana] unknown protein [Arabidopsis thaliana]
  misc_feature (1)..(102): Homolog of NCBI NO: 21553491 NR Description: unknown [Arabidopsis thaliana]
  misc_feature (1)..(98): Homolog of NCBI NO: 25406151 NR Description: unknown protein T9N14.2 [imported] - Arabidopsis
  misc_feature (3)..(102): Homolog of NCBI NO: 18395129 NR Description: expressed protein [Arabidopsis thaliana]

SEQ ID NO: 101012 - DNA, 867 bp, Arabidopsis thaliana
  misc_feature (1)..(867): Ceres Seq. ID no. 13606681
  misc_feature: MA Experiment ID: 108561 Result: Down-regulated in Transcription
  misc_feature: MA Experiment 108561 PARAMETER Experiment Name: At_100uM_ABA_cDNA_P Parameter: Timepoint (hr) Value: 6
  misc_feature: MA Experiment 108561 PARAMETER Experiment Name: At_100uM_ABA_cDNA_P Parameter: Tissue Value: Aerial
  misc_feature: MA Experiment 108561 PARAMETER Experiment Name: At_100uM_ABA_cDNA_P Parameter: Treatment Value: 100uM ABA vs. No Treatment
  misc_feature: MA Experiment ID: 108572 Result: Down-regulated in Transcription
  misc_feature: MA Experiment 108572 PARAMETER Experiment Name: At_Drought_cDNA_P Parameter: Timepoint (hr) Value: 1
  misc_feature: MA Experiment 108572 PARAMETER Experiment Name: At_Drought_cDNA_P Parameter: Tissue Value: Aerial
  misc_feature: MA Experiment 108572 PARAMETER Experiment Name: At_Drought_cDNA_P Parameter: Treatment Value: Drought vs. No Drought
  misc_feature: MA Experiment ID: 108573 Result: Down-regulated in Transcription
  misc_feature: MA Experiment 108573 PARAMETER Experiment Name: At_Drought_cDNA_P Parameter: Timepoint (hr) Value: 6
  misc_feature: MA Experiment 108573 PARAMETER Experiment Name: At_Drought_cDNA_P Parameter: Tissue Value: Aerial
  misc_feature: MA Experiment 108573 PARAMETER Experiment Name: At_Drought_cDNA_P Parameter: Treatment Value: Drought vs. No Drought
  misc_feature: MA Experiment ID: 108577 Result: Down-regulated in Transcription
  misc_feature: MA Experiment 108577 PARAMETER Experiment Name: At_42deg_Heat_cDNA_P Parameter: Temperature (deg C) Value: 42 vs. 22
  misc_feature: MA Experiment 108577 PARAMETER Experiment Name: At_42deg_Heat_cDNA_P Parameter: Timepoint (hr) Value: 6
  misc_feature: MA Experiment 108577 PARAMETER Experiment Name: At_42deg_Heat_cDNA_P Parameter: Tissue Value: Aerial
  misc_feature: MA Experiment ID: 108595 Result: Down-regulated in Transcription
  misc_feature: MA Experiment 108595 PARAMETER Experiment Name: At_Ler-pi_Ovule_cDNA_P Parameter: Plant Line Value: null
  misc_feature: MA Experiment ID: 20000173 Result: Down-regulated in Transcription
  misc_feature: MA Experiment 20000173 PARAMETER Experiment Name: At_42deg_Heat_P Parameter: Age (day) Value: 14
  misc_feature: MA Experiment 20000173 PARAMETER Experiment Name: At_42deg_Heat_P Parameter: Organism Value: A. thaliana
  misc_feature: MA Experiment 20000173 PARAMETER Experiment Name: At_42deg_Heat_P Parameter: Plant Line Value: WS
  misc_feature: MA Experiment 20000173 PARAMETER Experiment Name: At_42deg_Heat_P Parameter: Temperature (deg C) Value: 42 vs. 22
  misc_feature: MA Experiment 20000173 PARAMETER Experiment Name: At_42deg_Heat_P Parameter: Timepoint (hr) Value: 6
  misc_feature: MA Experiment 20000173 PARAMETER Experiment Name: At_42deg_Heat_P Parameter: Tissue Value: Aerial
  misc_feature: MA Experiment ID: 20000179 Result: Down-regulated in Transcription
  misc_feature: MA Experiment 20000179 PARAMETER Experiment Name: At_Germinating_Seeds_P Parameter: Age (hr) Value: 6 vs. 0
  misc_feature: MA Experiment 20000179 PARAMETER Experiment Name: At_Germinating_Seeds_P Parameter: Tissue Value: Germinating Seeds
  misc_feature: MA Experiment ID: 20000185 Result: Down-regulated in Transcription
  misc_feature: MA Experiment 20000185 PARAMETER Experiment Name: At_Roots__P Parameter: Age (day) Value: 7 vs. 21
  misc_feature: MA Experiment 20000185 PARAMETER Experiment Name: At_Roots__P Parameter: Organism Value: A. thaliana
  misc_feature: MA Experiment 20000185 PARAMETER Experiment Name: At_Roots__P Parameter: Tissue Value: Roots vs. Whole Plant
  misc_feature: MA Experiment ID: 20000264 Result: Down-regulated in Transcription
  misc_feature: MA Experiment 20000264 PARAMETER Experiment Name: At_Open_Flower_P Parameter: Age (day) Value: 21
  misc_feature: MA Experiment 20000264 PARAMETER Experiment Name: At_Open_Flower_P Parameter: Plant Line Value: WS
  misc_feature: MA Experiment 20000264 PARAMETER Experiment Name: At_Open_Flower_P Parameter: Tissue Value: Open Flower vs. Whole Plant
  misc_feature: MA Experiment ID: 20000268 Result: Down-regulated in Transcription
  misc_feature: MA Experiment 20000268 PARAMETER Experiment Name: At_100mM_NaCl__P Parameter: Age (day) Value: 14
  misc_feature: MA Experiment 20000268 PARAMETER Experiment Name: At_100mM_NaCl__P Parameter: Organism Value: A. thaliana
  misc_feature: MA Experiment 20000268 PARAMETER Experiment Name: At_100mM_NaCl__P Parameter: Plant Line Value: WS
  misc_feature: MA Experiment 20000268 PARAMETER Experiment Name: At_100mM_NaCl__P Parameter: Timepoint (hr) Value: 6
  misc_feature: MA Experiment 20000268 PARAMETER Experiment Name: At_100mM_NaCl__P Parameter: Tissue Value: Whole Plant
  misc_feature: MA Experiment 20000268 PARAMETER Experiment Name: At_100mM_NaCl__P Parameter: Treatment Value: 100mM NaCl vs. No Treatment
  misc_feature: MA Experiment ID: 20000286 Result: Down-regulated in Transcription
  misc_feature: MA Experiment 20000286 PARAMETER Experiment Name: At_Open_Flower_P Parameter: Age (day) Value: 21
  misc_feature: MA Experiment 20000286 PARAMETER Experiment Name: At_Open_Flower_P Parameter: Plant Line Value: WS
  misc_feature: MA Experiment 20000286 PARAMETER Experiment Name: At_Open_Flower_P Parameter: Tissue Value: Half Open vs. Whole Plant
  misc_feature: MA Experiment ID: 20000436 Result: Down-regulated in Transcription
  misc_feature: MA Experiment 20000436 PARAMETER Experiment Name: At_Drought_P Parameter: Age (day) Value: 7
  misc_feature: MA Experiment 20000436 PARAMETER Experiment Name: At_Drought_P Parameter: Organism Value: A. thaliana
  misc_feature: MA Experiment 20000436 PARAMETER Experiment Name: At_Drought_P Parameter: Plant Line Value: WS
  misc_feature: MA Experiment 20000436 PARAMETER Experiment Name: At_Drought_P Parameter: Timepoint (hr) Value: 12
  misc_feature: MA Experiment 20000436 PARAMETER Experiment Name: At_Drought_P Parameter: Tissue Value: Whole Plant
  misc_feature: MA Experiment 20000436 PARAMETER Experiment Name: At_Drought_P Parameter: Treatment Value: Drought vs. No Drought
  misc_feature: MA Experiment ID: 20000437 Result: Down-regulated in Transcription
  misc_feature: MA Experiment 20000437 PARAMETER Experiment Name: At_Drought_P Parameter: Age (day) Value: 8
  misc_feature: MA Experiment 20000437 PARAMETER Experiment Name: At_Drought_P Parameter: Organism Value: A. thaliana
  misc_feature: MA Experiment 20000437 PARAMETER Experiment Name: At_Drought_P Parameter: Plant Line Value: WS
  misc_feature: MA Experiment 20000437 PARAMETER Experiment Name: At_Drought_P Parameter: Timepoint (hr) Value: 24
  misc_feature: MA Experiment 20000437 PARAMETER Experiment Name: At_Drought_P Parameter: Tissue Value: Whole Plant
  misc_feature: MA Experiment 20000437 PARAMETER Experiment Name: At_Drought_P Parameter: Treatment Value: Drought vs. No Drought
  misc_feature: MA Experiment ID: 20000439 Result: Down-regulated in Transcription
  misc_feature: MA Experiment 20000439 PARAMETER Experiment Name: At_Roots__P Parameter: Age (day) Value: 14 vs. 21
  misc_feature: MA Experiment 20000439 PARAMETER Experiment Name: At_Roots__P Parameter: Organism Value: A. thaliana
  misc_feature: MA Experiment 20000439 PARAMETER Experiment Name: At_Roots__P Parameter: Tissue Value: Roots vs. Whole Plant
  misc_feature: MA Experiment ID: 20000794 Result: Down-regulated in Transcription
  misc_feature: MA Experiment 20000794 PARAMETER Experiment Name: At_Petals_P Parameter: Age (day) Value: 23-25 days
  misc_feature: MA Experiment 20000794 PARAMETER Experiment Name: At_Petals_P Parameter: Plant Line Value: WS
  misc_feature: MA Experiment 20000794 PARAMETER Experiment Name: At_Petals_P Parameter: Tissue Value: Petals vs. Whole plant
  misc_feature: MA Experiment ID: 20001554 Result: Down-regulated in Transcription
  misc_feature: MA Experiment 20001554 PARAMETER Experiment Name: At_Drought_Soil_Dry_P Parameter: Age (day) Value: 21
  misc_feature: MA Experiment 20001554 PARAMETER Experiment Name: At_Drought_Soil_Dry_P Parameter: Organism Value: A. thaliana
  misc_feature: MA Experiment 20001554 PARAMETER Experiment Name: At_Drought_Soil_Dry_P Parameter: Plant Line Value: WS
  misc_feature: MA Experiment 20001554 PARAMETER Experiment Name: At_Drought_Soil_Dry_P Parameter: Post Timepoint (hr) Value: None
  misc_feature: MA Experiment 20001554 PARAMETER Experiment Name: At_Drought_Soil_Dry_P Parameter: Post-Treatment Value: None
  misc_feature: MA Experiment 20001554 PARAMETER Experiment Name: At_Drought_Soil_Dry_P Parameter: Timepoint (day) Value: 7
  misc_feature: MA Experiment 20001554 PARAMETER Experiment Name: At_Drought_Soil_Dry_P Parameter: Treatment Value: Drought vs. No Drought
  misc_feature: MA Experiment ID: 20001555 Result: Down-regulated in Transcription
  misc_feature: MA Experiment 20001555 PARAMETER Experiment Name: At_Drought_Soil_Dry_P Parameter: Age (day) Value: 24
  misc_feature: MA Experiment 20001555 PARAMETER Experiment Name: At_Drought_Soil_Dry_P Parameter: Organism Value: A. thaliana
  misc_feature: MA Experiment 20001555 PARAMETER Experiment Name: At_Drought_Soil_Dry_P Parameter: Plant Line Value: WS
  misc_feature: MA Experiment 20001555 PARAMETER Experiment Name: At_Drought_Soil_Dry_P Parameter: Post Timepoint (hr) Value: None
  misc_feature: MA Experiment 20001555 PARAMETER Experiment Name: At_Drought_Soil_Dry_P Parameter: Post-Treatment Value: None
  misc_feature: MA Experiment 20001555 PARAMETER Experiment Name: At_Drought_Soil_Dry_P Parameter: Timepoint (day) Value: 10
  misc_feature: MA Experiment 20001555 PARAMETER Experiment Name: At_Drought_Soil_Dry_P Parameter: Treatment Value: Drought vs. No Drought
  misc_feature: MA Experiment ID: 20001556 Result: Down-regulated in Transcription
  misc_feature: MA Experiment 20001556 PARAMETER Experiment Name: At_Drought_Soil_Dry_P Parameter: Age (day) Value: 26
  misc_feature: MA Experiment 20001556 PARAMETER Experiment Name: At_Drought_Soil_Dry_P Parameter: Organism Value: A. thaliana
  misc_feature: MA Experiment 20001556 PARAMETER Experiment Name: At_Drought_Soil_Dry_P Parameter: Plant Line Value: WS
  misc_feature: MA Experiment 20001556 PARAMETER Experiment Name: At_Drought_Soil_Dry_P Parameter: Post Timepoint (hr) Value: None
  misc_feature: MA Experiment 20001556 PARAMETER Experiment Name: At_Drought_Soil_Dry_P Parameter: Post-Treatment Value: None
  misc_feature: MA Experiment 20001556 PARAMETER Experiment Name: At_Drought_Soil_Dry_P Parameter: Timepoint (day) Value: 12
  misc_feature: MA Experiment 20001556 PARAMETER Experiment Name: At_Drought_Soil_Dry_P Parameter: Treatment Value: Drought vs. No Drought
  misc_feature: MA Experiment ID: 20001557 Result: Up-regulated in Transcription
  misc_feature: MA Experiment 20001557 PARAMETER Experiment Name: At_Drought_Soil_Dry_P Parameter: Age (day) Value: 27
  misc_feature: MA Experiment 20001557 PARAMETER Experiment Name: At_Drought_Soil_Dry_P Parameter: Organism Value: A. thaliana
  misc_feature: MA Experiment 20001557 PARAMETER Experiment Name: At_Drought_Soil_Dry_P Parameter: Plant Line Value: WS
  misc_feature: MA Experiment 20001557 PARAMETER Experiment Name: At_Drought_Soil_Dry_P Parameter: Post Timepoint (hr) Value: 3
  misc_feature: MA Experiment 20001557 PARAMETER Experiment Name: At_Drought_Soil_Dry_P Parameter: Post-Treatment Value: Re-Water vs. No Drought
  misc_feature: MA Experiment 20001557 PARAMETER Experiment Name: At_Drought_Soil_Dry_P Parameter: Timepoint (day) Value: 13
  misc_feature: MA Experiment 20001557 PARAMETER Experiment Name: At_Drought_Soil_Dry_P Parameter: Treatment Value: Drought vs. No Drought
  misc_feature: MA Experiment ID: 20001756 Result: Up-regulated in Transcription
  misc_feature: MA Experiment 20001756 PARAMETER Experiment Name: At_50mM_NH4NO3_L-to-H_P Parameter: Timepoint (hr) Value: 4
  misc_feature: MA Experiment 20001756 PARAMETER Experiment Name: At_50mM_NH4NO3_L-to-H_P Parameter: Tissue Value: Leaf
  misc_feature: MA Experiment 20001756 PARAMETER Experiment Name: At_50mM_NH4NO3_L-to-H_P Parameter: Treatment Value: 50mM NH4NO3 vs 100mM Mannitol
  misc_feature: MA Experiment ID: 20001757 Result: Up-regulated in Transcription
  misc_feature: MA Experiment 20001757 PARAMETER Experiment Name: At_50mM_NH4NO3_L-to-H_P Parameter: Timepoint (hr) Value: 6
  misc_feature: MA Experiment 20001757 PARAMETER Experiment Name: At_50mM_NH4NO3_L-to-H_P Parameter: Tissue Value: Leaf
  misc_feature: MA Experiment 20001757 PARAMETER Experiment Name: At_50mM_NH4NO3_L-to-H_P Parameter: Treatment Value: 50mM NH4NO3 vs 100mM Mannitol
  misc_feature: MA Experiment ID: 20001904 Result: Down-regulated in Transcription
  misc_feature: MA Experiment 20001904 PARAMETER Experiment Name: At_Drought_Reproduction_P Parameter: Age (day) Value: 37
  misc_feature: MA Experiment 20001904 PARAMETER Experiment Name: At_Drought_Reproduction_P Parameter: Organism Value: A. thaliana
  misc_feature: MA Experiment 20001904 PARAMETER Experiment Name: At_Drought_Reproduction_P Parameter: Plant Line Value: WS
  misc_feature: MA Experiment 20001904 PARAMETER Experiment Name: At_Drought_Reproduction_P Parameter: Timepoint (day) Value: 7
  misc_feature: MA Experiment 20001904 PARAMETER Experiment Name: At_Drought_Reproduction_P Parameter: Tissue Value: Rosettes
  misc_feature: MA Experiment 20001904 PARAMETER Experiment Name: At_Drought_Reproduction_P Parameter: Treatment Value: Drought vs. No Drought
  misc_feature: MA Experiment ID: 20001906 Result: Down-regulated in Transcription
  misc_feature: MA Experiment 20001906 PARAMETER Experiment Name: At_Drought_Reproduction_P Parameter: Age (day) Value: 35
  misc_feature: MA Experiment 20001906 PARAMETER Experiment Name: At_Drought_Reproduction_P Parameter: Organism Value: A. thaliana
  misc_feature: MA Experiment 20001906 PARAMETER Experiment Name: At_Drought_Reproduction_P Parameter: Plant Line Value: WS
  misc_feature: MA Experiment 20001906 PARAMETER Experiment Name: At_Drought_Reproduction_P Parameter: Timepoint (day) Value: 5
  misc_feature: MA Experiment 20001906 PARAMETER Experiment Name: At_Drought_Reproduction_P Parameter: Tissue Value: Siliques
  misc_feature: MA Experiment 20001906 PARAMETER Experiment Name: At_Drought_Reproduction_P Parameter: Treatment Value: Drought vs. No Drought
gagtagggaaaaagaaaagaaaagtagagtactatcttcctcttaaaccaaccattcaaaatgttgcgtactatcttcctcttatctcttctctttgctctatccaatgcctctgttcaagatttctgtgtcgcaaacctgaaacgcgctgaaacccctgcgggttacccttgcattcgtcccattcatgtcaaagctacagactttgtcttctctggcttaggcactcctggaaacactacaaacatcatcaacgccgctgtcacacccgctttcgcagctcagttcccgggtctgaacggtctaggcctctctacagctagacttgacttagctcctaaaggtgtgatcccaatgcacactcaccctggtgcctctgaggttctctttgtccttactggctccattaccgctgggtttgtctcctcggcaaacgctgtctacgtgcagacactcaaaccaggacaggtcatggttttcccacagggcttgcttcatttccagatcaacgcgggaaaatcctctgcttcagccgttgtcactttcaacagcgctaatccgggtctgcagattctcgacttcgcactctttgctaacagtcttcccactgaactcgtcgtgggtactactttccttgacgccactacagtcaagaagctaaagggtgttcttggaggaactggctaaaaaaagacttaggactactccttgactaaaacaccaaaacctgtttcttcatctttttttctctttaattgattcttgtcttctctgttttgtgtgccttgtaattcttcaaaacctgtcaaaattgttacattgtatgtgagttttttcaattaagatcctgagttggtcacaccgttc

SEQ ID NO: 101013 - protein, 208 aa, Arabidopsis thaliana; identical to SEQ ID NO: 23207
  peptide (1)..(208): Ceres Seq. ID no. 13606682
  misc_feature (52)..(198): Pfam Name: Cupin Pfam Description: Cupin
  misc_feature (1)..(208): Homolog of NCBI NO: 15218535 NR Description: germin-like protein (AtGER1) [Arabidopsis
  misc_feature (1)..(208): Homolog of NCBI NO: 17473703 NR Description: germin-like protein [Arabidopsis thaliana]
  misc_feature (1)..(208): Homolog of NCBI NO: 1592672 NR Description: germin1 [Arabidopsis thaliana]
  misc_feature (5)..(208): Homolog of NCBI NO: 1934726 NR Description: germin-like protein [Arabidopsis thaliana]
  misc_feature (1)..(208): Homolog of NCBI NO: 1169941 NR Description: Germin-like protein 1 precursor
  misc_feature (1)..(208): Homolog of NCBI NO: 13277342 NR Description: Germin-like protein [Pisum sativum]
  misc_feature (5)..(207): Homolog of NCBI NO: 18201940 NR Description: Auxin-binding protein ABP20 precursor
  misc_feature (6)..(207): Homolog of NCBI NO: 18203684 NR Description: Auxin-binding protein ABP19a precursor
  misc_feature (3)..(207): Homolog of NCBI NO: 31711507 NR Description: 24K germin like protein [Nicotiana tabacum]
  misc_feature (1)..(207): Homolog of NCBI NO: 15242028 NR Description: germin-like protein (AtGER3) [Arabidopsis

SEQ ID NO: 101014 - protein, 110 aa, Arabidopsis thaliana; identical to SEQ ID NO: 31047
  peptide (1)..(110): Ceres Seq. ID no. 13606683
  misc_feature (1)..(100): Pfam Name: Cupin Pfam Description: Cupin
  misc_feature (1)..(110): Homolog of NCBI NO: 15218535 NR Description: germin-like protein (AtGER1) [Arabidopsis
  misc_feature (1)..(110): Homolog of NCBI NO: 17473703 NR Description: germin-like protein [Arabidopsis thaliana]
  misc_feature (1)..(110): Homolog of NCBI NO: 1592672 NR Description: germin1 [Arabidopsis thaliana]
  misc_feature (1)..(110): Homolog of NCBI NO: 1934726 NR Description: germin-like protein [Arabidopsis thaliana]
  misc_feature (1)..(110): Homolog of NCBI NO: 1169941 NR Description: Germin-like protein 1 precursor
  misc_feature (1)..(110): Homolog of NCBI NO: 13277342 NR Description: Germin-like protein [Pisum sativum]
  misc_feature (1)..(109): Homolog of NCBI NO: 18201940 NR Description: Auxin-binding protein ABP20 precursor
  misc_feature (1)..(109): Homolog of NCBI NO: 18203684 NR Description: Auxin-binding protein ABP19a precursor
  misc_feature (1)..(109): Homolog of NCBI NO: 31711507 NR Description: 24K germin like protein [Nicotiana tabacum]
  misc_feature (1)..(109): Homolog of NCBI NO: 15242028 NR Description: germin-like protein (AtGER3) [Arabidopsis

SEQ ID NO: 101015 - DNA, 1827 bp, Arabidopsis thaliana
  misc_feature (1)..(1827): Ceres Seq. ID no. 13606699
  misc_feature: MA Experiment ID: 20000173 Result: Down-regulated in Transcription
  misc_feature: MA Experiment 20000173 PARAMETER Experiment Name: At_42deg_Heat_P Parameter: Age (day) Value: 14
  misc_feature: MA Experiment 20000173 PARAMETER Experiment Name: At_42deg_Heat_P Parameter: Organism Value: A. thaliana
  misc_feature: MA Experiment 20000173 PARAMETER Experiment Name: At_42deg_Heat_P Parameter: Plant Line Value: WS
  misc_feature: MA Experiment 20000173 PARAMETER Experiment Name: At_42deg_Heat_P Parameter: Temperature (deg C) Value: 42 vs. 22
  misc_feature: MA Experiment 20000173 PARAMETER Experiment Name: At_42deg_Heat_P Parameter: Timepoint (hr) Value: 6
  misc_feature: MA Experiment 20000173 PARAMETER Experiment Name: At_42deg_Heat_P Parameter: Tissue Value: Aerial
  misc_feature: MA Experiment ID: 20000184 Result: Down-regulated in Transcription
  misc_feature: MA Experiment 20000184 PARAMETER Experiment Name: At_Shoots__P Parameter: Age (day) Value: 7
  misc_feature: MA Experiment 20000184 PARAMETER Experiment Name: At_Shoots__P Parameter: Tissue Value: Shoots vs. Whole Plant
  misc_feature: MA Experiment ID: 20000185 Result: Up-regulated in Transcription
  misc_feature: MA Experiment 20000185 PARAMETER Experiment Name: At_Roots__P Parameter: Age (day) Value: 7 vs. 21
  misc_feature: MA Experiment 20000185 PARAMETER Experiment Name: At_Roots__P Parameter: Organism Value: A. thaliana
  misc_feature: MA Experiment 20000185 PARAMETER Experiment Name: At_Roots__P Parameter: Tissue Value: Roots vs. Whole Plant
  misc_feature: MA Experiment ID: 20000214 Result: Down-regulated in Transcription
  misc_feature: MA Experiment 20000214 PARAMETER Experiment Name: At_4deg_Cold_P Parameter: Timepoint (hr) Value: 6
  misc_feature: MA Experiment ID: 20000227 Result: Up-regulated in Transcription
  misc_feature: MA Experiment 20000227 PARAMETER Experiment Name: At_Root-Tips-vs-Tops_P Parameter: Tissue Value: Root Tips vs. Root Tops
  misc_feature: MA Experiment ID: 20000234 Result: Down-regulated in Transcription
  misc_feature: MA Experiment 20000234 PARAMETER Experiment Name: At_Siliques_P Parameter: Age (day) Value: 21
  misc_feature: MA Experiment 20000234 PARAMETER Experiment Name: At_Siliques_P Parameter: Organism Value: A. thaliana
  misc_feature: MA Experiment 20000234 PARAMETER Experiment Name: At_Siliques_P Parameter: Plant Line Value: WS
  misc_feature: MA Experiment 20000234 PARAMETER Experiment Name: At_Siliques_P Parameter: Tissue Value: Less Than 5mm Siliques vs. Whole Plant
  misc_feature: MA Experiment ID: 20000436 Result: Down-regulated in Transcription
  misc_feature: MA Experiment 20000436 PARAMETER Experiment Name: At_Drought_P Parameter: Age (day) Value: 7
  misc_feature: MA Experiment 20000436 PARAMETER Experiment Name: At_Drought_P Parameter: Organism Value: A. thaliana
  misc_feature: MA Experiment 20000436 PARAMETER Experiment Name: At_Drought_P Parameter: Plant Line Value: WS
  misc_feature: MA Experiment 20000436 PARAMETER Experiment Name: At_Drought_P Parameter: Timepoint (hr) Value: 12
  misc_feature: MA Experiment 20000436 PARAMETER Experiment Name: At_Drought_P Parameter: Tissue Value: Whole Plant
  misc_feature: MA Experiment 20000436 PARAMETER Experiment Name: At_Drought_P Parameter: Treatment Value: Drought vs. No Drought
  misc_feature: MA Experiment ID: 20000495 Result: Up-regulated in Transcription
  misc_feature: MA Experiment 20000495 PARAMETER Experiment Name: At_Guard_Cells_P Parameter: Harvest Date Value: 8/2/2002
  misc_feature: MA Experiment 20000495 PARAMETER Experiment Name: At_Guard_Cells_P Parameter: Organism Value: A. thaliana
  misc_feature: MA Experiment 20000495 PARAMETER Experiment Name: At_Guard_Cells_P Parameter: Tissue Value: Guard Cells vs. Leaves
  misc_feature: MA Experiment ID: 20000573 Result: Up-regulated in Transcription
  misc_feature: MA Experiment 20000573 PARAMETER Experiment Name: At_100uM_ABA_Mutants__P Parameter: Organism Value: A. thaliana
  misc_feature: MA Experiment 20000573 PARAMETER Experiment Name: At_100uM_ABA_Mutants__P Parameter: Plant Line Value: CS22 vs. Ler wt
  misc_feature: MA Experiment 20000573 PARAMETER Experiment Name: At_100uM_ABA_Mutants__P Parameter: Timepoint (hr) Value: N/A
  misc_feature: MA Experiment 20000573 PARAMETER Experiment Name: At_100uM_ABA_Mutants__P Parameter: Tissue Value: Whole Plant
  misc_feature: MA Experiment 20000573 PARAMETER Experiment Name: At_100uM_ABA_Mutants__P Parameter: Treatment Value: None
  misc_feature: MA Experiment ID: 20000574 Result: Up-regulated in Transcription
  misc_feature: MA Experiment 20000574 PARAMETER Experiment Name: At_100uM_ABA_Mutants__P Parameter: Organism Value: A. thaliana
  misc_feature: MA Experiment 20000574 PARAMETER Experiment Name: At_100uM_ABA_Mutants__P Parameter: Plant Line Value: CS23 vs. Ler wt
  misc_feature: MA Experiment 20000574 PARAMETER Experiment Name: At_100uM_ABA_Mutants__P Parameter: Timepoint (hr) Value: N/A
  misc_feature: MA Experiment 20000574 PARAMETER Experiment Name: At_100uM_ABA_Mutants__P Parameter: Tissue Value: Whole Plant
  misc_feature: MA Experiment 20000574 PARAMETER Experiment Name: At_100uM_ABA_Mutants__P Parameter: Treatment Value: None
  misc_feature: MA Experiment ID: 20000794 Result: Down-regulated in Transcription
  misc_feature: MA Experiment 20000794 PARAMETER Experiment Name: At_Petals_P Parameter: Age (day) Value: 23-25 days
  misc_feature: MA Experiment 20000794 PARAMETER Experiment Name: At_Petals_P Parameter: Plant Line Value: WS
  misc_feature: MA Experiment 20000794 PARAMETER Experiment Name: At_Petals_P Parameter: Tissue Value: Petals vs. Whole plant
  misc_feature: MA Experiment ID: 20001248 Result: Up-regulated in Transcription
  misc_feature: MA Experiment 20001248 PARAMETER Experiment Name: At_Far-red-induction_P Parameter: Age (day) Value: 7
  misc_feature: MA Experiment 20001248 PARAMETER Experiment Name: At_Far-red-induction_P Parameter: Light Value: Far-red vs. White
  misc_feature: MA Experiment 20001248 PARAMETER Experiment Name: At_Far-red-induction_P Parameter: Organism Value: A. thaliana
  misc_feature: MA Experiment 20001248 PARAMETER Experiment Name: At_Far-red-induction_P Parameter: Plant Line Value: Columbia
  misc_feature: MA Experiment 20001248 PARAMETER Experiment Name: At_Far-red-induction_P Parameter: Timepoint (hr) Value: 4
  misc_feature: MA Experiment 20001248 PARAMETER Experiment Name: At_Far-red-induction_P Parameter: Tissue Value: Whole Plant
  misc_feature: MA Experiment ID: 20001450 Result: Up-regulated in Transcription
  misc_feature: MA Experiment 20001450 PARAMETER Experiment Name: At_Far-red-induction_P Parameter: Age (day) Value: 7
  misc_feature: MA Experiment 20001450 PARAMETER Experiment Name: At_Far-red-induction_P Parameter: Light Value: Far-red vs. White
  misc_feature: MA Experiment 20001450 PARAMETER Experiment Name: At_Far-red-induction_P Parameter: Organism Value: A. thaliana
  misc_feature: MA Experiment 20001450 PARAMETER Experiment Name: At_Far-red-induction_P Parameter: Plant Line Value: Columbia
  misc_feature: MA Experiment 20001450 PARAMETER Experiment Name: At_Far-red-induction_P Parameter: Timepoint (hr) Value: 8
  misc_feature: MA Experiment 20001450 PARAMETER Experiment Name: At_Far-red-induction_P Parameter: Tissue Value: Whole Plant
  misc_feature: MA Experiment ID: 20001451 Result: Up-regulated in Transcription
  misc_feature: MA Experiment 20001451 PARAMETER Experiment Name: At_Far-red-induction_P Parameter: Age (day) Value: 7
  misc_feature: MA Experiment 20001451 PARAMETER Experiment Name: At_Far-red-induction_P Parameter: Light Value: Far-red vs. White
  misc_feature: MA Experiment 20001451 PARAMETER Experiment Name: At_Far-red-induction_P Parameter: Organism Value: A. thaliana
  misc_feature: MA Experiment 20001451 PARAMETER Experiment Name: At_Far-red-induction_P Parameter: Plant Line Value: Columbia
  misc_feature: MA Experiment 20001451 PARAMETER Experiment Name: At_Far-red-induction_P Parameter: Timepoint (hr) Value: 24
  misc_feature: MA Experiment 20001451 PARAMETER Experiment Name: At_Far-red-induction_P Parameter: Tissue Value: Whole Plant
  misc_feature: MA Experiment ID: 20001906 Result: Up-regulated in Transcription
  misc_feature: MA Experiment 20001906 PARAMETER Experiment Name: At_Drought_Reproduction_P Parameter: Age (day) Value: 35
  misc_feature: MA Experiment 20001906 PARAMETER Experiment Name: At_Drought_Reproduction_P Parameter: Organism Value: A. thaliana
  misc_feature: MA Experiment 20001906 PARAMETER Experiment Name: At_Drought_Reproduction_P Parameter: Plant Line Value: WS
  misc_feature: MA Experiment 20001906 PARAMETER Experiment Name: At_Drought_Reproduction_P Parameter: Timepoint (day) Value: 5
  misc_feature: MA Experiment 20001906 PARAMETER Experiment Name: At_Drought_Reproduction_P Parameter: Tissue Value: Siliques
  misc_feature: MA Experiment 20001906 PARAMETER Experiment Name: At_Drought_Reproduction_P Parameter: Treatment Value: Drought vs. No Drought
  misc_feature: MA Experiment ID: 20001908 Result: Up-regulated in Transcription
  misc_feature: MA Experiment 20001908 PARAMETER Experiment Name: At_Drought_Reproduction_P Parameter: Age (day) Value: 40
  misc_feature: MA Experiment 20001908 PARAMETER Experiment Name: At_Drought_Reproduction_P Parameter: Organism Value: A. thaliana
  misc_feature: MA Experiment 20001908 PARAMETER Experiment Name: At_Drought_Reproduction_P Parameter: Plant Line Value: WS
  misc_feature: MA Experiment 20001908 PARAMETER Experiment Name: At_Drought_Reproduction_P Parameter: Timepoint (day) Value: 10
  misc_feature: MA Experiment 20001908 PARAMETER Experiment Name: At_Drought_Reproduction_P Parameter: Tissue Value: Siliques
  misc_feature: MA Experiment 20001908 PARAMETER Experiment Name: At_Drought_Reproduction_P Parameter: Treatment Value: Drought vs. No Drought
gaggttgagagcatcttccaaaagagagagtgtttgtgtgtgtgagagagagtgagtgtgagtgagagaagaaaaaaaaaattgagagattaaaatttgagtgaaattagggtttattctcttcttgctttctttgcttcgtttcatcttcaaaccaaaagaaaaaaactcttccatgtcctgtctattcatcagtcgtctttcttgagaaaacacaaatcacgattttcttatgaagtgttgctttatgagtttatattttgccaaaactcatctaaaacgacaaacttttgtttaaaattgtatttgaaaagtgttttcaagaaaacgatatccatcaaaaatattatgattttttctgtcaattaatattctttcattcttttatagagttgatcaacttcatgggcattttttagttccctcaagttttgatcctcttattttatttctttttttgttgataaatttattttagttttgatctatggaggttgcttatttcaaacctcgttgatcacttttatttctgtataaaccaaaaaaccagtctttgaattttttctaaaaagacaggttttatttcttcaaccattttttaattataattttatataatcttgttttttgtagtacatttttttttgtatttcaggaaactccgatggcggatctcttcggtggtggccacggcggcgagcttatggaagcacttcaacctttttacaaaagtgcttccacgtctgcttcaaatcctgcgtttgcgtcctcaaacgatgcgtttgcgtctgccccaaacgacctattttcttcttcttcttactataatcctcatgcatctttattcccttcacattccacaacctcttacccggatatttattctggatccatgacctatccatcttcattcgggtcggatcttcaacaacccgaaaactaccaatctcagttccattaccaaaacactatcacttacactcaccaagacaacaacacttgcatgcttaacttcattgagccgagccaaccgggttttatgacccaaccgggtccgagttcgggttcggtttcaaaaccggctaagctctatagaggagtgaggcaaagacattggggaaaatgggtcgcggagatccgtttacccaggaaccgaacccgactttggctcggaacattcgacacggctgaagaagccgcgttggcttatgatcgcgccgcgtttaagcttcgtggtgactcggctcggcttaacttcccagctctccgataccaaaccggctcgtctccgtctgataccggcgaatatggtcctattcaagctgccgtagacgctaaactagaagccatattagctgagccgaagaatcagccgggcaaaacggagaggacgtcgaggaaacgagctaaagccgcggcttcttcagctgagcagccgtcagcgccacaacaacattccgggtcgggtgaaagtgatgggtcgggttcaccgacttcggatgttatggtgcaggagatgtgccaagagccagagatgccatggaatgaaaatttcatgctcggcaagtgtccttcttatgagatagattgggcttcaattttatcgtgaaaaattaggattcaattcatttttattcattttaacttgtttgtattttcttttaaactttagggttattagctgtgcgtaaaatttgtaatttagcattttgtatgaatgtaatgcaagtgtgtaaattatggacagctcaagcttttttgttcatgccgtaccatgtagacccttcttcttttctcttaattgaaatgaatatggttagtattact

SEQ ID NO: 101016 - protein, 314 aa, Arabidopsis thaliana
  peptide (1)..(314): Ceres Seq. ID no. 13606700
  misc_feature (140)..(204): Pfam Name: AP2 domain Pfam Description: AP2 domain
  misc_feature (1)..(314): Homolog of NCBI NO: 18400001 NR Description: AP2 domain transcription factor, putative
  misc_feature (10)..(314): Homolog of NCBI NO: 6573771 NR Description: F28K19.29 [Arabidopsis thaliana]
  misc_feature (10)..(314): Homolog of NCBI NO: 13877779 NR Description: putative AP2 domain-containing protein
  misc_feature (10)..(314): Homolog of NCBI NO: 15218204 NR Description: AP2 domain transcription factor RAP2.4 thaliana] >gi|23297619|gb|AAN12993.1| putative AP2 domain
  misc_feature (106)..(314): Homolog of NCBI NO: 2281633 NR Description: AP2 domain containing protein RAP2.4 [Arabidopsis
  misc_feature (87)..(312): Homolog of NCBI NO: 27436378 NR Description: dehydration-responsive element binding protein 3
  misc_feature (66)..(313): Homolog of NCBI NO: 15219839 NR Description: AP2 domain transcription factor, putative
  misc_feature (141)..(314): Homolog of NCBI NO: 12324244 NR Description: putative AP2 domain transcriptional regulator, 5'
  misc_feature (119)..(314): Homolog of NCBI NO: 37572971 NR Description: AP2-domain DRE binding factor DBF1 [Oryza sativa
  misc_feature (119)..(314): Homolog of NCBI NO: 21908036 NR Description: DRE binding factor 1 [Zea mays]
MADLFGGGHGGELMEALQPFYKSASTSASNPAFASSNDAFASAPNDLFSSSSYYNPHASLFPSHSTTSYPDIYSGSMTYPSSFGSDLQQPENYQSQFHYQNTITYTHQDNNTCMLNFIEPSQPGFMTQPGPSSGSVSKPAKLYRGVRQRHWGKWVAEIRLPRNRTRLWLGTFDTAEEAALAYDRAAFKLRGDSARLNFPALRYQTGSSPSDTGEYGPIQAAVDAKLEAILAEPKNQPGKTERTSRKRAKAAASSAEQPSAPQQHSGSGESDGSGSPTSDVMVQEMCQEPEMPWNENFMLGKCPSYEIDWASILS

SEQ ID NO: 101017 - protein, 301 aa, Arabidopsis thaliana
  peptide (1)..(301): Ceres Seq. ID no. 13606701
  misc_feature (127)..(191): Pfam Name: AP2 domain Pfam Description: AP2 domain
  misc_feature (1)..(301): Homolog of NCBI NO: 18400001 NR Description: AP2 domain transcription factor, putative
  misc_feature (1)..(301): Homolog of NCBI NO: 6573771 NR Description: F28K19.29 [Arabidopsis thaliana]
  misc_feature (1)..(301): Homolog of NCBI NO: 13877779 NR Description: putative AP2 domain-containing protein
  misc_feature (1)..(301): Homolog of NCBI NO: 15218204 NR Description: AP2 domain transcription factor RAP2.4 thaliana] >gi|23297619|gb|AAN12993.1| putative AP2 domain
  misc_feature (93)..(301): Homolog of NCBI NO: 2281633 NR Description: AP2 domain containing protein RAP2.4 [Arabidopsis
  misc_feature (74)..(299): Homolog of NCBI NO: 27436378 NR Description: dehydration-responsive element binding protein 3
  misc_feature (53)..(300): Homolog of NCBI NO: 15219839 NR Description: AP2 domain transcription factor, putative
  misc_feature (128)..(301): Homolog of NCBI NO: 12324244 NR Description: putative AP2 domain transcriptional regulator, 5'
  misc_feature (106)..(301): Homolog of NCBI NO: 37572971 NR Description: AP2-domain DRE binding factor DBF1 [Oryza sativa
  misc_feature (106)..(301): Homolog of NCBI NO: 21908036 NR Description: DRE binding factor 1 [Zea mays]
MEALQPFYKSASTSASNPAFASSNDAFASAPNDLFSSSSYYNPHASLFPSHSTTSYPDIYSGSMTYPSSFGSDLQQPENYQSQFHYQNTITYTHQDNNTCMLNFIEPSQPGFMTQPGPSSGSVSKPAKLYRGVRQRHWGKWVAEIRLPRNRTRLWLGTFDTAEEAALAYDRAAFKLRGDSARLNFPALRYQTGSSPSDTGEYGPIQAAVDAKLEAILAEPKNQPGKTERTSRKRAKAAASSAEQPSAPQQHSGSGESDGSGSPTSDVMVQEMCQEPEMPWNENFMLGKCPSYEIDWASILS

SEQ ID NO: 101018 - protein, 238 aa, Arabidopsis thaliana
  peptide (1)..(238): Ceres Seq. ID no. 13606702
  misc_feature (64)..(128): Pfam Name: AP2 domain Pfam Description: AP2 domain
  misc_feature (1)..(238): Homolog of NCBI NO: 18400001 NR Description: AP2 domain transcription factor, putative
  misc_feature (1)..(238): Homolog of NCBI NO: 6573771 NR Description: F28K19.29 [Arabidopsis thaliana]
  misc_feature (1)..(238): Homolog of NCBI NO: 13877779 NR Description: putative AP2 domain-containing protein
  misc_feature (1)..(238): Homolog of NCBI NO: 15218204 NR Description: AP2 domain transcription factor RAP2.4 thaliana] >gi|23297619|gb|AAN12993.1| putative AP2 domain
  misc_feature (30)..(238): Homolog of NCBI NO: 2281633 NR Description: AP2 domain containing protein RAP2.4 [Arabidopsis
  misc_feature (11)..(236): Homolog of NCBI NO: 27436378 NR Description: dehydration-responsive element binding protein 3
  misc_feature (1)..(237): Homolog of NCBI NO: 15219839 NR Description: AP2 domain transcription factor, putative
  misc_feature (65)..(238): Homolog of NCBI NO: 12324244 NR Description: putative AP2 domain transcriptional regulator, 5'
  misc_feature (43)..(238): Homolog of NCBI NO: 37572971 NR Description: AP2-domain DRE binding factor DBF1 [Oryza sativa
  misc_feature (43)..(238): Homolog of NCBI NO: 21908036 NR Description: DRE binding factor 1 [Zea mays]
MTYPSSFGSDLQQPENYQSQFHYQNTITYTHQDNNTCMLNFIEPSQPGFMTQPGPSSGSVSKPAKLYRGVRQRHWGKWVAEIRLPRNRTRLWLGTFDTAEEAALAYDRAAFKLRGDSARLNFPALRYQTGSSPSDTGEYGPIQAAVDAKLEAILAEPKNQPGKTERTSRKRAKAAASSAEQPSAPQQHSGSGESDGSGSPTSDVMVQEMCQEPEMPWNENFMLGKCPSYEIDWASILS

SEQ ID NO: 101019 - DNA, 1391 bp, Arabidopsis thaliana
  misc_feature (1)..(1391): Ceres Seq. ID no. 13606707
  misc_feature: MA Experiment ID: 20000180 Result: Up-regulated in Transcription
  misc_feature: MA Experiment 20000180 PARAMETER Experiment Name: At_Germinating_Seeds_P Parameter: Age (hr) Value: 24 vs. 0
  misc_feature: MA Experiment 20000180 PARAMETER Experiment Name: At_Germinating_Seeds_P Parameter: Tissue Value: Germinating Seeds
  misc_feature: MA Experiment ID: 20000184 Result: Up-regulated in Transcription
  misc_feature: MA Experiment 20000184 PARAMETER Experiment Name: At_Shoots__P Parameter: Age (day) Value: 7
  misc_feature: MA Experiment 20000184 PARAMETER Experiment Name: At_Shoots__P Parameter: Tissue Value: Shoots vs. Whole Plant
  misc_feature: MA Experiment ID: 20000286 Result: Down-regulated in Transcription
  misc_feature: MA Experiment 20000286 PARAMETER Experiment Name: At_Open_Flower_P Parameter: Age (day) Value: 21
  misc_feature: MA Experiment 20000286 PARAMETER Experiment Name: At_Open_Flower_P Parameter: Plant Line Value: WS
  misc_feature: MA Experiment 20000286 PARAMETER Experiment Name: At_Open_Flower_P Parameter: Tissue Value: Half Open vs. Whole Plant
  misc_feature: MA Experiment ID: 20000437 Result: Down-regulated in Transcription
  misc_feature: MA Experiment 20000437 PARAMETER Experiment Name: At_Drought_P Parameter: Age (day) Value: 8
  misc_feature: MA Experiment 20000437 PARAMETER Experiment Name: At_Drought_P Parameter: Organism Value: A. thaliana
  misc_feature: MA Experiment 20000437 PARAMETER Experiment Name: At_Drought_P Parameter: Plant Line Value: WS
  misc_feature: MA Experiment 20000437 PARAMETER Experiment Name: At_Drought_P Parameter: Timepoint (hr) Value: 24
  misc_feature: MA Experiment 20000437 PARAMETER Experiment Name: At_Drought_P Parameter: Tissue Value: Whole Plant
  misc_feature: MA Experiment 20000437 PARAMETER Experiment Name: At_Drought_P Parameter: Treatment Value: Drought vs. No Drought
  misc_feature: MA Experiment ID: 20000438 Result: Up-regulated in Transcription
  misc_feature: MA Experiment 20000438 PARAMETER Experiment Name: At_Shoots__P Parameter: Age (day) Value: 14
  misc_feature: MA Experiment 20000438 PARAMETER Experiment Name: At_Shoots__P Parameter: Tissue Value: Shoots vs. Whole Plant
  misc_feature: MA Experiment ID: 20000460 Result: Down-regulated in Transcription
  misc_feature: MA Experiment 20000460 PARAMETER Experiment Name: At_10percent_PEG_P Parameter: Age (day) Value: 12
  misc_feature: MA Experiment 20000460 PARAMETER Experiment Name: At_10percent_PEG_P Parameter: Organism Value: A. thaliana
  misc_feature: MA Experiment 20000460 PARAMETER Experiment Name: At_10percent_PEG_P Parameter: Plant Line Value: WS
  misc_feature: MA Experiment 20000460 PARAMETER Experiment Name: At_10percent_PEG_P Parameter: Timepoint (day) Value: 12
  misc_feature: MA Experiment 20000460 PARAMETER Experiment Name: At_10percent_PEG_P Parameter: Tissue Value: Whole Plant
  misc_feature: MA Experiment 20000460 PARAMETER Experiment Name: At_10percent_PEG_P Parameter: Treatment Value: 10percent PEG vs. No Treatment
  misc_feature: MA Experiment ID: 20000573 Result: Down-regulated in Transcription
  misc_feature: MA Experiment 20000573 PARAMETER Experiment Name: At_100uM_ABA_Mutants__P Parameter: Organism Value: A. thaliana
  misc_feature: MA Experiment 20000573 PARAMETER Experiment Name: At_100uM_ABA_Mutants__P Parameter: Plant Line Value: CS22 vs. Ler wt
  misc_feature: MA Experiment 20000573 PARAMETER Experiment Name: At_100uM_ABA_Mutants__P Parameter: Timepoint (hr) Value: N/A
  misc_feature: MA Experiment 20000573 PARAMETER Experiment Name: At_100uM_ABA_Mutants__P Parameter: Tissue Value: Whole Plant
  misc_feature: MA Experiment 20000573 PARAMETER Experiment Name: At_100uM_ABA_Mutants__P Parameter: Treatment Value: None
  misc_feature: MA Experiment ID: 20000574 Result: Down-regulated in Transcription
  misc_feature: MA Experiment 20000574 PARAMETER Experiment Name: At_100uM_ABA_Mutants__P Parameter: Organism Value: A. thaliana
  misc_feature: MA Experiment 20000574 PARAMETER Experiment Name: At_100uM_ABA_Mutants__P Parameter: Plant Line Value: CS23 vs. Ler wt
  misc_feature: MA Experiment 20000574 PARAMETER Experiment Name: At_100uM_ABA_Mutants__P Parameter: Timepoint (hr) Value: N/A
  misc_feature: MA Experiment 20000574 PARAMETER Experiment Name: At_100uM_ABA_Mutants__P Parameter: Tissue Value: Whole Plant
  misc_feature: MA Experiment 20000574 PARAMETER Experiment Name: At_100uM_ABA_Mutants__P Parameter: Treatment Value: None
  misc_feature: MA Experiment ID: 20000794 Result: Down-regulated in Transcription
  misc_feature: MA Experiment 20000794 PARAMETER Experiment Name: At_Petals_P Parameter: Age (day) Value: 23-25 days
  misc_feature: MA Experiment 20000794 PARAMETER Experiment Name: At_Petals_P Parameter: Plant Line Value: WS
  misc_feature: MA Experiment 20000794 PARAMETER Experiment Name: At_Petals_P Parameter: Tissue Value: Petals vs. Whole plant
  misc_feature: MA Experiment ID: 20001248 Result: Down-regulated in Transcription
  misc_feature: MA Experiment 20001248 PARAMETER Experiment Name: At_Far-red-induction_P Parameter: Age (day) Value: 7
  misc_feature: MA Experiment 20001248 PARAMETER Experiment Name: At_Far-red-induction_P Parameter: Light Value: Far-red vs. White
  misc_feature: MA Experiment 20001248 PARAMETER Experiment Name: At_Far-red-induction_P Parameter: Organism Value: A. thaliana
  misc_feature: MA Experiment 20001248 PARAMETER Experiment Name: At_Far-red-induction_P Parameter: Plant Line Value: Columbia
  misc_feature: MA Experiment 20001248 PARAMETER Experiment Name: At_Far-red-induction_P Parameter: Timepoint (hr) Value: 4
  misc_feature: MA Experiment 20001248 PARAMETER Experiment Name: At_Far-red-induction_P Parameter: Tissue Value: Whole Plant
  misc_feature: MA Experiment ID: 20001450 Result: Down-regulated in Transcription
  misc_feature: MA Experiment 20001450 PARAMETER Experiment Name: At_Far-red-induction_P Parameter: Age (day) Value: 7
  misc_feature: MA Experiment 20001450 PARAMETER Experiment Name: At_Far-red-induction_P Parameter: Light Value: Far-red vs. White
  misc_feature: MA Experiment 20001450 PARAMETER Experiment Name: At_Far-red-induction_P Parameter: Organism Value: A. thaliana
  misc_feature: MA Experiment 20001450 PARAMETER Experiment Name: At_Far-red-induction_P Parameter: Plant Line Value: Columbia
  misc_feature: MA Experiment 20001450 PARAMETER Experiment Name: At_Far-red-induction_P Parameter: Timepoint (hr) Value: 8
  misc_feature: MA Experiment 20001450 PARAMETER Experiment Name: At_Far-red-induction_P Parameter: Tissue Value: Whole Plant
  misc_feature: MA Experiment ID: 20001451 Result: Down-regulated in Transcription
  misc_feature: MA Experiment 20001451 PARAMETER Experiment Name: At_Far-red-induction_P Parameter: Age (day) Value: 7
  misc_feature: MA Experiment 20001451 PARAMETER Experiment Name: At_Far-red-induction_P Parameter: Light Value: Far-red vs. White
  misc_feature: MA Experiment 20001451 PARAMETER Experiment Name: At_Far-red-induction_P Parameter: Organism Value: A. thaliana
  misc_feature: MA Experiment 20001451 PARAMETER Experiment Name: At_Far-red-induction_P Parameter: Plant Line Value: Columbia
  misc_feature: MA Experiment 20001451 PARAMETER Experiment Name: At_Far-red-induction_P Parameter: Timepoint (hr) Value: 24
  misc_feature: MA Experiment 20001451 PARAMETER Experiment Name: At_Far-red-induction_P Parameter: Tissue Value: Whole Plant
  misc_feature: MA Experiment ID: 20001555 Result: Down-regulated in Transcription
  misc_feature: MA Experiment 20001555 PARAMETER Experiment Name: At_Drought_Soil_Dry_P Parameter: Age (day) Value: 24
  misc_feature: MA Experiment 20001555 PARAMETER Experiment Name: At_Drought_Soil_Dry_P Parameter: Organism Value: A. thaliana
  misc_feature: MA Experiment 20001555 PARAMETER Experiment Name: At_Drought_Soil_Dry_P Parameter: Plant Line Value: WS
  misc_feature: MA Experiment 20001555 PARAMETER Experiment Name: At_Drought_Soil_Dry_P Parameter: Post Timepoint (hr) Value: None
  misc_feature: MA Experiment 20001555 PARAMETER Experiment Name: At_Drought_Soil_Dry_P Parameter: Post-Treatment Value: None
  misc_feature: MA Experiment 20001555 PARAMETER Experiment Name: At_Drought_Soil_Dry_P Parameter: Timepoint (day) Value: 10
  misc_feature: MA Experiment 20001555 PARAMETER Experiment Name: At_Drought_Soil_Dry_P Parameter: Treatment Value: Drought vs. No Drought
aataatggcctcatctcttgcattattcagtgatccaaaaagactttaaaaattgagtgacaaagacgaacgaagaccacgattagctcttcccatggcttcttcactgaagaagcttatctcaagctttctacttgtcttatactccaccaccatcattgttgcttcatcagaatctcgatgtaggcgttttaaatcgatcatcagctttggtgattccatcgcagacaccggaaattatctccatctctctgatgtcaatcaccttcctcaatccgcctttcttccttatggcgaaagcttcttccatcctccctccggtcgtgcctctaatggccgtctcatcatcgacttcattgccgaattcttgggactaccatacgtaccgccttactttggatcccaaaacgttagcttcgaacaagggatcaattttgcggtgtatggagcaaccgcattggaccgagcgtttcttttgggaaaaggaattgaatctgatttcaccaatgttagtttaagtgttcagcttgacaccttcaagcagattttgcctaacttatgcgcctcgtctactcgtgattgcaaagagatgcttggagactcgctgatactcatgggagagattggaggaaacgactataattacccattttttgaaggaaaaagtatcaatgaaatcaaagagcttgttcctctaatcgtcaaagctatttcttctgctattgtggatttgattgatttagggggcaaaacatttttggtacccggaggcttcccaacaggatgttctgcggcgtatcttactctatttcagaccgtggcagaaaaagaccaggaccctttaacaggttgttacccattgctcaacgaatttggcgagcaccacaacgaacagctaaagacagaactcaagcgactccaaaaattctatcctcatgtcaacatcatttacgctgactaccacaactccttataccggttttatcaagaaccagctaaatacgggtttaagaacaaacctttagctgcttgctgtggagtcggaggtaaatacaacttcactattggtaaggagtgtggatacgaaggagttaactattgtcaaaatccttctgagtatgtgaactgggatggttatcatttaaccgaagccgcctaccagaagatgactgagggtatactcaacggtccctatgcaactcctgctttcgactggtcctgccttggctctggtacagtggatacataaagggtattctttcagcagtaagaattcattcgttgtaaaaaatcaaagaggaagaaaattatgtgatgatgatgatgatgatgatgattaacaaaaacattgcttgtacggcaagacttgactaatgacaaaacttccgaag

SEQ ID NO: 101020 - protein, 384 aa, Arabidopsis thaliana
  peptide (1)..(384): Ceres Seq. ID no. 13606708
  misc_feature (36)..(362): Pfam Name: GDSL-like Lipase/Acylhydrolase Pfam Description: GDSL-like Lipase/Acylhydrolase
  misc_feature (1)..(384): Homolog of NCBI NO: 15218756 NR Description: lipase [Arabidopsis thaliana]
  misc_feature (1)..(381): Homolog of NCBI NO: 10764854 NR Description: F1K23.13 [Arabidopsis thaliana]
  misc_feature (1)..(384): Homolog of NCBI NO: 18396873 NR Description: lipase, putative [Arabidopsis thaliana] unknown protein [Arabidopsis thaliana]
  misc_feature (1)..(384): Homolog of NCBI NO: 30690523 NR Description: lipase, putative [Arabidopsis thaliana]
  misc_feature (1)..(383): Homolog of NCBI NO: 10764854 NR Description: F1K23.13 [Arabidopsis thaliana]
  misc_feature (1)..(383): Homolog of NCBI NO: 15218751 NR Description: lipase, putative [Arabidopsis thaliana]
  misc_feature (5)..(379): Homolog of NCBI NO: 15218753 NR Description: lipase, putative [Arabidopsis thaliana]
  misc_feature (26)..(364): Homolog of NCBI NO: 10764854 NR Description: F1K23.13 [Arabidopsis thaliana]
  misc_feature (217)..(379): Homolog of NCBI NO: 10764854 NR Description: F1K23.13 [Arabidopsis thaliana]
  misc_feature (44)..(179): Homolog of NCBI NO: 10764854 NR Description: F1K23.13 [Arabidopsis thaliana]
MASSLKKLISSFLLVLYSTTIIVASSESRCRRFKSIISFGDSIADTGNYLHLSDVNHLPQSAFLPYGESFFHPPSGRASNGRLIIDFIAEFLGLPYVPPYFGSQNVSFEQGINFAVYGATALDRAFLLGKGIESDFTNVSLSVQLDTFKQILPNLCASSTRDCKEMLGDSLILMGEIGGNDYNYPFFEGKSINEIKELVPLIVKAISSAIVDLIDLGGKTFLVPGGFPTGCSAAYLTLFQTVAEKDQDPLTGCYPLLNEFGEHHNEQLKTELKRLQKFYPHVNIIYADYHNSLYRFYQEPAKYGFKNKPLAACCGVGGKYNFTIGKECGYEGVNYCQNPSEYVNWDGYHLTEAAYQKMTEGILNGPYATPAFDWSCLGSGTVDT

SEQ ID NO: 101021 - protein, 219 aa, Arabidopsis thaliana
  peptide (1)..(219): Ceres Seq. ID no. 13606709
  misc_feature (1)..(197): Pfam Name: GDSL-like Lipase/Acylhydrolase Pfam Description: GDSL-like Lipase/Acylhydrolase
  misc_feature (1)..(219): Homolog of NCBI NO: 15218756 NR Description: lipase [Arabidopsis thaliana]
  misc_feature (1)..(216): Homolog of NCBI NO: 10764854 NR Description: F1K23.13 [Arabidopsis thaliana]
  misc_feature (1)..(219): Homolog of NCBI NO: 18396873 NR Description: lipase, putative [Arabidopsis thaliana] unknown protein [Arabidopsis thaliana]
  misc_feature (1)..(219): Homolog of NCBI NO: 30690523 NR Description: lipase, putative [Arabidopsis thaliana]
  misc_feature (1)..(218): Homolog of NCBI NO: 10764854 NR Description: F1K23.13 [Arabidopsis thaliana]
  misc_feature (1)..(218): Homolog of NCBI NO: 15218751 NR Description: lipase, putative [Arabidopsis thaliana]
  misc_feature (1)..(214): Homolog of NCBI NO: 15218753 NR Description: lipase, putative [Arabidopsis thaliana]
  misc_feature (1)..(199): Homolog of NCBI NO: 10764854 NR Description: F1K23.13 [Arabidopsis thaliana]
  misc_feature (52)..(214): Homolog of NCBI NO: 10764854 NR Description: F1K23.13 [Arabidopsis thaliana]
  misc_feature (1)..(14): Homolog of NCBI NO: 10764854 NR Description: F1K23.13 [Arabidopsis thaliana]
MLGDSLILMGEIGGNDYNYPFFEGKSINEIKELVPLIVKAISSAIVDLIDLGGKTFLVPGGFPTGCSAAYLTLFQTVAEKDQDPLTGCYPLLNEFGEHHNEQLKTELKRLQKFYPHVNIIYADYHNSLYRFYQEPAKYGFKNKPLAACCGVGGKYNFTIGKECGYEGVNYCQNPSEYVNWDGYHLTEAAYQKMTEGILNGPYATPAFDWSCLGSGTVDT

SEQ ID NO: 101022 - protein, 211 aa, Arabidopsis thaliana
  peptide (1)..(211): Ceres Seq. ID no. 13606710
  misc_feature (1)..(189): Pfam Name: GDSL-like Lipase/Acylhydrolase Pfam Description: GDSL-like Lipase/Acylhydrolase
  misc_feature (1)..(211): Homolog of NCBI NO: 15218756 NR Description: lipase [Arabidopsis thaliana]
  misc_feature (1)..(208): Homolog of NCBI NO: 10764854 NR Description: F1K23.13 [Arabidopsis thaliana]
  misc_feature (1)..(211): Homolog of NCBI NO: 18396873 NR Description: lipase, putative [Arabidopsis thaliana] unknown protein [Arabidopsis thaliana]
  misc_feature (1)..(211): Homolog of NCBI NO: 30690523 NR Description: lipase, putative [Arabidopsis thaliana]
  misc_feature (1)..(210): Homolog of NCBI NO: 10764854 NR Description: F1K23.13 [Arabidopsis thaliana]
  misc_feature (1)..(210): Homolog of NCBI NO: 15218751 NR Description: lipase, putative [Arabidopsis thaliana]
  misc_feature (1)..(206): Homolog of NCBI NO: 15218753 NR Description: lipase, putative [Arabidopsis thaliana]
  misc_feature (1)..(191): Homolog of NCBI NO: 10764854 NR Description: F1K23.13 [Arabidopsis thaliana]
  misc_feature (44)..(206): Homolog of NCBI NO: 10764854 NR Description: F1K23.13 [Arabidopsis thaliana]
  misc_feature (1)..(207): Homolog of NCBI NO: 15218725 NR Description: lipase, putative [Arabidopsis thaliana]
MGEIGGNDYNYPFFEGKSINEIKELVPLIVKAISSAIVDLIDLGGKTFLVPGGFPTGCSAAYLTLFQTVAEKDQDPLTGCYPLLNEFGEHHNEQLKTELKRLQKFYPHVNIIYADYHNSLYRFYQEPAKYGFKNKPLAACCGVGGKYNFTIGKECGYEGVNYCQNPSEYVNWDGYHLTEAAYQKMTEGILNGPYATPAFDWSCLGSGTVDT

SEQ ID NO: 101023 - DNA, 1348 bp, Arabidopsis thaliana
  misc_feature (1)..(1348): Ceres Seq. ID no. 13606711
  misc_feature: MA Experiment ID: 108462 Result: Up-regulated in Transcription
  misc_feature: MA Experiment 108462 PARAMETER Experiment Name: At_Germinating_Seeds_cDNA_P Parameter: Age (day) Value: 2 vs. 0
  misc_feature: MA Experiment 108462 PARAMETER Experiment Name: At_Germinating_Seeds_cDNA_P Parameter: Tissue Value: Germinating Seeds
  misc_feature: MA Experiment ID: 108469 Result: Up-regulated in Transcription
  misc_feature: MA Experiment ID: 108576 Result: Down-regulated in Transcription
  misc_feature: MA Experiment 108576 PARAMETER Experiment Name: At_42deg_Heat_cDNA_P Parameter: Temperature (deg C) Value: 42 vs. 22
  misc_feature: MA Experiment 108576 PARAMETER Experiment Name: At_42deg_Heat_cDNA_P Parameter: Timepoint (hr) Value: 1
  misc_feature: MA Experiment 108576 PARAMETER Experiment Name: At_42deg_Heat_cDNA_P Parameter: Tissue Value: Aerial
  misc_feature: MA Experiment ID: 108595 Result: Down-regulated in Transcription
  misc_feature: MA Experiment 108595 PARAMETER Experiment Name: At_Ler-pi_Ovule_cDNA_P Parameter: Plant Line Value: null
  misc_feature: MA Experiment ID: 20000090 Result: Up-regulated in Transcription
  misc_feature: MA Experiment ID: 20000111 Result: Down-regulated in Transcription
  misc_feature: MA Experiment 20000111 PARAMETER Experiment Name: At_42deg_Heat_cDNA_P Parameter: Temperature (deg C) Value: 42 vs. 22
  misc_feature: MA Experiment 20000111 PARAMETER Experiment Name: At_42deg_Heat_cDNA_P Parameter: Timepoint (hr) Value: 6
  misc_feature: MA Experiment 20000111 PARAMETER Experiment Name: At_42deg_Heat_cDNA_P Parameter: Tissue Value: Aerial
  misc_feature: MA Experiment ID: 20000113 Result: Down-regulated in Transcription
  misc_feature: MA Experiment 20000113 PARAMETER Experiment Name: At_42deg_Heat_cDNA_P Parameter: Temperature (deg C) Value: 42 vs. 22
  misc_feature: MA Experiment 20000113 PARAMETER Experiment Name: At_42deg_Heat_cDNA_P Parameter: Timepoint (hr) Value: 8
  misc_feature: MA Experiment 20000113 PARAMETER Experiment Name: At_42deg_Heat_cDNA_P Parameter: Tissue Value: Aerial
  misc_feature: MA Experiment ID: 20000182 Result: Up-regulated in Transcription
  misc_feature: MA Experiment 20000182 PARAMETER Experiment Name: At_2mM_SA_P Parameter: Age (day) Value: 14
  misc_feature: MA Experiment 20000182 PARAMETER Experiment Name: At_2mM_SA_P Parameter: Organism Value: A. thaliana
  misc_feature: MA Experiment 20000182 PARAMETER Experiment Name: At_2mM_SA_P Parameter: Plant Line Value: WS
  misc_feature: MA Experiment 20000182 PARAMETER Experiment Name: At_2mM_SA_P Parameter: Timepoint (hr) Value: 6
  misc_feature: MA Experiment 20000182 PARAMETER Experiment Name: At_2mM_SA_P Parameter: Tissue Value: Aerial
  misc_feature: MA Experiment 20000182 PARAMETER Experiment Name: At_2mM_SA_P Parameter: Treatment Value: 2mM SA vs. No Treatment
  misc_feature: MA Experiment ID: 20000184 Result: Down-regulated in Transcription
  misc_feature: MA Experiment 20000184 PARAMETER Experiment Name: At_Shoots__P Parameter: Age (day) Value: 7
  misc_feature: MA Experiment 20000184 PARAMETER Experiment Name: At_Shoots__P Parameter: Tissue Value: Shoots vs. Whole Plant
  misc_feature: MA Experiment ID: 20000185 Result: Down-regulated in Transcription
  misc_feature: MA Experiment 20000185 PARAMETER Experiment Name: At_Roots__P Parameter: Age (day) Value: 7 vs. 21
  misc_feature: MA Experiment 20000185 PARAMETER Experiment Name: At_Roots__P Parameter: Organism Value: A. thaliana
  misc_feature: MA Experiment 20000185 PARAMETER Experiment Name: At_Roots__P Parameter: Tissue Value: Roots vs. Whole Plant
  misc_feature: MA Experiment ID: 20000234 Result: Down-regulated in Transcription
  misc_feature: MA Experiment 20000234 PARAMETER Experiment Name: At_Siliques_P Parameter: Age (day) Value: 21
  misc_feature: MA Experiment 20000234 PARAMETER Experiment Name: At_Siliques_P Parameter: Organism Value: A. thaliana
  misc_feature: MA Experiment 20000234 PARAMETER Experiment Name: At_Siliques_P Parameter: Plant Line Value: WS
  misc_feature: MA Experiment 20000234 PARAMETER Experiment Name: At_Siliques_P Parameter: Tissue Value: Less Than 5mm Siliques vs. Whole Plant
  misc_feature: MA Experiment ID: 20000264 Result: Down-regulated in Transcription
  misc_feature: MA Experiment 20000264 PARAMETER Experiment Name: At_Open_Flower_P Parameter: Age (day) Value: 21
  misc_feature: MA Experiment 20000264 PARAMETER Experiment Name: At_Open_Flower_P Parameter: Plant Line Value: WS
  misc_feature: MA Experiment 20000264 PARAMETER Experiment Name: At_Open_Flower_P Parameter: Tissue Value: Open Flower vs. Whole Plant
  misc_feature: MA Experiment ID: 20000265 Result: Down-regulated in Transcription
  misc_feature: MA Experiment 20000265 PARAMETER Experiment Name: At_Open_Flower_P Parameter: Age (day) Value: 21
  misc_feature: MA Experiment 20000265 PARAMETER Experiment Name: At_Open_Flower_P Parameter: Plant Line Value: WS
  misc_feature: MA Experiment 20000265 PARAMETER Experiment Name: At_Open_Flower_P Parameter: Tissue Value: Closed Flower vs. Whole Plant
  misc_feature: MA Experiment ID: 20000286 Result: Down-regulated in Transcription
  misc_feature: MA Experiment 20000286 PARAMETER Experiment Name: At_Open_Flower_P Parameter: Age (day) Value: 21
  misc_feature: MA Experiment 20000286 PARAMETER Experiment Name: At_Open_Flower_P Parameter: Plant Line Value: WS
  misc_feature: MA Experiment 20000286 PARAMETER Experiment Name: At_Open_Flower_P Parameter: Tissue Value: Half Open vs. Whole Plant
  misc_feature: MA Experiment ID: 20000439 Result: Down-regulated in Transcription
  misc_feature: MA Experiment 20000439 PARAMETER Experiment Name: At_Roots__P Parameter: Age (day) Value: 14 vs. 21
  misc_feature: MA Experiment 20000439 PARAMETER Experiment Name: At_Roots__P Parameter: Organism Value: A. thaliana
  misc_feature: MA Experiment 20000439 PARAMETER Experiment Name: At_Roots__P Parameter: Tissue Value: Roots vs. Whole Plant
  misc_feature: MA Experiment ID: 20000794 Result: Down-regulated in Transcription
  misc_feature: MA Experiment 20000794 PARAMETER Experiment Name: At_Petals_P Parameter: Age (day) Value: 23-25 days
  misc_feature: MA Experiment 20000794 PARAMETER Experiment Name: At_Petals_P Parameter: Plant Line Value: WS
  misc_feature: MA Experiment 20000794 PARAMETER Experiment Name: At_Petals_P Parameter: Tissue Value: Petals vs. Whole plant
  misc_feature: MA Experiment ID: 20001555 Result: Down-regulated in Transcription
  misc_feature: MA Experiment 20001555 PARAMETER Experiment Name: At_Drought_Soil_Dry_P Parameter: Age (day) Value: 24
  misc_feature: MA Experiment 20001555 PARAMETER Experiment Name: At_Drought_Soil_Dry_P Parameter: Organism Value: A. thaliana
  misc_feature: MA Experiment 20001555 PARAMETER Experiment Name: At_Drought_Soil_Dry_P Parameter: Plant Line Value: WS
  misc_feature: MA Experiment 20001555 PARAMETER Experiment Name: At_Drought_Soil_Dry_P Parameter: Post Timepoint (hr) Value: None
  misc_feature: MA Experiment 20001555 PARAMETER Experiment Name: At_Drought_Soil_Dry_P Parameter: Post-Treatment Value: None
  misc_feature: MA Experiment 20001555 PARAMETER Experiment Name: At_Drought_Soil_Dry_P Parameter: Timepoint (day) Value: 10
  misc_feature: MA Experiment 20001555 PARAMETER Experiment Name: At_Drought_Soil_Dry_P Parameter: Treatment Value: Drought vs. No Drought
  misc_feature: MA Experiment ID: 20001557 Result: Down-regulated in Transcription
  misc_feature: MA Experiment 20001557 PARAMETER Experiment Name: At_Drought_Soil_Dry_P Parameter: Age (day) Value: 27
  misc_feature: MA Experiment 20001557 PARAMETER Experiment Name: At_Drought_Soil_Dry_P Parameter: Organism Value: A. thaliana
  misc_feature: MA Experiment 20001557 PARAMETER Experiment Name: At_Drought_Soil_Dry_P Parameter: Plant Line Value: WS
  misc_feature: MA Experiment 20001557 PARAMETER Experiment Name: At_Drought_Soil_Dry_P Parameter: Post Timepoint (hr) Value: 3
  misc_feature: MA Experiment 20001557 PARAMETER Experiment Name: At_Drought_Soil_Dry_P Parameter: Post-Treatment Value: Re-Water vs. No Drought
  misc_feature: MA Experiment 20001557 PARAMETER Experiment Name: At_Drought_Soil_Dry_P Parameter: Timepoint (day) Value: 13
  misc_feature: MA Experiment 20001557 PARAMETER Experiment Name: At_Drought_Soil_Dry_P Parameter: Treatment Value: Drought vs. No Drought
cgacggttcgtcattcttcctctaagctttatctttctgatctctgaccttgtgtctctgtgcatgtgtgtttatctgctactgtgttttgtcggtttgatctccaaaaaccagacatgaacagaggaagcttatgccctaatcccatctgtctccctcctcttgagcaatccatctccaaattcttaacacagagtggaacgtttaaagatggagatcttcgagtgaacaaagatggaatccagaccgtgtctctgtccgaaccaggagctccacctcctattgagccattggacaaccaattgagtttggcagatttagaagtgatcaaagtcattggcaaaggaagtagtggtaatgtccagttggtcaaacacaaactcactcaacagtttttcgctcttaaggtcattcaattgaacacagaagaatcaacatgtcgggcgatttctcaggagctgagaataaacttgagctcgcaatgtccatatcttgtctcatgttatcaatctttctaccacaacggtcttgtttcaatcatattggaattcatggatggtggatcccttgcagacttgttaaagaaagtcggaaaagttcctgaaaacatgctatctgccatctgcaagcgagttcttcgaggtctttgttatattcatcatgagaggcgaatcattcatcgggacttaaagccttcaaacttgctaatcaatcatagaggtgaagtcaagatcacagactttggtgtcagcaagatcttgacaagcacaagtagtcttgctaattctttcgtgggcacatacccttatatgtctccagagagaatcagcgggagtttgtacagtaacaagagcgatatttggagcttgggactggttttgctcgaatgtgcaacgggtaaattcccgtatactcctccagaacacaagaaaggatggagtagcgtgtacgagcttgtggacgccattgttgaaaacccgcctccttgtgcaccttccaatctcttttctccagagttttgctccttcatctcgcaatgtgtacaaaaagatccaagggacagaaaatcagcaaaggagcttctggaacacaagttcgtaaagatgtttgaagattcggatacaaatctctcggcttacttcaccgacgcaggatctttgattcccccacttgctaactagaaccgagtttgaacaatcttttaacctccaagttattatttcatatccactagaagagattttatgaaagataaatttacgagatgttatgacttaagagacttgtctacaaaatttgatttaatgtgtgtacttttcacatcactattataaacacaactatcatc

SEQ ID NO: 101024 - protein, 354 aa, Arabidopsis thaliana; identical to SEQ ID NO: 21698
  peptide (1)..(354): Ceres Seq. ID no. 13606712
  misc_feature (68)..(328): Pfam Name: Protein kinase domain Pfam Description: Protein kinase domain
  misc_feature (1)..(354): Homolog of NCBI NO: 15236108 NR Description: mitogen-activated protein kinase kinase
  misc_feature (1)..(307): Homolog of NCBI NO: 30687096 NR Description: mitogen-activated protein kinase kinase [Arabidopsis thaliana] >gi|15292681|gb|AAK92709.1| putative
  misc_feature (1)..(353): Homolog of NCBI NO: 37625027 NR Description: putative mitogen-activated protein kinase kinase
  misc_feature (1)..(353): Homolog of NCBI NO: 9843771 NR Description: MAP kinase kinase [Lycopersicon esculentum]
  misc_feature (1)..(353): Homolog of NCBI NO: 7434316 NR Description: protein kinase MEK1 - tomato
  misc_feature (1)..(354): Homolog of NCBI NO: 15233715 NR Description: mitogen-activated protein kinase kinase
  misc_feature (1)..(354): Homolog of NCBI NO: 11259772 NR Description: mitogen-activated protein kinase kinase (EC
  misc_feature (1)..(353): Homolog of NCBI NO: 15528441 NR Description: MAP kinase kinase [Medicago sativa subsp. x varia]
  misc_feature (1)..(353): Homolog of NCBI NO: 7682432 NR Description: MAP kinase kinase [Nicotiana tabacum]
  misc_feature (11)..(352): Homolog of NCBI NO: 7434320 NR Description: protein kinase MEK1 (EC 2.7.1.-) - maize

SEQ ID NO: 101025 - protein, 209 aa, Arabidopsis thaliana; identical to SEQ ID NO: 21699
  peptide (1)..(209): Ceres Seq. ID no. 13606713
  misc_feature (1)..(183): Pfam Name: Protein kinase domain Pfam Description: Protein kinase domain
  misc_feature (1)..(209): Homolog of NCBI NO: 15236108 NR Description: mitogen-activated protein kinase kinase
  misc_feature (1)..(162): Homolog of NCBI NO: 30687096 NR Description: mitogen-activated protein kinase kinase [Arabidopsis thaliana] >gi|15292681|gb|AAK92709.1| putative
  misc_feature (1)..(208): Homolog of NCBI NO: 37625027 NR Description: putative mitogen-activated protein kinase kinase
  misc_feature (1)..(208): Homolog of NCBI NO: 9843771 NR Description: MAP kinase kinase [Lycopersicon esculentum]
  misc_feature (1)..(208): Homolog of NCBI NO: 7434316 NR Description: protein kinase MEK1 - tomato
  misc_feature (1)..(209): Homolog of NCBI NO: 15233715 NR Description: mitogen-activated protein kinase kinase
  misc_feature (1)..(209): Homolog of NCBI NO: 11259772 NR Description: mitogen-activated protein kinase kinase (EC
  misc_feature (1)..(208): Homolog of NCBI NO: 15528441 NR Description: MAP kinase kinase [Medicago sativa subsp. x varia]
  misc_feature (1)..(208): Homolog of NCBI NO: 7682432 NR Description: MAP kinase kinase [Nicotiana tabacum]
  misc_feature (1)..(207): Homolog of NCBI NO: 7434320 NR Description: protein kinase MEK1 (EC 2.7.1.-) - maize

SEQ ID NO: 101026 - protein, 190 aa, Arabidopsis thaliana; identical to SEQ ID NO: 21700
  peptide (1)..(190): Ceres Seq. ID no. 13606714
  misc_feature (1)..(164): Pfam Name: Protein kinase domain Pfam Description: Protein kinase domain
  misc_feature (1)..(190): Homolog of NCBI NO: 15236108 NR Description: mitogen-activated protein kinase kinase
  misc_feature (1)..(143): Homolog of NCBI NO: 30687096 NR Description: mitogen-activated protein kinase kinase [Arabidopsis thaliana] >gi|15292681|gb|AAK92709.1| putative
  misc_feature (1)..(189): Homolog of NCBI NO: 37625027 NR Description: putative mitogen-activated protein kinase kinase
  misc_feature (1)..(189): Homolog of NCBI NO: 9843771 NR Description: MAP kinase kinase [Lycopersicon esculentum]
  misc_feature (1)..(189): Homolog of NCBI NO: 7434316 NR Description: protein kinase MEK1 - tomato
  misc_feature (1)..(190): Homolog of NCBI NO: 15233715 NR Description: mitogen-activated protein kinase kinase
  misc_feature (1)..(190): Homolog of NCBI NO: 11259772 NR Description: mitogen-activated protein kinase kinase (EC
  misc_feature (1)..(189): Homolog of NCBI NO: 15528441 NR Description: MAP kinase kinase [Medicago sativa subsp. x varia]
  misc_feature (1)..(189): Homolog of NCBI NO: 7682432 NR Description: MAP kinase kinase [Nicotiana tabacum]
  misc_feature (1)..(188): Homolog of NCBI NO: 7434320 NR Description: protein kinase MEK1 (EC 2.7.1.-) - maize

SEQ ID NO: 101027 - DNA, 1342 bp, Arabidopsis thaliana
  misc_feature (1)..(1342): Ceres Seq. ID no. 13606727
  misc_feature: MA Experiment ID: 20000185 Result: Up-regulated in Transcription
  misc_feature: MA Experiment 20000185 PARAMETER Experiment Name: At_Roots__P Parameter: Age (day) Value: 7 vs. 21
  misc_feature: MA Experiment 20000185 PARAMETER Experiment Name: At_Roots__P Parameter: Organism Value: A. thaliana
  misc_feature: MA Experiment 20000185 PARAMETER Experiment Name: At_Roots__P Parameter: Tissue Value: Roots vs. Whole Plant
  misc_feature: MA Experiment ID: 20000234 Result: Down-regulated in Transcription
  misc_feature: MA Experiment 20000234 PARAMETER Experiment Name: At_Siliques_P Parameter: Age (day) Value: 21
  misc_feature: MA Experiment 20000234 PARAMETER Experiment Name: At_Siliques_P Parameter: Organism Value: A. thaliana
  misc_feature: MA Experiment 20000234 PARAMETER Experiment Name: At_Siliques_P Parameter: Plant Line Value: WS
  misc_feature: MA Experiment 20000234 PARAMETER Experiment Name: At_Siliques_P Parameter: Tissue Value: Less Than 5mm Siliques vs. Whole Plant
  misc_feature: MA Experiment ID: 20000235 Result: Down-regulated in Transcription
  misc_feature: MA Experiment 20000235 PARAMETER Experiment Name: At_Siliques_P Parameter: Age (day) Value: 21
  misc_feature: MA Experiment 20000235 PARAMETER Experiment Name: At_Siliques_P Parameter: Organism Value: A. thaliana
  misc_feature: MA Experiment 20000235 PARAMETER Experiment Name: At_Siliques_P Parameter: Plant Line Value: WS
  misc_feature: MA Experiment 20000235 PARAMETER Experiment Name: At_Siliques_P Parameter: Tissue Value: 5-10mm Siliques vs. Whole Plant
  misc_feature: MA Experiment ID: 20000265 Result: Down-regulated in Transcription
  misc_feature: MA Experiment 20000265 PARAMETER Experiment Name: At_Open_Flower_P Parameter: Age (day) Value: 21
  misc_feature: MA Experiment 20000265 PARAMETER Experiment Name: At_Open_Flower_P Parameter: Plant Line Value: WS
  misc_feature: MA Experiment 20000265 PARAMETER Experiment Name: At_Open_Flower_P Parameter: Tissue Value: Closed Flower vs. Whole Plant
  misc_feature: MA Experiment ID: 20000286 Result: Down-regulated in Transcription
  misc_feature: MA Experiment 20000286 PARAMETER Experiment Name: At_Open_Flower_P Parameter: Age (day) Value: 21
  misc_feature: MA Experiment 20000286 PARAMETER Experiment Name: At_Open_Flower_P Parameter: Plant Line Value: WS
  misc_feature: MA Experiment 20000286 PARAMETER Experiment Name: At_Open_Flower_P Parameter: Tissue Value: Half Open vs. Whole Plant
  misc_feature: MA Experiment ID: 20000438 Result: Down-regulated in Transcription
  misc_feature: MA Experiment 20000438 PARAMETER Experiment Name: At_Shoots__P Parameter: Age (day) Value: 14
  misc_feature: MA Experiment 20000438 PARAMETER Experiment Name: At_Shoots__P Parameter: Tissue Value: Shoots vs. Whole Plant
  misc_feature: MA Experiment ID: 20000441 Result: Up-regulated in Transcription
  misc_feature: MA Experiment 20000441 PARAMETER Experiment Name: At_1uM_BR-BRZ__P Parameter: Tissue Value: Shoot Apices
  misc_feature: MA Experiment 20000441 PARAMETER Experiment Name: At_1uM_BR-BRZ__P Parameter: Treatment Value: 1uM BR vs. No Treatment
  misc_feature: MA Experiment ID: 20000443 Result: Up-regulated in Transcription
  misc_feature: MA Experiment 20000443 PARAMETER Experiment Name: At_1uM_BR-BRZ__P Parameter: Tissue Value: Shoot Apices
  misc_feature: MA Experiment 20000443 PARAMETER Experiment Name: At_1uM_BR-BRZ__P Parameter: Treatment Value: 1uM BRZ vs. No Treatment
  misc_feature: MA Experiment ID: 20000794 Result: Down-regulated in Transcription
  misc_feature: MA Experiment 20000794 PARAMETER Experiment Name: At_Petals_P Parameter: Age (day) Value: 23-25 days
  misc_feature: MA Experiment 20000794 PARAMETER Experiment Name: At_Petals_P Parameter: Plant Line Value: WS
  misc_feature: MA Experiment 20000794 PARAMETER Experiment Name: At_Petals_P Parameter: Tissue Value: Petals vs. Whole plant
  misc_feature: MA Experiment ID: 20001247 Result: Up-regulated in Transcription
  misc_feature: MA Experiment 20001247 PARAMETER Experiment Name: At_Far-red-induction_P Parameter: Age (day) Value: 7
  misc_feature: MA Experiment 20001247 PARAMETER Experiment Name: At_Far-red-induction_P Parameter: Light Value: Far-red vs. White
  misc_feature: MA Experiment 20001247 PARAMETER Experiment Name: At_Far-red-induction_P Parameter: Organism Value: A. thaliana
  misc_feature: MA Experiment 20001247 PARAMETER Experiment Name: At_Far-red-induction_P Parameter: Plant Line Value: Columbia
  misc_feature: MA Experiment 20001247 PARAMETER Experiment Name: At_Far-red-induction_P Parameter: Timepoint (hr) Value: 1
  misc_feature: MA Experiment 20001247 PARAMETER Experiment Name: At_Far-red-induction_P Parameter: Tissue Value: Whole Plant
  misc_feature: MA Experiment ID: 20001248 Result: Up-regulated in Transcription
  misc_feature: MA Experiment 20001248 PARAMETER Experiment Name: At_Far-red-induction_P Parameter: Age (day) Value: 7
  misc_feature: MA Experiment 20001248 PARAMETER Experiment Name: At_Far-red-induction_P Parameter: Light Value: Far-red vs. White
  misc_feature: MA Experiment 20001248 PARAMETER Experiment Name: At_Far-red-induction_P Parameter: Organism Value: A. thaliana
  misc_feature: MA Experiment 20001248 PARAMETER Experiment Name: At_Far-red-induction_P Parameter: Plant Line Value: Columbia
  misc_feature: MA Experiment 20001248 PARAMETER Experiment Name: At_Far-red-induction_P Parameter: Timepoint (hr) Value: 4
  misc_feature: MA Experiment 20001248 PARAMETER Experiment Name: At_Far-red-induction_P Parameter: Tissue Value: Whole Plant
aaaaaaaaccttcacaatctctttccctccctctctcttcctcaacatgacatcaagaacattcacaagacattccagtctcattcatgtttttctcctgctttctctcgttttctcagggaatatactacaaacagtaacgtctcttggcatcaattacggacaagttgggaacaatttgccttcaccggataaagtcattaacctcttgagatctttaaggatcacaaaaacaagaatttacgacactaaccctcaaatccttagtgcctttgcaaattcaaacatcgagatcatcgtcaccatcgaaaatcaggttttaccattactacaagatcctcaacaagctacccaatgggtagattctcacattaaaccctatgttccggccactaggattaccggaattatggtcggaaacgagcttttcaccgacgacgactctagtttaataggatacatgatgccggcgataatcaacatccacaaagccttggtccaattaggtttagatagatacattcaagtctcgtctccaagctctcttgccgtcctcggtgaatcttatcctccatctgccggaagtttcaagccggaggtttcctccgtgatgcaacaacttctagatttcttggaagccacgaaatctcctttttggataaatgcttacccttactttgcctacaaagataacccacaagaaatcccagtcgattacgttctattcaaccgtaacatcggcatgaccgatcccaacacaagactacactacgacaacatgatgtatgctcaagttgacgcagttgctttcgcggctgcgaaactagggtaccgtaacatagaagttagggttgcggaaacagggtggccttcaaaaggagatgtcggagagattggagcgtctcctgtgaatgctgccacgtataaccggaatcttatgatgaggcaattcgccggagaaggaactccagcgagacggaatgcaagactcgatgtttatatatttgcgttgttcaatgaagatatgaaaccaggtcctacttcggagaaaaactacggtatattccaaccagatggatcattagcttacaatttgggattctctacaatgtcgacaacgacggcaaattcagaatctgtcacttattcatcctctgccactaaggcaaagaggagcttggagtattggacaattttgatattggcgatggttcaagttgtaatgttgagactattttagaggaaaagttattgacaatataataacgcgattgtttaggatatttatgtaaacaatttaattataagcttgataaatataatttatattcaattcaacatt

SEQ ID NO: 101028 - protein, 412 aa, Arabidopsis thaliana
  peptide (1)..(412): Ceres Seq. ID no. 13606728
  misc_feature (49)..(367): Pfam Name: Glycosyl hydrolases family 17 Pfam Description: Glycosyl hydrolases family 17
  misc_feature (16)..(412): Homolog of NCBI NO: 22328768 NR Description: glycosyl hydrolase family 17 [Arabidopsis
  misc_feature (16)..(390): Homolog of NCBI NO: 7447983 NR Description: hypothetical protein T9A21.190 - Arabidopsis
  misc_feature (15)..(412): Homolog of NCBI NO: 30691233 NR Description: glycosyl hydrolase family 17 [Arabidopsis
  misc_feature (15)..(412): Homolog of NCBI NO: 22530916 NR Description: putative beta-1,3-glucanase precursor
  misc_feature (15)..(373): Homolog of NCBI NO: 25316440 NR Description: hypothetical protein T1P2.13 - Arabidopsis
  misc_feature (25)..(408): Homolog of NCBI NO: 18401444 NR Description: glycosyl hydrolase family 17 [Arabidopsis
  misc_feature (32)..(398): Homolog of NCBI NO: 419789 NR Description: hypothetical protein - potato
  misc_feature (25)..(390): Homolog of NCBI NO: 25316425 NR Description: probable beta-1,3-glucanase [imported] -
  misc_feature (16)..(368): Homolog of NCBI NO: 25316443 NR Description: CDS protein F9L11.6 [imported] - Arabidopsis
  misc_feature (16)..(368): Homolog of NCBI NO: 30692765 NR Description: glycosyl hydrolase family 17 [Arabidopsis
KKTFTISFPPSLFLNMTSRTFTRHSSLIHVFLLLSLVFSGNILQTVTSLGINYGQVGNNLPSPDKVINLLRSLRITKTRIYDTNPQILSAFANSNIEIIVTIENQVLPLLQDPQQATQWVDSHIKPYVPATRITGIMVGNELFTDDDSSLIGYMMPAIINIHKALVQLGLDRYIQVSSPSSLAVLGESYPPSAGSFKPEVSSVMQQLLDFLEATKSPFWINAYPYFAYKDNPQEIPVDYVLFNRNIGMTDPNTRLHYDNMMYAQVDAVAFAAAKLGYRNIEVRVAETGWPSKGDVGEIGASPVNAATYNRNLMMRQFAGEGTPARRNARLDVYIFALFNEDMKPGPTSEKNYGIFQPDGSLAYNLGFSTMSTTTANSESVTYSSSATKAKRSLEYWTILILAMVQVVMLRLF

SEQ ID NO: 101029 - protein, 397 aa, Arabidopsis thaliana
  peptide (1)..(397): Ceres Seq. ID no. 13606729
  misc_feature (34)..(352): Pfam Name: Glycosyl hydrolases family 17 Pfam Description: Glycosyl hydrolases family 17
  misc_feature (1)..(397): Homolog of NCBI NO: 22328768 NR Description: glycosyl hydrolase family 17 [Arabidopsis
  misc_feature (1)..(375): Homolog of NCBI NO: 7447983 NR Description: hypothetical protein T9A21.190 - Arabidopsis
  misc_feature (1)..(397): Homolog of NCBI NO: 30691233 NR Description: glycosyl hydrolase family 17 [Arabidopsis
  misc_feature (1)..(397): Homolog of NCBI NO: 22530916 NR Description: putative beta-1,3-glucanase precursor
  misc_feature (1)..(358): Homolog of NCBI NO: 25316440 NR Description: hypothetical protein T1P2.13 - Arabidopsis
  misc_feature (10)..(393): Homolog of NCBI NO: 18401444 NR Description: glycosyl hydrolase family 17 [Arabidopsis
  misc_feature (17)..(383): Homolog of NCBI NO: 419789 NR Description: hypothetical protein - potato
  misc_feature (10)..(375): Homolog of NCBI NO: 25316425 NR Description: probable beta-1,3-glucanase [imported] -
  misc_feature (1)..(353): Homolog of NCBI NO: 25316443 NR Description: CDS protein F9L11.6 [imported] - Arabidopsis
  misc_feature (1)..(353): Homolog of NCBI NO: 30692765 NR Description: glycosyl hydrolase family 17 [Arabidopsis
MTSRTFTRHSSLIHVFLLLSLVFSGNILQTVTSLGINYGQVGNNLPSPDKVINLLRSLRITKTRIYDTNPQILSAFANSNIEIIVTIENQVLPLLQDPQQATQWVDSHIKPYVPATRITGIMVGNELFTDDDSSLIGYMMPAIINIHKALVQLGLDRYIQVSSPSSLAVLGESYPPSAGSFKPEVSSVMQQLLDFLEATKSPFWINAYPYFAYKDNPQEIPVDYVLFNRNIGMTDPNTRLHYDNMMYAQVDAVAFAAAKLGYRNIEVRVAETGWPSKGDVGEIGASPVNAATYNRNLMMRQFAGEGTPARRNARLDVYIFALFNEDMKPGPTSEKNYGIFQPDGSLAYNLGFSTMSTTTANSESVTYSSSATKAKRSLEYWTILILAMVQVVMLRLF

SEQ ID NO: 101030 - protein, 276 aa, Arabidopsis thaliana
  peptide (1)..(276): Ceres Seq. ID no. 13606730
  misc_feature (1)..(231): Pfam Name: Glycosyl hydrolases family 17 Pfam Description: Glycosyl hydrolases family 17
  misc_feature (1)..(276): Homolog of NCBI NO: 22328768 NR Description: glycosyl hydrolase family 17 [Arabidopsis
  misc_feature (1)..(254): Homolog of NCBI NO: 7447983 NR Description: hypothetical protein T9A21.190 - Arabidopsis
  misc_feature (1)..(276): Homolog of NCBI NO: 30691233 NR Description: glycosyl hydrolase family 17 [Arabidopsis
  misc_feature (1)..(276): Homolog of NCBI NO: 22530916 NR Description: putative beta-1,3-glucanase precursor
  misc_feature (1)..(237): Homolog of NCBI NO: 25316440 NR Description: hypothetical protein T1P2.13 - Arabidopsis
  misc_feature (1)..(272): Homolog of NCBI NO: 18401444 NR Description: glycosyl hydrolase family 17 [Arabidopsis
  misc_feature (1)..(262): Homolog of NCBI NO: 419789 NR Description: hypothetical protein - potato
  misc_feature (1)..(254): Homolog of NCBI NO: 25316425 NR Description: probable beta-1,3-glucanase [imported] -
  misc_feature (1)..(232): Homolog of NCBI NO: 25316443 NR Description: CDS protein F9L11.6 [imported] - Arabidopsis
  misc_feature (1)..(232): Homolog of NCBI NO: 30692765 NR Description: glycosyl hydrolase family 17 [Arabidopsis
MVGNELFTDDDSSLIGYMMPAIINIHKALVQLGLDRYIQVSSPSSLAVLGESYPPSAGSFKPEVSSVMQQLLDFLEATKSPFWINAYPYFAYKDNPQEIPVDYVLFNRNIGMTDPNTRLHYDNMMYAQVDAVAFAAAKLGYRNIEVRVAETGWPSKGDVGEIGASPVNAATYNRNLMMRQFAGEGTPARRNARLDVYIFALFNEDMKPGPTSEKNYGIFQPDGSLAYNLGFSTMSTTTANSESVTYSSSATKAKRSLEYWTILILAMVQVVMLRLF

SEQ ID NO: 101031 - DNA, 1328 bp, Arabidopsis thaliana
  misc_feature (1)..(1328): Ceres Seq. ID no. 13606731
  misc_feature: MA Experiment ID: 20000180 Result: Down-regulated in Transcription
  misc_feature: MA Experiment 20000180 PARAMETER Experiment Name: At_Germinating_Seeds_P Parameter: Age (hr) Value: 24 vs. 0
  misc_feature: MA Experiment 20000180 PARAMETER Experiment Name: At_Germinating_Seeds_P Parameter: Tissue Value: Germinating Seeds
  misc_feature: MA Experiment ID: 20000182 Result: Up-regulated in Transcription
  misc_feature: MA Experiment 20000182 PARAMETER Experiment Name: At_2mM_SA_P Parameter: Age (day) Value: 14
  misc_feature: MA Experiment 20000182 PARAMETER Experiment Name: At_2mM_SA_P Parameter: Organism Value: A. thaliana
  misc_feature: MA Experiment 20000182 PARAMETER Experiment Name: At_2mM_SA_P Parameter: Plant Line Value: WS
  misc_feature: MA Experiment 20000182 PARAMETER Experiment Name: At_2mM_SA_P Parameter: Timepoint (hr) Value: 6
  misc_feature: MA Experiment 20000182 PARAMETER Experiment Name: At_2mM_SA_P Parameter: Tissue Value: Aerial
  misc_feature: MA Experiment 20000182 PARAMETER Experiment Name: At_2mM_SA_P Parameter: Treatment Value: 2mM SA vs. No Treatment
  misc_feature: MA Experiment ID: 20000185 Result: Up-regulated in Transcription
  misc_feature: MA Experiment 20000185 PARAMETER Experiment Name: At_Roots__P Parameter: Age (day) Value: 7 vs. 21
  misc_feature: MA Experiment 20000185 PARAMETER Experiment Name: At_Roots__P Parameter: Organism Value: A. thaliana
  misc_feature: MA Experiment 20000185 PARAMETER Experiment Name: At_Roots__P Parameter: Tissue Value: Roots vs. Whole Plant
  misc_feature: MA Experiment ID: 20000439 Result: Up-regulated in Transcription
  misc_feature: MA Experiment 20000439 PARAMETER Experiment Name: At_Roots__P Parameter: Age (day) Value: 14 vs. 21
  misc_feature: MA Experiment 20000439 PARAMETER Experiment Name: At_Roots__P Parameter: Organism Value: A. thaliana
  misc_feature: MA Experiment 20000439 PARAMETER Experiment Name: At_Roots__P Parameter: Tissue Value: Roots vs. Whole Plant
  misc_feature: MA Experiment ID: 20000451 Result: Down-regulated in Transcription
  misc_feature: MA Experiment 20000451 PARAMETER Experiment Name: At_CS6879_Shoots-Roots_P Parameter: Age (day) Value: 14
  misc_feature: MA Experiment 20000451 PARAMETER Experiment Name: At_CS6879_Shoots-Roots_P Parameter: Organism Value: A. thaliana
  misc_feature: MA Experiment 20000451 PARAMETER Experiment Name: At_CS6879_Shoots-Roots_P Parameter: Plant Line Value: CS6879 vs. WS
  misc_feature: MA Experiment 20000451 PARAMETER Experiment Name: At_CS6879_Shoots-Roots_P Parameter: Tissue Value: Roots
  misc_feature: MA Experiment ID: 20000453 Result: Up-regulated in Transcription
  misc_feature: MA Experiment 20000453 PARAMETER Experiment Name: At_100uM_ABA_P Parameter: Age (day) Value: 15
  misc_feature: MA Experiment 20000453 PARAMETER Experiment Name: At_100uM_ABA_P Parameter: Organism Value: A. thaliana
  misc_feature: MA Experiment 20000453 PARAMETER Experiment Name: At_100uM_ABA_P Parameter: Plant Line Value: WS
  misc_feature: MA Experiment 20000453 PARAMETER Experiment Name: At_100uM_ABA_P Parameter: Timepoint (hr) Value: 24
  misc_feature: MA Experiment 20000453 PARAMETER Experiment Name: At_100uM_ABA_P Parameter: Tissue Value: Aerial
  misc_feature: MA Experiment 20000453 PARAMETER Experiment Name: At_100uM_ABA_P Parameter: Treatment Value: 100uM ABA vs. No Treatment
  misc_feature: MA Experiment ID: 20000527 Result: Down-regulated in Transcription
  misc_feature: MA Experiment 20000527 PARAMETER Experiment Name: At_10percent_PEG_P Parameter: Age (day) Value: 20
  misc_feature: MA Experiment 20000527 PARAMETER Experiment Name: At_10percent_PEG_P Parameter: Organism Value: A. thaliana
  misc_feature: MA Experiment 20000527 PARAMETER Experiment Name: At_10percent_PEG_P Parameter: Plant Line Value: WS
  misc_feature: MA Experiment 20000527 PARAMETER Experiment Name: At_10percent_PEG_P Parameter: Timepoint (day) Value: 20
  misc_feature: MA Experiment 20000527 PARAMETER Experiment Name: At_10percent_PEG_P Parameter: Tissue Value: Whole Plant
  misc_feature: MA Experiment 20000527 PARAMETER Experiment Name: At_10percent_PEG_P Parameter: Treatment Value: 10percent PEG vs. No Treatment
  misc_feature: MA Experiment ID: 20001757 Result: Down-regulated in Transcription
  misc_feature: MA Experiment 20001757 PARAMETER Experiment Name: At_50mM_NH4NO3_L-to-H_P Parameter: Timepoint (hr) Value: 6
  misc_feature: MA Experiment 20001757 PARAMETER Experiment Name: At_50mM_NH4NO3_L-to-H_P Parameter: Tissue Value: Leaf
  misc_feature: MA Experiment 20001757 PARAMETER Experiment Name: At_50mM_NH4NO3_L-to-H_P Parameter: Treatment Value: 50mM NH4NO3 vs 100mM Mannitol
aaagtctctctaggcctctaggaatttttttgagtgttgagtaaataaaaatggagataacaaacgtgatggaatatgagaagatcgcaaaggagaaattaccaaagatggtttatgattactatgcatctggtgctgaagatcaatggactcttcaagagaatcgaaacgctttctctaggattctatttaggcctcggattcttatcgatgtaagcaagattgatgtgagcacaacggttttagggtttaatatttctatgccaattatgattgctcctactgcaatgcagaaaatggctcatcctgatggcgagcttgcaaccgcgagagctacttctgctgctggaacaatcatgactttatcttcatgggctacttgtagtgttgaggaagttgcttcaaccggaccagggattcgttttttccaactttatgtttataaggatagaaatgtggttatacagcttgtgaaacgagctgaagaagctggattcaaagctattgctcttactgtagatactccaaggcttggacgcagagaatctgacatcaaaaacagattcgcgcttcctcgaggtctaacgttgaagaacttcgaagggttggatcttgggaaaatagacaagacgaatgactcagggctagcttcatatgttgctggtcaagttgatcaatcacttagctggaaggatataaaatggctccaatctatcacaagcttgccaattcttgtcaagggtgttattacagctgaggatgcaagaattgctgttgaatatggagctgcagggataatagtctctaaccacggagctcgtcagctagattatgttcctgcaactatagtggccttagaagaggtggttaaagccgtggagggtcggattccggtttttcttgacggtggggttcgccgtggaaccgatgtctttaaggcattggctcttggcgcttcaggtgtctttgtcgggaggccgagcttgttctcgcttgcagcggatggagaagcgggagttaggaagatgctacaaatgctaagagacgagtttgagcttacaatggcactaagtggttgccgttcactgagagagatcagccgaacccacatcaagactgattgggacactcctcattacctctcggccaagctgtagggaatcttattcacttcttcaatttaagagtcaccactcatcagagagatgaaaagatagatggatgtttgaatttgtgatccaataaagtattcccatccaactatataatcgaatactttcgttttgtagatgtagttaaatggtaacaatatattaatcttttatatg

SEQ ID NO: 101032 - protein, 368 aa, Arabidopsis thaliana
  peptide (1)..(368): Ceres Seq. ID no. 13606732
  misc_feature (13)..(356): Pfam Name: FMN-dependent dehydrogenase Pfam Description: FMN-dependent dehydrogenase
  misc_feature (1)..(368): Homolog of NCBI NO: 15236857 NR Description: glycolate oxidase - like protein [Arabidopsis
  misc_feature (1)..(368): Homolog of NCBI NO: 15231850 NR Description: glycolate oxidase -related [Arabidopsis thaliana]
  misc_feature (1)..(368): Homolog of NCBI NO: 16226772 NR Description: AT3g14420/MOA2_2 [Arabidopsis thaliana]
  misc_feature (1)..(361): Homolog of NCBI NO: 121530 NR Description: (S)-2-hydroxy-acid oxidase, peroxisomal
  misc_feature (1)..(361): Homolog of NCBI NO: 999542 NR Description: Chain A, Glycolate Oxidase (E.C.1.1.3.15) Mutant Tyr 24 Replaced By Phe (Y24f) >gi|999543|pdb|1GYL|B Chain B,
  misc_feature (1)..(359): Homolog of NCBI NO: 2554675 NR Description: Three-Dimensional Structure Of Glycolate Oxidase
  misc_feature (1)..(364): Homolog of NCBI NO: 15229497 NR Description: glycolate oxidase [Arabidopsis thaliana]
  misc_feature (1)..(360): Homolog of NCBI NO: 1773330 NR Description: glycolate oxidase [Mesembryanthemum crystallinum]
  misc_feature (1)..(361): Homolog of NCBI NO: 7431428 NR Description: (S)-2-hydroxy-acid oxidase (EC 1.1.3.15) - >gi|217909|dbj|BAA03131.1| glycolate oxidase [Cucurbita cv.
  misc_feature (1)..(361): Homolog of NCBI NO: 228403 NR Description: glycolate oxidase
MEITNVMEYEKIAKEKLPKMVYDYYASGAEDQWTLQENRNAFSRILFRPRILIDVSKIDVSTTVLGFNISMPIMIAPTAMQKMAHPDGELATARATSAAGTIMTLSSWATCSVEEVASTGPGIRFFQLYVYKDRNVVIQLVKRAEEAGFKAIALTVDTPRLGRRESDIKNRFALPRGLTLKNFEGLDLGKIDKTNDSGLASYVAGQVDQSLSWKDIKWLQSITSLPILVKGVITAEDARIAVEYGAAGIIVSNHGARQLDYVPATIVALEEVVKAVEGRIPVFLDGGVRRGTDVFKALALGASGVFVGRPSLFSLAADGEAGVRKMLQMLRDEFELTMALSGCRSLREISRTHIKTDWDTPHYLSAKL

SEQ ID NO: 101033 - protein, 362 aa, Arabidopsis thaliana
  peptide (1)..(362): Ceres Seq. ID no. 13606733
  misc_feature (7)..(350): Pfam Name: FMN-dependent dehydrogenase Pfam Description: FMN-dependent dehydrogenase
  misc_feature (1)..(362): Homolog of NCBI NO: 15236857 NR Description: glycolate oxidase - like protein [Arabidopsis
  misc_feature (1)..(362): Homolog of NCBI NO: 15231850 NR Description: glycolate oxidase -related [Arabidopsis thaliana]
  misc_feature (1)..(362): Homolog of NCBI NO: 16226772 NR Description: AT3g14420/MOA2_2 [Arabidopsis thaliana]
  misc_feature (1)..(355): Homolog of NCBI NO: 121530 NR Description: (S)-2-hydroxy-acid oxidase, peroxisomal
  misc_feature (1)..(355): Homolog of NCBI NO: 999542 NR Description: Chain A, Glycolate Oxidase (E.C.1.1.3.15) Mutant Tyr 24 Replaced By Phe (Y24f) >gi|999543|pdb|1GYL|B Chain B,
  misc_feature (1)..(353): Homolog of NCBI NO: 2554675 NR Description: Three-Dimensional Structure Of Glycolate Oxidase
  misc_feature (1)..(358): Homolog of NCBI NO: 15229497 NR Description: glycolate oxidase [Arabidopsis thaliana]
  misc_feature (1)..(354): Homolog of NCBI NO: 1773330 NR Description: glycolate oxidase [Mesembryanthemum crystallinum]
  misc_feature (1)..(355): Homolog of NCBI NO: 7431428 NR Description: (S)-2-hydroxy-acid oxidase (EC 1.1.3.15) - >gi|217909|dbj|BAA03131.1| glycolate oxidase [Cucurbita cv.
  misc_feature (1)..(355): Homolog of NCBI NO: 228403 NR Description: glycolate oxidase
MEYEKIAKEKLPKMVYDYYASGAEDQWTLQENRNAFSRILFRPRILIDVSKIDVSTTVLGFNISMPIMIAPTAMQKMAHPDGELATARATSAAGTIMTLSSWATCSVEEVASTGPGIRFFQLYVYKDRNVVIQLVKRAEEAGFKAIALTVDTPRLGRRESDIKNRFALPRGLTLKNFEGLDLGKIDKTNDSGLASYVAGQVDQSLSWKDIKWLQSITSLPILVKGVITAEDARIAVEYGAAGIIVSNHGARQLDYVPATIVALEEVVKAVEGRIPVFLDGGVRRGTDVFKALALGASGVFVGRPSLFSLAADGEAGVRKMLQMLRDEFELTMALSGCRSLREISRTHIKTDWDTPHYLSAKL

SEQ ID NO: 101034 - protein, 349 aa, Arabidopsis thaliana
  peptide (1)..(349): Ceres Seq. ID no. 13606734
  misc_feature (1)..(337): Pfam Name: FMN-dependent dehydrogenase Pfam Description: FMN-dependent dehydrogenase
  misc_feature (1)..(349): Homolog of NCBI NO: 15236857 NR Description: glycolate oxidase - like protein [Arabidopsis
  misc_feature (1)..(349): Homolog of NCBI NO: 15231850 NR Description: glycolate oxidase -related [Arabidopsis thaliana]
  misc_feature (1)..(349): Homolog of NCBI NO: 16226772 NR Description: AT3g14420/MOA2_2 [Arabidopsis thaliana]
  misc_feature (1)..(342): Homolog of NCBI NO: 121530 NR Description: (S)-2-hydroxy-acid oxidase, peroxisomal
  misc_feature (1)..(342): Homolog of NCBI NO: 999542 NR Description: Chain A, Glycolate Oxidase (E.C.1.1.3.15) Mutant Tyr 24 Replaced By Phe (Y24f) >gi|999543|pdb|1GYL|B Chain B,
  misc_feature (1)..(340): Homolog of NCBI NO: 2554675 NR Description: Three-Dimensional Structure Of Glycolate Oxidase
  misc_feature (1)..(345): Homolog of NCBI NO: 15229497 NR Description: glycolate oxidase [Arabidopsis thaliana]
  misc_feature (1)..(341): Homolog of NCBI NO: 1773330 NR Description: glycolate oxidase [Mesembryanthemum crystallinum]
  misc_feature (1)..(342): Homolog of NCBI NO: 7431428 NR Description: (S)-2-hydroxy-acid oxidase (EC 1.1.3.15) - >gi|217909|dbj|BAA03131.1| glycolate oxidase [Cucurbita cv.
  misc_feature (1)..(342): Homolog of NCBI NO: 228403 NR Description: glycolate oxidase
MVYDYYASGAEDQWTLQENRNAFSRILFRPRILIDVSKIDVSTTVLGFNISMPIMIAPTAMQKMAHPDGELATARATSAAGTIMTLSSWATCSVEEVASTGPGIRFFQLYVYKDRNVVIQLVKRAEEAGFKAIALTVDTPRLGRRESDIKNRFALPRGLTLKNFEGLDLGKIDKTNDSGLASYVAGQVDQSLSWKDIKWLQSITSLPILVKGVITAEDARIAVEYGAAGIIVSNHGARQLDYVPATIVALEEVVKAVEGRIPVFLDGGVRRGTDVFKALALGASGVFVGRPSLFSLAADGEAGVRKMLQMLRDEFELTMALSGCRSLREISRTHIKTDWDTPHYLSAKL

SEQ ID NO: 101035 - DNA, 1954 bp, Arabidopsis thaliana
  misc_feature (1)..(1954): Ceres Seq. ID no. 13606739
  misc_feature: MA Experiment ID: 20000180 Result: Down-regulated in Transcription
  misc_feature: MA Experiment 20000180 PARAMETER Experiment Name: At_Germinating_Seeds_P Parameter: Age (hr) Value: 24 vs. 0
  misc_feature: MA Experiment 20000180 PARAMETER Experiment Name: At_Germinating_Seeds_P Parameter: Tissue Value: Germinating Seeds
gcagaatcttaaactctgcttctctctaatggcggcgacacatcttcacataccgccaaatcctaaaacccaaacgtctcaccaaaaccctcccttttggttctcttctaaaacaggaatctacaccagcaaattcccttccctacacctccccgtcgacccaaatctcgacgccgtctccgctcttttctcacacaaacaccacggcgatacagcgctcatcgattccttaaccgggttctcaatatctcacactgagctacagattatggttcaatcaatggcggctgggatctatcacgttttaggtgttcgtcaaggtgacgttgtatcactcgtcttgcctaattccgtctattttccgatgattttcctctctttgatctcgcttggtgctattgttactaccatgaatccttcgagtagtttaggagagattaagaagcaagttagtgagtgtagtgttggattagcttttacttctactgaaaacgttgagaagctgagttctttgggggttagtgtgattagtgtatctgaaagttacgattttgattcgattcgtatcgaaaacccgaagttttactccattatgaaagaaagttttgggtttgtaccaaaaccgttgattaagcaagacgatgtagctgcaattatgtattcatctggaacaactggagctagtaaaggagttttgttaactcataggaatttgatagcatcaatggagctttttgtgaggtttgaagcttctcagtacgaatatccgggatcgagtaatgtttatctagcagctttgcctttgtgccatatctacgggttatcactctttgtgatgggattgttgtctctgggatcaactattgttgttatgaagaggtttgatgcttctgatgttgttaatgtaattgaaaggtttaagatcactcatttcccggttgttccacctatgttgatggcattgacaaagaaggcaaaaggagtttgtggtgaagtgtttaaaagtttgaagcaagtttcttctggagcagctcctttgagtaggaagttcattgaagatttccttcagactcttcctcatgtcgatttgattcagggatatggaatgactgaatcaactgcagttggaacacggggcttcaactcggaaaagcttagtaggtattcttctgtgggactactggctcctaatatgcaagccaaggtagtagattggagctctggttctttccttccaccaggaaaccgaggagagctctggatacaaggtcccggtgtcatgaaaggatacttgaataacccaaaagcaactcagatgagtatagttgaagatagttggctacgtactggggatattgcttattttgatgaagatggttacttgtttattgttgaccgtattaaggagattataaagtacaaaggctttcagatcgctccagcagatttggaggctgttcttgtttcacatcccttgattatcgacgctgcagtaacagctgccccaaatgaagaatgtggagagattccggtagcattcgttgtccggagacaagaaacaacactttcagaagaagatgtaataagctatgtagcttctcaggttgcaccctacaggaaggtgaggaaagtggtgatggtcaactctataccaaaatctccaactgggaagatattgagaaaggaactaaagagaattcttacaaactctgtttcttcaagactatgattctttcttcatttgtttggtaataagtagcagacagagagatccactaatatagccttcataactcaattcattggttttgtagcatcaaaagaaataaacagacacattctttgattctcagtgaataaagcattgtaacccaatacggaaacaaaaattctttctgagcccaaaatgtaattttagccttagtattttatttacataaaagtccttttaacc

SEQ ID NO: 101036 - protein, 575 aa, Arabidopsis thaliana
  peptide (1)..(575): Ceres Seq. ID no. 13606740
  misc_feature (83)..(498): Pfam Name: AMP-binding enzyme Pfam Description: AMP-binding enzyme
  misc_feature (10)..(575): Homolog of NCBI NO: 15234087 NR Description: 4-coumarate:CoA ligase (4-coumaroyl-CoA synthase)
  misc_feature (10)..(575): Homolog of NCBI NO: 26449818 NR Description: putative 4-coumarate-CoA ligase [Arabidopsis
  misc_feature (10)..(575): Homolog of NCBI NO: 29888152 NR Description: 4-coumarate-CoA ligase-like protein [Arabidopsis
  misc_feature (25)..(574): Homolog of NCBI NO: 37537168 NR Description: putative 4-coumarate CoA ligase [Oryza sativa
  misc_feature (35)..(570): Homolog of NCBI NO: 18394871 NR Description: 4-coumarate:CoA ligase 1 (4-coumaroyl-CoA unknown protein [Arabidopsis thaliana]
  misc_feature (35)..(570): Homolog of NCBI NO: 29893225 NR Description: 4-coumarate-CoA ligase-like protein [Arabidopsis
  misc_feature (35)..(497): Homolog of NCBI NO: 8778603 NR Description: F5M15.17 [Arabidopsis thaliana]
  misc_feature (478)..(570): Homolog of NCBI NO: 8778603 NR Description: F5M15.17 [Arabidopsis thaliana]
  misc_feature (34)..(571): Homolog of NCBI NO: 15217956 NR Description: 4-coumarate:CoA ligase 1 (4-coumaroyl-CoA
  misc_feature (34)..(571): Homolog of NCBI NO: 29888143 NR Description: 4-coumarate-CoA ligase-like protein [Arabidopsis
QNLKLCFSLMAATHLHIPPNPKTQTSHQNPPFWFSSKTGIYTSKFPSLHLPVDPNLDAVSALFSHKHHGDTALIDSLTGFSISHTELQIMVQSMAAGIYHVLGVRQGDVVSLVLPNSVYFPMIFLSLISLGAIVTTMNPSSSLGEIKKQVSECSVGLAFTSTENVEKLSSLGVSVISVSESYDFDSIRIENPKFYSIMKESFGFVPKPLIKQDDVAAIMYSSGTTGASKGVLLTHRNLIASMELFVRFEASQYEYPGSSNVYLAALPLCHIYGLSLFVMGLLSLGSTIVVMKRFDASDVVNVIERFKITHFPVVPPMLMALTKKAKGVCGEVFKSLKQVSSGAAPLSRKFIEDFLQTLPHVDLIQGYGMTESTAVGTRGFNSEKLSRYSSVGLLAPNMQAKVVDWSSGSFLPPGNRGELWIQGPGVMKGYLNNPKATQMSIVEDSWLRTGDIAYFDEDGYLFIVDRIKEIIKYKGFQIAPADLEAVLVSHPLIIDAAVTAAPNEECGEIPVAFVVRRQETTLSEEDVISYVASQVAPYRKVRKVVMVNSIPKSPTGKILRKELKRILTNSVSSRL

SEQ ID NO: 101037 - protein, 566 aa, Arabidopsis thaliana
  peptide (1)..(566): Ceres Seq. ID no. 13606741
  misc_feature (74)..(489): Pfam Name: AMP-binding enzyme Pfam Description: AMP-binding enzyme
  misc_feature (1)..(566): Homolog of NCBI NO: 15234087 NR Description: 4-coumarate:CoA ligase (4-coumaroyl-CoA synthase)
  misc_feature (1)..(566): Homolog of NCBI NO: 26449818 NR Description: putative 4-coumarate-CoA ligase [Arabidopsis
  misc_feature (1)..(566): Homolog of NCBI NO: 29888152 NR Description: 4-coumarate-CoA ligase-like protein [Arabidopsis
  misc_feature (16)..(565): Homolog of NCBI NO: 37537168 NR Description: putative 4-coumarate CoA ligase [Oryza sativa
  misc_feature (26)..(561): Homolog of NCBI NO: 18394871 NR Description: 4-coumarate:CoA ligase 1 (4-coumaroyl-CoA unknown protein [Arabidopsis thaliana]
  misc_feature (26)..(561): Homolog of NCBI NO: 29893225 NR Description: 4-coumarate-CoA ligase-like protein [Arabidopsis
  misc_feature (26)..(488): Homolog of NCBI NO: 8778603 NR Description: F5M15.17 [Arabidopsis thaliana]
  misc_feature (469)..(561): Homolog of NCBI NO: 8778603 NR Description: F5M15.17 [Arabidopsis thaliana]
  misc_feature (25)..(562): Homolog of NCBI NO: 15217956 NR Description: 4-coumarate:CoA ligase 1 (4-coumaroyl-CoA
  misc_feature (25)..(562): Homolog of NCBI NO: 29888143 NR Description: 4-coumarate-CoA ligase-like protein [Arabidopsis
MAATHLHIPPNPKTQTSHQNPPFWFSSKTGIYTSKFPSLHLPVDPNLDAVSALFSHKHHGDTALIDSLTGFSISHTELQIMVQSMAAGIYHVLGVRQGDVVSLVLPNSVYFPMIFLSLISLGAIVTTMNPSSSLGEIKKQVSECSVGLAFTSTENVEKLSSLGVSVISVSESYDFDSIRIENPKFYSIMKESFGFVPKPLIKQDDVAAIMYSSGTTGASKGVLLTHRNLIASMELFVRFEASQYEYPGSSNVYLAALPLCHIYGLSLFVMGLLSLGSTIVVMKRFDASDVVNVIERFKITHFPVVPPMLMALTKKAKGVCGEVFKSLKQVSSGAAPLSRKFIEDFLQTLPHVDLIQGYGMTESTAVGTRGFNSEKLSRYSSVGLLAPNMQAKVVDWSSGSFLPPGNRGELWIQGPGVMKGYLNNPKATQMSIVEDSWLRTGDIAYFDEDGYLFIVDRIKEIIKYKGFQIAPADLEAVLVSHPLIIDAAVTAAPNEECGEIPVAFVVRRQETTLSEEDVISYVASQVAPYRKVRKVVMVNSIPKSPTGKILRKELKRILTNSVSSRL

SEQ ID NO: 101038 - protein, 486 aa, Arabidopsis thaliana
  peptide (1)..(486): Ceres Seq. ID no. 13606742
  misc_feature (1)..(409): Pfam Name: AMP-binding enzyme Pfam Description: AMP-binding enzyme
  misc_feature (1)..(486): Homolog of NCBI NO: 15234087 NR Description: 4-coumarate:CoA ligase (4-coumaroyl-CoA synthase)
  misc_feature (1)..(486): Homolog of NCBI NO: 26449818 NR Description: putative 4-coumarate-CoA ligase [Arabidopsis
  misc_feature (1)..(486): Homolog of NCBI NO: 29888152 NR Description: 4-coumarate-CoA ligase-like protein [Arabidopsis
  misc_feature (1)..(485): Homolog of NCBI NO: 37537168 NR Description: putative 4-coumarate CoA ligase [Oryza sativa
  misc_feature (1)..(481): Homolog of NCBI NO: 18394871 NR Description: 4-coumarate:CoA ligase 1 (4-coumaroyl-CoA unknown protein [Arabidopsis thaliana]
  misc_feature (1)..(481): Homolog of NCBI NO: 29893225 NR Description: 4-coumarate-CoA ligase-like protein [Arabidopsis
  misc_feature (1)..(408): Homolog of NCBI NO: 8778603 NR Description: F5M15.17 [Arabidopsis thaliana]
  misc_feature (389)..(481): Homolog of NCBI NO: 8778603 NR Description: F5M15.17 [Arabidopsis thaliana]
  misc_feature (1)..(482): Homolog of NCBI NO: 15217956 NR Description: 4-coumarate:CoA ligase 1 (4-coumaroyl-CoA
  misc_feature (1)..(482): Homolog of NCBI NO: 29888143 NR Description: 4-coumarate-CoA ligase-like protein [Arabidopsis
MVQSMAAGIYHVLGVRQGDVVSLVLPNSVYFPMIFLSLISLGAIVTTMNPSSSLGEIKKQVSECSVGLAFTSTENVEKLSSLGVSVISVSESYDFDSIRIENPKFYSIMKESFGFVPKPLIKQDDVAAIMYSSGTTGASKGVLLTHRNLIASMELFVRFEASQYEYPGSSNVYLAALPLCHIYGLSLFVMGLLSLGSTIVVMKRFDASDVVNVIERFKITHFPVVPPMLMALTKKAKGVCGEVFKSLKQVSSGAAPLSRKFIEDFLQTLPHVDLIQGYGMTESTAVGTRGFNSEKLSRYSSVGLLAPNMQAKVVDWSSGSFLPPGNRGELWIQGPGVMKGYLNNPKATQMSIVEDSWLRTGDIAYFDEDGYLFIVDRIKEIIKYKGFQIAPADLEAVLVSHPLIIDAAVTAAPNEECGEIPVAFVVRRQETTLSEEDVISYVASQVAPYRKVRKVVMVNSIPKSPTGKILRKELKRILTNSVSSRL

SEQ ID NO: 101039 - DNA, 1132 bp, Arabidopsis thaliana
  misc_feature (1)..(1132): Ceres Seq. ID no. 13606777
  misc_feature: MA Experiment ID: 20000307 Result: Up-regulated in Transcription
  misc_feature: MA Experiment 20000307 PARAMETER Experiment Name: At_Germinating_Seeds_Sub_P Parameter: Age (hr) Value: 24 vs. 0
  misc_feature: MA Experiment 20000307 PARAMETER Experiment Name: At_Germinating_Seeds_Sub_P Parameter: Organism Value: A. thaliana
  misc_feature: MA Experiment 20000307 PARAMETER Experiment Name: At_Germinating_Seeds_Sub_P Parameter: Plant Line Value: WS
  misc_feature: MA Experiment 20000307 PARAMETER Experiment Name: At_Germinating_Seeds_Sub_P Parameter: Tissue Value: Germinating Seeds
  misc_feature: MA Experiment ID: 20000347 Result: Up-regulated in Transcription
  misc_feature: MA Experiment 20000347 PARAMETER Experiment Name: At_2mM_SA_Sub_P Parameter: Age (day) Value: 14
  misc_feature: MA Experiment 20000347 PARAMETER Experiment Name: At_2mM_SA_Sub_P Parameter: Organism Value: A. thaliana
  misc_feature: MA Experiment 20000347 PARAMETER Experiment Name: At_2mM_SA_Sub_P Parameter: Plant Line Value: WS
  misc_feature: MA Experiment 20000347 PARAMETER Experiment Name: At_2mM_SA_Sub_P Parameter: Timepoint (hr) Value: 6
  misc_feature: MA Experiment 20000347 PARAMETER Experiment Name: At_2mM_SA_Sub_P Parameter: Tissue Value: Aerial
  misc_feature: MA Experiment 20000347 PARAMETER Experiment Name: At_2mM_SA_Sub_P Parameter: Treatment Value: 2mM SA vs. No Treatment
  misc_feature: MA Experiment ID: 20000348 Result: Up-regulated in Transcription
  misc_feature: MA Experiment 20000348 PARAMETER Experiment Name: At_100uM_ABA_Sub_P Parameter: Age (day) Value: 14
  misc_feature: MA Experiment 20000348 PARAMETER Experiment Name: At_100uM_ABA_Sub_P Parameter: Organism Value: A. thaliana
  misc_feature: MA Experiment 20000348 PARAMETER Experiment Name: At_100uM_ABA_Sub_P Parameter: Plant Line Value: WS
  misc_feature: MA Experiment 20000348 PARAMETER Experiment Name: At_100uM_ABA_Sub_P Parameter: Timepoint (hr) Value: 1
  misc_feature: MA Experiment 20000348 PARAMETER Experiment Name: At_100uM_ABA_Sub_P Parameter: Tissue Value: Aerial
  misc_feature: MA Experiment 20000348 PARAMETER Experiment Name: At_100uM_ABA_Sub_P Parameter: Treatment Value: 100uM ABA vs. No Treatment
  misc_feature: MA Experiment ID: 20000349 Result: Up-regulated in Transcription
  misc_feature: MA Experiment 20000349 PARAMETER Experiment Name: At_100uM_ABA_Sub_P Parameter: Age (day) Value: 14
  misc_feature: MA Experiment 20000349 PARAMETER Experiment Name: At_100uM_ABA_Sub_P Parameter: Organism Value: A. thaliana
  misc_feature: MA Experiment 20000349 PARAMETER Experiment Name: At_100uM_ABA_Sub_P Parameter: Plant Line Value: WS
  misc_feature: MA Experiment 20000349 PARAMETER Experiment Name: At_100uM_ABA_Sub_P Parameter: Timepoint (hr) Value: 6
  misc_feature: MA Experiment 20000349 PARAMETER Experiment Name: At_100uM_ABA_Sub_P Parameter: Tissue Value: Aerial
  misc_feature: MA Experiment 20000349 PARAMETER Experiment Name: At_100uM_ABA_Sub_P Parameter: Treatment Value: 100uM ABA vs. No Treatment
  misc_feature: MA Experiment ID: 20000352 Result: Up-regulated in Transcription
  misc_feature: MA Experiment 20000352 PARAMETER Experiment Name: At_Drought_Sub_P Parameter: Age (day) Value: 7
  misc_feature: MA Experiment 20000352 PARAMETER Experiment Name: At_Drought_Sub_P Parameter: Organism Value: A. thaliana
  misc_feature: MA Experiment 20000352 PARAMETER Experiment Name: At_Drought_Sub_P Parameter: Plant Line Value: WS
  misc_feature: MA Experiment 20000352 PARAMETER Experiment Name: At_Drought_Sub_P Parameter: Timepoint (hr) Value: 6
  misc_feature: MA Experiment 20000352 PARAMETER Experiment Name: At_Drought_Sub_P Parameter: Tissue Value: Whole Plant
  misc_feature: MA Experiment 20000352 PARAMETER Experiment Name: At_Drought_Sub_P Parameter: Treatment Value: Drought vs. No Drought
  misc_feature: MA Experiment ID: 20000355 Result: Down-regulated in Transcription
  misc_feature: MA Experiment 20000355 PARAMETER Experiment Name: At_Siliques_Sub_P Parameter: Age (day) Value: 21
  misc_feature: MA Experiment 20000355 PARAMETER Experiment Name: At_Siliques_Sub_P Parameter: Organism Value: A. thaliana
  misc_feature: MA Experiment 20000355 PARAMETER Experiment Name: At_Siliques_Sub_P Parameter: Plant Line Value: WS
  misc_feature: MA Experiment 20000355 PARAMETER Experiment Name: At_Siliques_Sub_P Parameter: Tissue Value: Less Than 5mm Siliques vs. Whole Plant
tcatcgctgtctggaacagcgatgaagattaatttgtaatataaaatacctccacgaaaaaagaaaacccaactcattaagcaaactcggatctccttctcttctctctctcgctaagaactatagaagatgggattgttctcccacaagatctccagagatgatctgaaaccaggcgatcacatctattcttggcgtaacgcttatatctactctcatcacggagtctacgtaggagatgagaaagtcattcatttcactcgtggaggtggtctagaattcggaacaggaacagttttggacaagatcatcgatatttcaataccaaatcatggaagaagagacaaaaagtgtattgattgtggagatcaatccaatctcggtggtgtaatctcttcttgtcttgattgttttctcgccggaggaaatctacatctcttcgaatacagtgcctctccgtctatctttctagccaaacgaggtggtacatgcacgatagcatcttcagatccttgtgatgaagtcatttctcgtgctaaatttctccttttgcaaaatggatttggtgagtacgatcttttagacaacaattgtgaagattttgcgatttattgcaaaactggtttgtttgtgttgtcggttgctaccaagtttggatgtagtggtcaagccaattctgtatctgcagctggtggtgttgttgctttgacgcttaaggttttaggtgtgaaaaagaagagtagtagtggtcatgaagatgactctgtggtttctgttgtaaaccagtttatttcttcgacagttaaatatgtagttcctggtattggtggtttggctttggctgaatatggtaattactgtattggtcgtctgttttacgacattggtgttagaaaagatgcttgtaaggtttctgttgaagagcttgtagcatttgtaggagccaagcaaaacatcttggaaggcaagaagtctaattagttagcactttgttgtgcattatgtatgtttgatgactaattgttgagtatggagagagtgattttgcttttctgatttcattgtattgtggaaactgtattttaagtatttgtaaagtaaaaattacagttaaaataaatttcttgtttcc

SEQ ID NO: 101040 - protein, 283 aa, Arabidopsis thaliana
  peptide (1)..(283): Ceres Seq. ID no. 13606778
  misc_feature (102)..(175): Pfam Name: NC domain Pfam Description: NC domain
  misc_feature (1)..(283): Homolog of NCBI NO: 15237330 NR Description: expressed protein [Arabidopsis thaliana] gb|AAF32477.1~gene_id:MQK4.8~similar to unknown protein thaliana] >gi|27754415|gb|AAO22656.1| unknown protein
  misc_feature (1)..(191): Homolog of NCBI NO: 18396282 NR Description: expressed protein [Arabidopsis thaliana] unknown protein [Arabidopsis thaliana] unknown protein [Arabidopsis thaliana]
  misc_feature (212)..(280): Homolog of NCBI NO: 18396282 NR Description: expressed protein [Arabidopsis thaliana] unknown protein [Arabidopsis thaliana] unknown protein [Arabidopsis thaliana]
  misc_feature (1)..(191): Homolog of NCBI NO: 21594170 NR Description: unknown [Arabidopsis thaliana]
  misc_feature (212)..(280): Homolog of NCBI NO: 21594170 NR Description: unknown [Arabidopsis thaliana]
  misc_feature (1)..(194): Homolog of NCBI NO: 15237327 NR Description: hypothetical protein [Arabidopsis thaliana] gb|AAF32477.1~gene_id:MQK4.5~similar to unknown protein
  misc_feature (1)..(187): Homolog of NCBI NO: 18378812 NR Description: expressed protein [Arabidopsis thaliana]
  misc_feature (193)..(281): Homolog of NCBI NO: 18378812 NR Description: expressed protein [Arabidopsis thaliana]
  misc_feature (1)..(187): Homolog of NCBI NO: 21592684 NR Description: unknown [Arabidopsis thaliana]
  misc_feature (193)..(281): Homolog of NCBI NO: 21592684 NR Description: unknown [Arabidopsis thaliana]
MGLFSHKISRDDLKPGDHIYSWRNAYIYSHHGVYVGDEKVIHFTRGGGLEFGTGTVLDKIIDISIPNHGRRDKKCIDCGDQSNLGGVISSCLDCFLAGGNLHLFEYSASPSIFLAKRGGTCTIASSDPCDEVISRAKFLLLQNGFGEYDLLDNNCEDFAIYCKTGLFVLSVATKFGCSGQANSVSAAGGVVALTLKVLGVKKKSSSGHEDDSVVSVVNQFISSTVKYVVPGIGGLALAEYGNYCIGRLFYDIGVRKDACKVSVEELVAFVGAKQNILEGKKSN

SEQ ID NO: 101041 - DNA, 3062 bp, Arabidopsis thaliana
  misc_feature (1)..(3062): Ceres Seq. ID no. 13606782
  misc_feature: MA Experiment ID: 20000439 Result: Up-regulated in Transcription
  misc_feature: MA Experiment 20000439 PARAMETER Experiment Name: At_Roots__P Parameter: Age (day) Value: 14 vs. 21
  misc_feature: MA Experiment 20000439 PARAMETER Experiment Name: At_Roots__P Parameter: Organism Value: A. thaliana
  misc_feature: MA Experiment 20000439 PARAMETER Experiment Name: At_Roots__P Parameter: Tissue Value: Roots vs. Whole Plant
ataggctggtttatatattttcaataggttaaattaatttcatattgttagtgtatgcttttggtattccggtgttaattaatttaatcatttacataagttcgtctctctggttttcaacattcttcttcttcttcttcgtcttcttcaaagatgcataaatatatttcttaaaccagaggttgatgatgaatcgaagtgaaatgcaaaagttaggtttcgaacacgtgagatactacacagagtcgccgtacaacagaggagagtcgtcggcgaacgtggcgacgacaagcaactattacggtgaagatgaaccatacgtggagatcacgctagatatccacgacgattccgtctccgtgtacggcttgaagtcaccgaaccatcgaggggccgggtctaattatgaggatcaatcgcttctcagacaaggtcgttcagggaggagtaactcggttttgaaacgcttggcttcttctgtttccaccggaataacacgagttgcttcttctgtttcttcgtcttccgcgagaaaaccaccgcggccgcagctggcaaagctgcgccgttcgaaatctagagcagagttagctctcaaaggtcttaaattcatcaccaaaactgatggtgtcactggttggcctgaggttgagaaacggttttatgtgatgacaatgactactaacggattattacaccgatctagattcggtgaatgtatagggatgaaatcgacagagtttgcgttggcattgttcgatgctttagcgaggagggaaaacgtaagcggagattcaataaacattaatgagcttaaagagttctggaagcagatcactgatcaagattttgattcaaggctacgaactttcttcgccatggtcgataaggattcggatgggcggttgaatgaagccgaagtaagagagattataactttaagtgcttctgcaaacgagctggataacattcggagacaagctgatgaatatgctgctttaattatggaagaactagatccttatcattatgggtacatcatgatagagaatctcgagatacttctattgcaagcgccgatgcaggatgtgagagatggagagggtaagaagctaagcaagatgctaagtcagaatctcatggttccgcagagtaggaatctcggggcgcgtttttgcagagggatgaagtattttttgtttgataattggaagagagtgtgggtgatggctctatggataggtgctatggcgggtttgttcacgtggaagtttatggagtatcgaaaaagatccgcttacgaagtcatgggagtttgtgtttgtatagctaaaggagctgcagagacgcttaaactaaacatggctatgattttgttaccagtttgtaggaacaccatcacttggctccggaccaaaaccaagttaagtgctattgttcctttcgatgacagcctcaattttcacaaggtcatagctataggaatttcagttggagttggaatccatgctacatctcacttagcatgtgattttccccggctgatagctgcagatgaagatcagtatgagccaatggagaagtattttgggccacagacaaagagatatttggactttgttcaatcggtagaaggagttaccgggattggaatggttgtactaatgaccatagcctttacattggctacaacatggttcagacgtaataagctcaaccttcctggaccactgaagaaaataacaggcttcaatgccttctggtactctcaccacttatttgttatcgtctactcgcttcttgtcgttcatggattctacgtatacctcatcatcgagccatggtacaagaaaacgacatggatgtatttgatggtaccggtggttctttacttgtgtgaaaggctgattcgtgcattcaggtcaagcgtcgaggctgtttcagtgctaaaggttgctgtgttaccagggaatgtcttgtcgcttcacttgtcaagaccaagcaacttcagatacaagagtggacaatacatgtatctcaactgttctgcagtttctacattagaatggcatccattctcaattacctcagctccaggagatgactacctcagtgtccacatcagggttttaggagactggactaagcaattaagatcattattctctgaggtgtgcaagccacgccctcctgatgaacacagactgaacagagccgactcgaagcactgggattacatccctgactttccaagaatcctaattgatggtccatatggagcaccagcacaagactacaagaagtttgaagttgttctgctagtgggtctaggaatcggtgccactccgatgatcagcatagtgagtgacataatcaataacttgaaaggcgtggaagaaggcagtaaccgaagacagtcaccgatccataatatggtcacacctcctgtttctccatcaagaaaaagtgagacgttcagaaccaagagagcttacttctactgggtcacaagagagcaggggtcgtttgactggttcaagaacgtgatggacgaagtgactgaaacagaccgcaaaaacgtaattgagctgcataattactgcaccagcgtttacgaggaaggggacgcgaggtctgcacttatcacgatgctccagtctctaaaccatgctaagcatggagtggacgttgtgtcaggaacacgtgtcatgtcccatttcgctaggccaaactggagaagcgttttcaaaaggatcgctgtgaatcatcctaagactagagtcggagtgttttattgtggagcagctgggttagtgaaagagttacgacacttatcactggatttctctcataagacctccaccaagttcatcttccataaagagaatttctaaaaaaataagtttaaaaatatatatatttcacaagagtatttgatatagtttaaattgtacatatatagtgagatttaatatagttttggtttttgtacaaaaaaagaaaagaacagtagatcatgtttgtatcctaatacgcaaactacagaatattacctttactcc

SEQ ID NO: 101042 - protein, 902 aa, Arabidopsis thaliana
  peptide (1)..(902): Ceres Seq. ID no. 13606783
  misc_feature (375)..(901): Pfam Name: Ferric reductase like transmembrane component Pfam Description: Ferric reductase like transmembrane component
  misc_feature (44)..(902): Homolog of NCBI NO: 15241361 NR Description: respiratory burst oxidase protein C (NADPH (RbohC) [Arabidopsis thaliana] >gi|9758253|dbj|BAB08752.1|
  misc_feature (44)..(902): Homolog of NCBI NO: 26449420 NR Description: putative respiratory burst oxidase protein
  misc_feature (23)..(902): Homolog of NCBI NO: 20805911 NR Description: NADPH oxidase [Nicotiana tabacum]
  misc_feature (23)..(902): Homolog of NCBI NO: 28268680 NR Description: respiratory burst oxidase homolog [Nicotiana
  misc_feature (23)..(902): Homolog of NCBI NO: 19715905 NR Description: NADPH oxidase [Nicotiana tabacum]
  misc_feature (28)..(902): Homolog of NCBI NO: 8131846 NR Description: whitefly-induced gp91-phox [Lycopersicon
  misc_feature (287)..(902): Homolog of NCBI NO: 3242785 NR Description: respiratory burst oxidase protein C [Arabidopsis
  misc_feature (44)..(252): Homolog of NCBI NO: 3242785 NR Description: respiratory burst oxidase protein C [Arabidopsis
  misc_feature (40)..(902): Homolog of NCBI NO: 15238842 NR Description: respiratory burst oxidase protein D (NADPH (RbohD) [Arabidopsis thaliana] >gi|10177927|dbj|BAB11338.1| burst oxidase protein [Arabidopsis thaliana]
  misc_feature (40)..(902): Homolog of NCBI NO: 11358758 NR Description: respiratory burst oxidase protein D [imported] - thaliana >gi|3242789|gb|AAC39479.1| respiratory burst oxidase
MMNRSEMQKLGFEHVRYYTESPYNRGESSANVATTSNYYGEDEPYVEITLDIHDDSVSVYGLKSPNHRGAGSNYEDQSLLRQGRSGRSNSVLKRLASSVSTGITRVASSVSSSSARKPPRPQLAKLRRSKSRAELALKGLKFITKTDGVTGWPEVEKRFYVMTMTTNGLLHRSRFGECIGMKSTEFALALFDALARRENVSGDSININELKEFWKQITDQDFDSRLRTFFAMVDKDSDGRLNEAEVREIITLSASANELDNIRRQADEYAALIMEELDPYHYGYIMIENLEILLLQAPMQDVRDGEGKKLSKMLSQNLMVPQSRNLGARFCRGMKYFLFDNWKRVWVMALWIGAMAGLFTWKFMEYRKRSAYEVMGVCVCIAKGAAETLKLNMAMILLPVCRNTITWLRTKTKLSAIVPFDDSLNFHKVIAIGISVGVGIHATSHLACDFPRLIAADEDQYEPMEKYFGPQTKRYLDFVQSVEGVTGIGMVVLMTIAFTLATTWFRRNKLNLPGPLKKITGFNAFWYSHHLFVIVYSLLVVHGFYVYLIIEPWYKKTTWMYLMVPVVLYLCERLIRAFRSSVEAVSVLKVAVLPGNVLSLHLSRPSNFRYKSGQYMYLNCSAVSTLEWHPFSITSAPGDDYLSVHIRVLGDWTKQLRSLFSEVCKPRPPDEHRLNRADSKHWDYIPDFPRILIDGPYGAPAQDYKKFEVVLLVGLGIGATPMISIVSDIINNLKGVEEGSNRRQSPIHNMVTPPVSPSRKSETFRTKRAYFYWVTREQGSFDWFKNVMDEVTETDRKNVIELHNYCTSVYEEGDARSALITMLQSLNHAKHGVDVVSGTRVMSHFARPNWRSVFKRIAVNHPKTRVGVFYCGAAGLVKELRHLSLDFSHKTSTKFIFHKENF

SEQ ID NO: 101043 - protein, 901 aa, Arabidopsis thaliana
  peptide (1)..(901): Ceres Seq. ID no. 13606784
  misc_feature (374)..(900): Pfam Name: Ferric reductase like transmembrane component Pfam Description: Ferric reductase like transmembrane component
  misc_feature (43)..(901): Homolog of NCBI NO: 15241361 NR Description: respiratory burst oxidase protein C (NADPH (RbohC) [Arabidopsis thaliana] >gi|9758253|dbj|BAB08752.1|
  misc_feature (43)..(901): Homolog of NCBI NO: 26449420 NR Description: putative respiratory burst oxidase protein
  misc_feature (22)..(901): Homolog of NCBI NO: 20805911 NR Description: NADPH oxidase [Nicotiana tabacum]
  misc_feature (22)..(901): Homolog of NCBI NO: 28268680 NR Description: respiratory burst oxidase homolog [Nicotiana
  misc_feature (22)..(901): Homolog of NCBI NO: 19715905 NR Description: NADPH oxidase [Nicotiana tabacum]
  misc_feature (27)..(901): Homolog of NCBI NO: 8131846 NR Description: whitefly-induced gp91-phox [Lycopersicon
  misc_feature (286)..(901): Homolog of NCBI NO: 3242785 NR Description: respiratory burst oxidase protein C [Arabidopsis
  misc_feature (43)..(251): Homolog of NCBI NO: 3242785 NR Description: respiratory burst oxidase protein C [Arabidopsis
  misc_feature (39)..(901): Homolog of NCBI NO: 15238842 NR Description: respiratory burst oxidase protein D (NADPH (RbohD) [Arabidopsis thaliana] >gi|10177927|dbj|BAB11338.1| burst oxidase protein [Arabidopsis thaliana]
  misc_feature (39)..(901): Homolog of NCBI NO: 11358758 NR Description: respiratory burst oxidase protein D [imported] - thaliana >gi|3242789|gb|AAC39479.1| respiratory burst oxidase
MNRSEMQKLGFEHVRYYTESPYNRGESSANVATTSNYYGEDEPYVEITLDIHDDSVSVYGLKSPNHRGAGSNYEDQSLLRQGRSGRSNSVLKRLASSVSTGITRVASSVSSSSARKPPRPQLAKLRRSKSRAELALKGLKFITKTDGVTGWPEVEKRFYVMTMTTNGLLHRSRFGECIGMKSTEFALALFDALARRENVSGDSININELKEFWKQITDQDFDSRLRTFFAMVDKDSDGRLNEAEVREIITLSASANELDNIRRQADEYAALIMEELDPYHYGYIMIENLEILLLQAPMQDVRDGEGKKLSKMLSQNLMVPQSRNLGARFCRGMKYFLFDNWKRVWVMALWIGAMAGLFTWKFMEYRKRSAYEVMGVCVCIAKGAAETLKLNMAMILLPVCRNTITWLRTKTKLSAIVPFDDSLNFHKVIAIGISVGVGIHATSHLACDFPRLIAADEDQYEPMEKYFGPQTKRYLDFVQSVEGVTGIGMVVLMTIAFTLATTWFRRNKLNLPGPLKKITGFNAFWYSHHLFVIVYSLLVVHGFYVYLIIEPWYKKTTWMYLMVPVVLYLCERLIRAFRSSVEAVSVLKVAVLPGNVLSLHLSRPSNFRYKSGQYMYLNCSAVSTLEWHPFSITSAPGDDYLSVHIRVLGDWTKQLRSLFSEVCKPRPPDEHRLNRADSKHWDYIPDFPRILIDGPYGAPAQDYKKFEVVLLVGLGIGATPMISIVSDIINNLKGVEEGSNRRQSPIHNMVTPPVSPSRKSETFRTKRAYFYWVTREQGSFDWFKNVMDEVTETDRKNVIELHNYCTSVYEEGDARSALITMLQSLNHAKHGVDVVSGTRVMSHFARPNWRSVFKRIAVNHPKTRVGVFYCGAAGLVKELRHLSLDFSHKTSTKFIFHKENF

SEQ ID NO: 101044 - protein, 896 aa, Arabidopsis thaliana
  peptide (1)..(896): Ceres Seq. ID no. 13606785
  misc_feature (369)..(895): Pfam Name: Ferric reductase like transmembrane component Pfam Description: Ferric reductase like transmembrane component
  misc_feature (38)..(896): Homolog of NCBI NO: 15241361 NR Description: respiratory burst oxidase protein C (NADPH (RbohC) [Arabidopsis thaliana] >gi|9758253|dbj|BAB08752.1|
  misc_feature (38)..(896): Homolog of NCBI NO: 26449420 NR Description: putative respiratory burst oxidase protein
  misc_feature (17)..(896): Homolog of NCBI NO: 20805911 NR Description: NADPH oxidase [Nicotiana tabacum]
  misc_feature (17)..(896): Homolog of NCBI NO: 28268680 NR Description: respiratory burst oxidase homolog [Nicotiana
  misc_feature (17)..(896): Homolog of NCBI NO: 19715905 NR Description: NADPH oxidase [Nicotiana tabacum]
  misc_feature (22)..(896): Homolog of NCBI NO: 8131846 NR Description: whitefly-induced gp91-phox [Lycopersicon
  misc_feature (281)..(896): Homolog of NCBI NO: 3242785 NR Description: respiratory burst oxidase protein C [Arabidopsis
  misc_feature (38)..(246): Homolog of NCBI NO: 3242785 NR Description: respiratory burst oxidase protein C [Arabidopsis
  misc_feature (34)..(896): Homolog of NCBI NO: 15238842 NR Description: respiratory burst oxidase protein D (NADPH (RbohD) [Arabidopsis thaliana] >gi|10177927|dbj|BAB11338.1| burst oxidase protein [Arabidopsis thaliana]
  misc_feature (34)..(896): Homolog of NCBI NO: 11358758 NR Description: respiratory burst oxidase protein D [imported] - thaliana >gi|3242789|gb|AAC39479.1| respiratory burst oxidase
MQKLGFEHVRYYTESPYNRGESSANVATTSNYYGEDEPYVEITLDIHDDSVSVYGLKSPNHRGAGSNYEDQSLLRQGRSGRSNSVLKRLASSVSTGITRVASSVSSSSARKPPRPQLAKLRRSKSRAELALKGLKFITKTDGVTGWPEVEKRFYVMTMTTNGLLHRSRFGECIGMKSTEFALALFDALARRENVSGDSININELKEFWKQITDQDFDSRLRTFFAMVDKDSDGRLNEAEVREIITLSASANELDNIRRQADEYAALIMEELDPYHYGYIMIENLEILLLQAPMQDVRDGEGKKLSKMLSQNLMVPQSRNLGARFCRGMKYFLFDNWKRVWVMALWIGAMAGLFTWKFMEYRKRSAYEVMGVCVCIAKGAAETLKLNMAMILLPVCRNTITWLRTKTKLSAIVPFDDSLNFHKVIAIGISVGVGIHATSHLACDFPRLIAADEDQYEPMEKYFGPQTKRYLDFVQSVEGVTGIGMVVLMTIAFTLATTWFRRNKLNLPGPLKKITGFNAFWYSHHLFVIVYSLLVVHGFYVYLIIEPWYKKTTWMYLMVPVVLYLCERLIRAFRSSVEAVSVLKVAVLPGNVLSLHLSRPSNFRYKSGQYMYLNCSAVSTLEWHPFSITSAPGDDYLSVHIRVLGDWTKQLRSLFSEVCKPRPPDEHRLNRADSKHWDYIPDFPRILIDGPYGAPAQDYKKFEVVLLVGLGIGATPMISIVSDIINNLKGVEEGSNRRQSPIHNMVTPPVSPSRKSETFRTKRAYFYWVTREQGSFDWFKNVMDEVTETDRKNVIELHNYCTSVYEEGDARSALITMLQSLNHAKHGVDVVSGTRVMSHFARPNWRSVFKRIAVNHPKTRVGVFYCGAAGLVKELRHLSLDFSHKTSTKFIFHKENF

SEQ ID NO: 101045 - DNA, 772 bp, Arabidopsis thaliana
  misc_feature (1)..(772): Ceres Seq. ID no. 13606786
  misc_feature: MA Experiment ID: 20000437 Result: Up-regulated in Transcription
  misc_feature: MA Experiment 20000437 PARAMETER Experiment Name: At_Drought_P Parameter: Age (day) Value: 8
  misc_feature: MA Experiment 20000437 PARAMETER Experiment Name: At_Drought_P Parameter: Organism Value: A. thaliana
  misc_feature: MA Experiment 20000437 PARAMETER Experiment Name: At_Drought_P Parameter: Plant Line Value: WS
  misc_feature: MA Experiment 20000437 PARAMETER Experiment Name: At_Drought_P Parameter: Timepoint (hr) Value: 24
  misc_feature: MA Experiment 20000437 PARAMETER Experiment Name: At_Drought_P Parameter: Tissue Value: Whole Plant
  misc_feature: MA Experiment 20000437 PARAMETER Experiment Name: At_Drought_P Parameter: Treatment Value: Drought vs. No Drought
gacaccaacacaaacttaatctatgtaataacctacacatctctctctaaatccaatggcttatcagattgatcagaagatgattcacgatcaagaaccaatggctgagatcatgccaaatgtcataacggcgatgtcatctcttctacaaagggtgtcggagacgaacgacgatctgagccgtccgttcagggagcacaagaggatctcagctttcaatgcagtgaccaaaccttctatatcaatcagaagctatatggagaggatattcaagtacgcagattgcagcgactcgtgttacatagtcgcgtatatatatttggatcggttcatacaaaagcagccattgttgcccattgattcctctaatgtccatagactcatcatcaccagcgtcttggtctctgctaagttcatggatgacttgtgttacaataatgcattctatgcgaaagttggaggaataaccacagaggagatgaacttgttagagctggacttcttatttggaattggattccaattgaatgtgacaatttctacttataatgactattgttcttcacttcaaagagagatggttatgaggacgatgtactctccacttttggaacctgcttttttagttagaagttttcataagaatcttctaaagaatttgtacgacgaagatcatcgtaatagtcaagtcaccagtgctgtttgatacattggaatactagatcatctaacaaatggaaccttttaacggaaatgtaacaatttttttgag

SEQ ID NO: 101046 - protein, 216 aa, Arabidopsis thaliana
  peptide (1)..(216): Ceres Seq. ID no. 13606787
  misc_feature (25)..(158): Pfam Name: Cyclin, N-terminal domain Pfam Description: Cyclin, N-terminal domain
  misc_feature (1)..(216): Homolog of NCBI NO: 15240794 NR Description: cyclin family [Arabidopsis thaliana]
  misc_feature (1)..(215): Homolog of NCBI NO: 15240306 NR Description: cyclin family [Arabidopsis thaliana]
  misc_feature (19)..(188): Homolog of NCBI NO: 15224950 NR Description: cyclin family [Arabidopsis thaliana]
  misc_feature (16)..(175): Homolog of NCBI NO: 37536902 NR Description: hypothetical protein [Oryza sativa (japonica group)] >gi|12597875|gb|AAG60183.1| hypothetical protein [Oryza >gi|31433542|gb|AAP55040.1| hypothetical protein [Oryza sativa
  misc_feature (12)..(183): Homolog of NCBI NO: 32488963 NR Description: OSJNBb0038F03.8 [Oryza sativa (japonica
  misc_feature (20)..(176): Homolog of NCBI NO: 14140116 NR Description: PREG-like protein [Oryza sativa]
  misc_feature (11)..(176): Homolog of NCBI NO: 25493992 NR Description: PREG-like protein [imported] - Picea mariana
  misc_feature (1)..(175): Homolog of NCBI NO: 15225402 NR Description: cyclin family [Arabidopsis thaliana]
  misc_feature (21)..(203): Homolog of NCBI NO: 15233185 NR Description: cyclin family [Arabidopsis thaliana]
  misc_feature (21)..(175): Homolog of NCBI NO: 15232360 NR Description: cyclin family [Arabidopsis thaliana]
MAYQIDQKMIHDQEPMAEIMPNVITAMSSLLQRVSETNDDLSRPFREHKRISAFNAVTKPSISIRSYMERIFKYADCSDSCYIVAYIYLDRFIQKQPLLPIDSSNVHRLIITSVLVSAKFMDDLCYNNAFYAKVGGITTEEMNLLELDFLFGIGFQLNVTISTYNDYCSSLQREMVMRTMYSPLLEPAFLVRSFHKNLLKNLYDEDHRNSQVTSAV

SEQ ID NO: 101047 - protein, 208 aa, Arabidopsis thaliana
  peptide (1)..(208): Ceres Seq. ID no. 13606788
  misc_feature (17)..(150): Pfam Name: Cyclin, N-terminal domain Pfam Description: Cyclin, N-terminal domain
  misc_feature (1)..(208): Homolog of NCBI NO: 15240794 NR Description: cyclin family [Arabidopsis thaliana]
  misc_feature (1)..(207): Homolog of NCBI NO: 15240306 NR Description: cyclin family [Arabidopsis thaliana]
  misc_feature (11)..(180): Homolog of NCBI NO: 15224950 NR Description: cyclin family [Arabidopsis thaliana]
  misc_feature (8)..(167): Homolog of NCBI NO: 37536902 NR Description: hypothetical protein [Oryza sativa (japonica group)] >gi|12597875|gb|AAG60183.1| hypothetical protein [Oryza >gi|31433542|gb|AAP55040.1| hypothetical protein [Oryza sativa
  misc_feature (4)..(175): Homolog of NCBI NO: 32488963 NR Description: OSJNBb0038F03.8 [Oryza sativa (japonica
  misc_feature (12)..(168): Homolog of NCBI NO: 14140116 NR Description: PREG-like protein [Oryza sativa]
  misc_feature (3)..(168): Homolog of NCBI NO: 25493992 NR Description: PREG-like protein [imported] - Picea mariana
  misc_feature (1)..(167): Homolog of NCBI NO: 15225402 NR Description: cyclin family [Arabidopsis thaliana]
  misc_feature (13)..(195): Homolog of NCBI NO: 15233185 NR Description: cyclin family [Arabidopsis thaliana]
  misc_feature (13)..(167): Homolog of NCBI NO: 15232360 NR Description: cyclin family [Arabidopsis thaliana]
MIHDQEPMAEIMPNVITAMSSLLQRVSETNDDLSRPFREHKRISAFNAVTKPSISIRSYMERIFKYADCSDSCYIVAYIYLDRFIQKQPLLPIDSSNVHRLIITSVLVSAKFMDDLCYNNAFYAKVGGITTEEMNLLELDFLFGIGFQLNVTISTYNDYCSSLQREMVMRTMYSPLLEPAFLVRSFHKNLLKNLYDEDHRNSQVTSAV

SEQ ID NO: 101048 - protein, 201 aa, Arabidopsis thaliana
  peptide (1)..(201): Ceres Seq. ID no. 13606789
  misc_feature (10)..(143): Pfam Name: Cyclin, N-terminal domain Pfam Description: Cyclin, N-terminal domain
  misc_feature (1)..(201): Homolog of NCBI NO: 15240794 NR Description: cyclin family [Arabidopsis thaliana]
  misc_feature (1)..(200): Homolog of NCBI NO: 15240306 NR Description: cyclin family [Arabidopsis thaliana]
  misc_feature (4)..(173): Homolog of NCBI NO: 15224950 NR Description: cyclin family [Arabidopsis thaliana]
  misc_feature (1)..(160): Homolog of NCBI NO: 37536902 NR Description: hypothetical protein [Oryza sativa (japonica group)] >gi|12597875|gb|AAG60183.1| hypothetical protein [Oryza >gi|31433542|gb|AAP55040.1| hypothetical protein [Oryza sativa
  misc_feature (1)..(168): Homolog of NCBI NO: 32488963 NR Description: OSJNBb0038F03.8 [Oryza sativa (japonica
  misc_feature (5)..(161): Homolog of NCBI NO: 14140116 NR Description: PREG-like protein [Oryza sativa]
  misc_feature (1)..(161): Homolog of NCBI NO: 25493992 NR Description: PREG-like protein [imported] - Picea mariana
  misc_feature (1)..(160): Homolog of NCBI NO: 15225402 NR Description: cyclin family [Arabidopsis thaliana]
  misc_feature (6)..(188): Homolog of NCBI NO: 15233185 NR Description: cyclin family [Arabidopsis thaliana]
  misc_feature (6)..(160): Homolog of NCBI NO: 15232360 NR Description: cyclin family [Arabidopsis thaliana]
MAEIMPNVITAMSSLLQRVSETNDDLSRPFREHKRISAFNAVTKPSISIRSYMERIFKYADCSDSCYIVAYIYLDRFIQKQPLLPIDSSNVHRLIITSVLVSAKFMDDLCYNNAFYAKVGGITTEEMNLLELDFLFGIGFQLNVTISTYNDYCSSLQREMVMRTMYSPLLEPAFLVRSFHKNLLKNLYDEDHRNSQVTSAV

SEQ ID NO: 101049 - DNA, 715 bp, Arabidopsis thaliana
  misc_feature (1)..(715): Ceres Seq. ID no. 13606793
  misc_feature: MA Experiment ID: 20000184 Result: Down-regulated in Transcription
  misc_feature: MA Experiment 20000184 PARAMETER Experiment Name: At_Shoots__P Parameter: Age (day) Value: 7
  misc_feature: MA Experiment 20000184 PARAMETER Experiment Name: At_Shoots__P Parameter: Tissue Value: Shoots vs. Whole Plant
  misc_feature: MA Experiment ID: 20000185 Result: Down-regulated in Transcription
  misc_feature: MA Experiment 20000185 PARAMETER Experiment Name: At_Roots__P Parameter: Age (day) Value: 7 vs. 21
  misc_feature: MA Experiment 20000185 PARAMETER Experiment Name: At_Roots__P Parameter: Organism Value: A. thaliana
  misc_feature: MA Experiment 20000185 PARAMETER Experiment Name: At_Roots__P Parameter: Tissue Value: Roots vs. Whole Plant
  misc_feature: MA Experiment ID: 20000234 Result: Down-regulated in Transcription
  misc_feature: MA Experiment 20000234 PARAMETER Experiment Name: At_Siliques_P Parameter: Age (day) Value: 21
  misc_feature: MA Experiment 20000234 PARAMETER Experiment Name: At_Siliques_P Parameter: Organism Value: A. thaliana
  misc_feature: MA Experiment 20000234 PARAMETER Experiment Name: At_Siliques_P Parameter: Plant Line Value: WS
  misc_feature: MA Experiment 20000234 PARAMETER Experiment Name: At_Siliques_P Parameter: Tissue Value: Less Than 5mm Siliques vs. Whole Plant
  misc_feature: MA Experiment ID: 20000235 Result: Down-regulated in Transcription
  misc_feature: MA Experiment 20000235 PARAMETER Experiment Name: At_Siliques_P Parameter: Age (day) Value: 21
  misc_feature: MA Experiment 20000235 PARAMETER Experiment Name: At_Siliques_P Parameter: Organism Value: A. thaliana
  misc_feature: MA Experiment 20000235 PARAMETER Experiment Name: At_Siliques_P Parameter: Plant Line Value: WS
  misc_feature: MA Experiment 20000235 PARAMETER Experiment Name: At_Siliques_P Parameter: Tissue Value: 5-10mm Siliques vs. Whole Plant
  misc_feature: MA Experiment ID: 20000265 Result: Up-regulated in Transcription
  misc_feature: MA Experiment 20000265 PARAMETER Experiment Name: At_Open_Flower_P Parameter: Age (day) Value: 21
  misc_feature: MA Experiment 20000265 PARAMETER Experiment Name: At_Open_Flower_P Parameter: Plant Line Value: WS
  misc_feature: MA Experiment 20000265 PARAMETER Experiment Name: At_Open_Flower_P Parameter: Tissue Value: Closed Flower vs. Whole Plant
  misc_feature: MA Experiment ID: 20000286 Result: Up-regulated in Transcription
  misc_feature: MA Experiment 20000286 PARAMETER Experiment Name: At_Open_Flower_P Parameter: Age (day) Value: 21
  misc_feature: MA Experiment 20000286 PARAMETER Experiment Name: At_Open_Flower_P Parameter: Plant Line Value: WS
  misc_feature: MA Experiment 20000286 PARAMETER Experiment Name: At_Open_Flower_P Parameter: Tissue Value: Half Open vs. Whole Plant
  misc_feature: MA Experiment ID: 20000438 Result: Down-regulated in Transcription
  misc_feature: MA Experiment 20000438 PARAMETER Experiment Name: At_Shoots__P Parameter: Age (day) Value: 14
  misc_feature: MA Experiment 20000438 PARAMETER Experiment Name: At_Shoots__P Parameter: Tissue Value: Shoots vs. Whole Plant
  misc_feature: MA Experiment ID: 20000709 Result: Down-regulated in Transcription
  misc_feature: MA Experiment 20000709 PARAMETER Experiment Name: At_15mM_NH4NO3_L-to-H_P Parameter: Age (hr) Value: 14
  misc_feature: MA Experiment 20000709 PARAMETER Experiment Name: At_15mM_NH4NO3_L-to-H_P Parameter: Organism Value: A. thaliana
  misc_feature: MA Experiment 20000709 PARAMETER Experiment Name: At_15mM_NH4NO3_L-to-H_P Parameter: Plant Line Value: WS
  misc_feature: MA Experiment 20000709 PARAMETER Experiment Name: At_15mM_NH4NO3_L-to-H_P Parameter: Timepoint (hr) Value: 4
  misc_feature: MA Experiment 20000709 PARAMETER Experiment Name: At_15mM_NH4NO3_L-to-H_P Parameter: Tissue Value: Aerial
  misc_feature: MA Experiment 20000709 PARAMETER Experiment Name: At_15mM_NH4NO3_L-to-H_P Parameter: Treatment Value: 15mM NH4NO3 vs. 30mM Mannitol
  misc_feature: MA Experiment ID: 20000794 Result: Down-regulated in Transcription
  misc_feature: MA Experiment 20000794 PARAMETER Experiment Name: At_Petals_P Parameter: Age (day) Value: 23-25 days
  misc_feature: MA Experiment 20000794 PARAMETER Experiment Name: At_Petals_P Parameter: Plant Line Value: WS
  misc_feature: MA Experiment 20000794 PARAMETER Experiment Name: At_Petals_P Parameter: Tissue Value: Petals vs. Whole plant
  misc_feature: MA Experiment ID: 20001761 Result: Up-regulated in Transcription
  misc_feature: MA Experiment 20001761 PARAMETER Experiment Name: At_50mM_NH4NO3_L-to-H_P Parameter: Timepoint (hr) Value: 4
  misc_feature: MA Experiment 20001761 PARAMETER Experiment Name: At_50mM_NH4NO3_L-to-H_P Parameter: Tissue Value: Siliques
  misc_feature: MA Experiment 20001761 PARAMETER Experiment Name: At_50mM_NH4NO3_L-to-H_P Parameter: Treatment Value: 50mM NH4NO3 vs 100mM Mannitol
  misc_feature: MA Experiment ID: 20001773 Result: Up-regulated in Transcription
  misc_feature: MA Experiment 20001773 PARAMETER Experiment Name: At_Far-red-enriched-adult_P Parameter: Age (day) Value: 30
  misc_feature: MA Experiment 20001773 PARAMETER Experiment Name: At_Far-red-enriched-adult_P Parameter: Light Value: Far-red enriched vs. White
  misc_feature: MA Experiment 20001773 PARAMETER Experiment Name: At_Far-red-enriched-adult_P Parameter: Organism Value: A. thaliana
  misc_feature: MA Experiment 20001773 PARAMETER Experiment Name: At_Far-red-enriched-adult_P Parameter: Plant Line Value: Columbia
  misc_feature: MA Experiment 20001773 PARAMETER Experiment Name: At_Far-red-enriched-adult_P Parameter: Timepoint (hr) Value: 48
  misc_feature: MA Experiment 20001773 PARAMETER Experiment Name: At_Far-red-enriched-adult_P Parameter: Tissue Value: Aerial
  misc_feature: MA Experiment ID: 20001910 Result: Down-regulated in Transcription
  misc_feature: MA Experiment 20001910 PARAMETER Experiment Name: At_Drought_Reproduction_P Parameter: Age (day) Value: 37
  misc_feature: MA Experiment 20001910 PARAMETER Experiment Name: At_Drought_Reproduction_P Parameter: Organism Value: A. thaliana
  misc_feature: MA Experiment 20001910 PARAMETER Experiment Name: At_Drought_Reproduction_P Parameter: Plant Line Value: WS
  misc_feature: MA Experiment 20001910 PARAMETER Experiment Name: At_Drought_Reproduction_P Parameter: Timepoint (day) Value: 7
  misc_feature: MA Experiment 20001910 PARAMETER Experiment Name: At_Drought_Reproduction_P Parameter: Tissue Value: Flowers
  misc_feature: MA Experiment 20001910 PARAMETER Experiment Name: At_Drought_Reproduction_P Parameter: Treatment Value: Drought vs. No Drought
  misc_feature: MA Experiment ID: 20001911 Result: Down-regulated in Transcription
  misc_feature: MA Experiment 20001911 PARAMETER Experiment Name: At_Drought_Reproduction_P Parameter: Age (day) Value: 40
  misc_feature: MA Experiment 20001911 PARAMETER Experiment Name: At_Drought_Reproduction_P Parameter: Organism Value: A. thaliana
  misc_feature: MA Experiment 20001911 PARAMETER Experiment Name: At_Drought_Reproduction_P Parameter: Plant Line Value: WS
  misc_feature: MA Experiment 20001911 PARAMETER Experiment Name: At_Drought_Reproduction_P Parameter: Timepoint (day) Value: 10
  misc_feature: MA Experiment 20001911 PARAMETER Experiment Name: At_Drought_Reproduction_P Parameter: Tissue Value: Flowers
  misc_feature: MA Experiment 20001911 PARAMETER Experiment Name: At_Drought_Reproduction_P Parameter: Treatment Value: Drought vs. No Drought
aattccacaatcatccgatatcaaacaagctatggcgccctttccactctctttgatttttggaaagaaaaaacgtcgtcgcgacgacgagatacgaagacaaaagccgacgctcaagggtgttatgacggctttttttgccactgaagctgcaatatgcctcttgttgctggccggtatatctctaaccggcacagccgtggcactattcgcgtccatgccgctattcctcgtttttagccccgttcttgtacccgcgggtattgccaccactattcttgcttcaggtttaatggccggaggcacctctggtgtgtcgggtctcaccatcttaatgtggctctacaagaaatatacgggtagagactttccaattaaaattccaggtgctgccgcagcaggtggagctgccccagccgctcccgctgcccctgcccctgctgcacctgccgctaaaccagcagctaaaccagcagctaaaccgggcgcgtgaaaattagtcaaggacatagacaaggatgcatgacgatatggaaaaatttgctctacaaccattgaaattccataaattaaagatatttatccacttcttttttttgctaagtactaattattacgtactgatgaaactaaatttctcaatcgtcattctattgatgtatgccgtgctacagaaacaataacatatatatgcatgtttattgtttaatatttt

SEQ ID NO: 101050 - protein, 163 aa, Arabidopsis thaliana
  peptide (1)..(163): Ceres Seq. ID no. 13606794
  misc_feature (37)..(155): Pfam Name: Oleosin Pfam Description: Oleosin
  misc_feature (11)..(163): Homolog of NCBI NO: 15240816 NR Description: glycine-rich protein GRP20 [Arabidopsis thaliana]
  misc_feature (11)..(163): Homolog of NCBI NO: 15081213 NR Description: glycine-rich protein GRP20 [Arabidopsis thaliana]
  misc_feature (11)..(159): Homolog of NCBI NO: 15081227 NR Description: glycine-rich protein GRP20 [Arabidopsis thaliana]
  misc_feature (11)..(163): Homolog of NCBI NO: 15081220 NR Description: glycine-rich protein GRP20 [Arabidopsis thaliana]
  misc_feature (34)..(163): Homolog of NCBI NO: 1076453 NR Description: oleosin - rape >gi|558553|emb|CAA57545.1| oleosin
  misc_feature (19)..(161): Homolog of NCBI NO: 1076452 NR Description: oleosin - rape >gi|558551|emb|CAA57544.1| oleosin
  misc_feature (26)..(161): Homolog of NCBI NO: 7488519 NR Description: anther-specific protein BNA237 - turnip
  misc_feature (19)..(161): Homolog of NCBI NO: 123952 NR Description: MICROSPORE-SPECIFIC PROTEIN I3
  misc_feature (36)..(139): Homolog of NCBI NO: 7488469 NR Description: oleosin-like protein - rape
  misc_feature (128)..(163): Homolog of NCBI NO: 7488469 NR Description: oleosin-like protein - rape
IPQSSDIKQAMAPFPLSLIFGKKKRRRDDEIRRQKPTLKGVMTAFFATEAAICLLLLAGISLTGTAVALFASMPLFLVFSPVLVPAGIATTILASGLMAGGTSGVSGLTILMWLYKKYTGRDFPIKIPGAAAAGGAAPAAPAAPAPAAPAAKPAAKPAAKPGA

SEQ ID NO: 101051 - protein, 153 aa, Arabidopsis thaliana
  peptide (1)..(153): Ceres Seq. ID no. 13606795
  misc_feature (27)..(145): Pfam Name: Oleosin Pfam Description: Oleosin
  misc_feature (1)..(153): Homolog of NCBI NO: 15240816 NR Description: glycine-rich protein GRP20 [Arabidopsis thaliana]
  misc_feature (1)..(153): Homolog of NCBI NO: 15081213 NR Description: glycine-rich protein GRP20 [Arabidopsis thaliana]
  misc_feature (1)..(149): Homolog of NCBI NO: 15081227 NR Description: glycine-rich protein GRP20 [Arabidopsis thaliana]
  misc_feature (1)..(153): Homolog of NCBI NO: 15081220 NR Description: glycine-rich protein GRP20 [Arabidopsis thaliana]
  misc_feature (24)..(153): Homolog of NCBI NO: 1076453 NR Description: oleosin - rape >gi|558553|emb|CAA57545.1| oleosin
  misc_feature (9)..(151): Homolog of NCBI NO: 1076452 NR Description: oleosin - rape >gi|558551|emb|CAA57544.1| oleosin
  misc_feature (16)..(151): Homolog of NCBI NO: 7488519 NR Description: anther-specific protein BNA237 - turnip
  misc_feature (9)..(151): Homolog of NCBI NO: 123952 NR Description: MICROSPORE-SPECIFIC PROTEIN I3
  misc_feature (26)..(129): Homolog of NCBI NO: 7488469 NR Description: oleosin-like protein - rape
  misc_feature (118)..(153): Homolog of NCBI NO: 7488469 NR Description: oleosin-like protein - rape
MAPFPLSLIFGKKKRRRDDEIRRQKPTLKGVMTAFFATEAAICLLLLAGISLTGTAVALFASMPLFLVFSPVLVPAGIATTILASGLMAGGTSGVSGLTILMWLYKKYTGRDFPIKIPGAAAAGGAAPAAPAAPAPAAPAAKPAAKPAAKPGA

SEQ ID NO: 101052 - protein, 122 aa, Arabidopsis thaliana
  peptide (1)..(122): Ceres Seq. ID no. 13606796
  misc_feature (1)..(114): Pfam Name: Oleosin Pfam Description: Oleosin
  misc_feature (1)..(122): Homolog of NCBI NO: 15240816 NR Description: glycine-rich protein GRP20 [Arabidopsis thaliana]
  misc_feature (1)..(122): Homolog of NCBI NO: 15081213 NR Description: glycine-rich protein GRP20 [Arabidopsis thaliana]
  misc_feature (1)..(118): Homolog of NCBI NO: 15081227 NR Description: glycine-rich protein GRP20 [Arabidopsis thaliana]
  misc_feature (1)..(122): Homolog of NCBI NO: 15081220 NR Description: glycine-rich protein GRP20 [Arabidopsis thaliana]
  misc_feature (1)..(122): Homolog of NCBI NO: 1076453 NR Description: oleosin - rape >gi|558553|emb|CAA57545.1| oleosin
  misc_feature (1)..(120): Homolog of NCBI NO: 1076452 NR Description: oleosin - rape >gi|558551|emb|CAA57544.1| oleosin
  misc_feature (1)..(120): Homolog of NCBI NO: 7488519 NR Description: anther-specific protein BNA237 - turnip
  misc_feature (1)..(120): Homolog of NCBI NO: 123952 NR Description: MICROSPORE-SPECIFIC PROTEIN I3
  misc_feature (1)..(98): Homolog of NCBI NO: 7488469 NR Description: oleosin-like protein - rape
  misc_feature (87)..(122): Homolog of NCBI NO: 7488469 NR Description: oleosin-like protein - rape
MTAFFATEAAICLLLLAGISLTGTAVALFASMPLFLVFSPVLVPAGIATTILASGLMAGGTSGVSGLTILMWLYKKYTGRDFPIKIPGAAAAGGAAPAAPAAPAPAAPAAKPAAKPAAKPGA

SEQ ID NO: 101053 - DNA, 1114 bp, Arabidopsis thaliana
  misc_feature (1)..(1114): Ceres Seq. ID no. 13606820
  misc_feature: MA Experiment ID: 108434 Result: Down-regulated in Transcription
  misc_feature: MA Experiment 108434 PARAMETER Experiment Name: At_Root_Tips_cDNA_P Parameter: Tissue Value: Root Tips
  misc_feature: MA Experiment ID: 108561 Result: Up-regulated in Transcription
  misc_feature: MA Experiment 108561 PARAMETER Experiment Name: At_100uM_ABA_cDNA_P Parameter: Timepoint (hr) Value: 6
  misc_feature: MA Experiment 108561 PARAMETER Experiment Name: At_100uM_ABA_cDNA_P Parameter: Tissue Value: Aerial
  misc_feature: MA Experiment 108561 PARAMETER Experiment Name: At_100uM_ABA_cDNA_P Parameter: Treatment Value: 100uM ABA vs. No Treatment
  misc_feature: MA Experiment ID: 20000072 Result: Up-regulated in Transcription
  misc_feature: MA Experiment 20000072 PARAMETER Experiment Name: At_100uM_ABA_Mutants_cDNA_P Parameter: Plant Line Value: CS8105
  misc_feature: MA Experiment 20000072 PARAMETER Experiment Name: At_100uM_ABA_Mutants_cDNA_P Parameter: Timepoint (hr) Value: 6
  misc_feature: MA Experiment 20000072 PARAMETER Experiment Name: At_100uM_ABA_Mutants_cDNA_P Parameter: Tissue Value: Aerial
  misc_feature: MA Experiment 20000072 PARAMETER Experiment Name: At_100uM_ABA_Mutants_cDNA_P Parameter: Treatment Value: 100uM ABA vs. No Treatment
  misc_feature: MA Experiment ID: 20000184 Result: Up-regulated in Transcription
  misc_feature: MA Experiment 20000184 PARAMETER Experiment Name: At_Shoots__P Parameter: Age (day) Value: 7
  misc_feature: MA Experiment 20000184 PARAMETER Experiment Name: At_Shoots__P Parameter: Tissue Value: Shoots vs. Whole Plant
  misc_feature: MA Experiment ID: 20000227 Result: Down-regulated in Transcription
  misc_feature: MA Experiment 20000227 PARAMETER Experiment Name: At_Root-Tips-vs-Tops_P Parameter: Tissue Value: Root Tips vs. Root Tops
  misc_feature: MA Experiment ID: 20000264 Result: Up-regulated in Transcription
  misc_feature: MA Experiment 20000264 PARAMETER Experiment Name: At_Open_Flower_P Parameter: Age (day) Value: 21
  misc_feature: MA Experiment 20000264 PARAMETER Experiment Name: At_Open_Flower_P Parameter: Plant Line Value: WS
  misc_feature: MA Experiment 20000264 PARAMETER Experiment Name: At_Open_Flower_P Parameter: Tissue Value: Open Flower vs. Whole Plant
  misc_feature: MA Experiment ID: 20000265 Result: Up-regulated in Transcription
  misc_feature: MA Experiment 20000265 PARAMETER Experiment Name: At_Open_Flower_P Parameter: Age (day) Value: 21
  misc_feature: MA Experiment 20000265 PARAMETER Experiment Name: At_Open_Flower_P Parameter: Plant Line Value: WS
  misc_feature: MA Experiment 20000265 PARAMETER Experiment Name: At_Open_Flower_P Parameter: Tissue Value: Closed Flower vs. Whole Plant
  misc_feature: MA Experiment ID: 20000286 Result: Up-regulated in Transcription
  misc_feature: MA Experiment 20000286 PARAMETER Experiment Name: At_Open_Flower_P Parameter: Age (day) Value: 21
  misc_feature: MA Experiment 20000286 PARAMETER Experiment Name: At_Open_Flower_P Parameter: Plant Line Value: WS
  misc_feature: MA Experiment 20000286 PARAMETER Experiment Name: At_Open_Flower_P Parameter: Tissue Value: Half Open vs. Whole Plant
  misc_feature: MA Experiment ID: 20000794 Result: Up-regulated in Transcription
  misc_feature: MA Experiment 20000794 PARAMETER Experiment Name: At_Petals_P Parameter: Age (day) Value: 23-25 days
  misc_feature: MA Experiment 20000794 PARAMETER Experiment Name: At_Petals_P Parameter: Plant Line Value: WS
  misc_feature: MA Experiment 20000794 PARAMETER Experiment Name: At_Petals_P Parameter: Tissue Value: Petals vs. Whole plant
  misc_feature: MA Experiment ID: 20001904 Result: Up-regulated in Transcription
  misc_feature: MA Experiment 20001904 PARAMETER Experiment Name: At_Drought_Reproduction_P Parameter: Age (day) Value: 37
  misc_feature: MA Experiment 20001904 PARAMETER Experiment Name: At_Drought_Reproduction_P Parameter: Organism Value: A. thaliana
  misc_feature: MA Experiment 20001904 PARAMETER Experiment Name: At_Drought_Reproduction_P Parameter: Plant Line Value: WS
  misc_feature: MA Experiment 20001904 PARAMETER Experiment Name: At_Drought_Reproduction_P Parameter: Timepoint (day) Value: 7
  misc_feature: MA Experiment 20001904 PARAMETER Experiment Name: At_Drought_Reproduction_P Parameter: Tissue Value: Rosettes
  misc_feature: MA Experiment 20001904 PARAMETER Experiment Name: At_Drought_Reproduction_P Parameter: Treatment Value: Drought vs. No Drought
  misc_feature: MA Experiment ID: 20001910 Result: Up-regulated in Transcription
  misc_feature: MA Experiment 20001910 PARAMETER Experiment Name: At_Drought_Reproduction_P Parameter: Age (day) Value: 37
  misc_feature: MA Experiment 20001910 PARAMETER Experiment Name: At_Drought_Reproduction_P Parameter: Organism Value: A. thaliana
  misc_feature: MA Experiment 20001910 PARAMETER Experiment Name: At_Drought_Reproduction_P Parameter: Plant Line Value: WS
  misc_feature: MA Experiment 20001910 PARAMETER Experiment Name: At_Drought_Reproduction_P Parameter: Timepoint (day) Value: 7
  misc_feature: MA Experiment 20001910 PARAMETER Experiment Name: At_Drought_Reproduction_P Parameter: Tissue Value: Flowers
  misc_feature: MA Experiment 20001910 PARAMETER Experiment Name: At_Drought_Reproduction_P Parameter: Treatment Value: Drought vs. No Drought
atgatgaggtcgtttgtctcgttgatttctcttctccttcttctctcattttcttcatctgttctctcaaccaaaaagtcatcatttcaaaaacttccggtgccaggaaacagaacaggccctgaagctttcgcttttgattccaccggaaaaggattctacaccggagtcaccggcggtaaaatcctaaaatatcttccaaagaaaggttatgtcgactttgcccagatcacaaactcttcgaagtcttcgttgtgcgacggagcacttggaaccactaacgtcgaaaaatgtggtcgaccagccggaatagccttcaacacgaaaacaggtgatctttacgtcgcagatgctgcattgggtctccacgtcatccctcgccgtgggggtttggctaagaagatcgccgacagtgtcggcggcaagccctttttgtttcttgacgggcttgacgtagatcccactaccggcgtcgtctatttcacttccttcagctcaacatttggccctagggatgtgttgaaagcagtggcaacaaaagactcgaccggtaagttcttcaaatacgatccatcaaaaaaggtcgtgactgtattgatggaaggtcttagcggctcagccggatgtgccgttagctcagatggttcattcgtgctggttggtcagttcacaaaaagtaacatcaagaggtattggatcaaaggatccaaagctggtacttctgaagacttcaccaactcggtctcgaaccctgacaacatcaagaggatcggttctactggaaacttttgggttgcttcggtcgtgaactcagccaccggaccgacaaacccttcggcggttaaagtcagttctgccggtaaagtgcttcagaccattcccctaaaagacaagtttggggatactttggttagtgaagttaacgaatacaaaggacagctttacatcggagctctttttggtcctttcgccggaattcttaagctttaaagtgaacatgttattagtatgggttagaattaaagtgattgaatcgaaataaatatggttacaaagtcttgacggatcaatgtacgctcatgttgattctgttcaaataaatatgatttttttt

SEQ ID NO: 101054 - protein, 329 aa, Arabidopsis thaliana
  peptide (1)..(329): Ceres Seq. ID no. 13606821
  misc_feature (3)..(324): Pfam Name: Strictosidine synthase Pfam Description: Strictosidine synthase
  misc_feature (1)..(329): Homolog of NCBI NO: 21431845 NR Description: Strictosidine synthase 3 precursor (SS-3)
  misc_feature (2)..(329): Homolog of NCBI NO: 30698979 NR Description: strictosidine synthase family [Arabidopsis
  misc_feature (2)..(315): Homolog of NCBI NO: 1754987 NR Description: strictosidine synthase
  misc_feature (2)..(329): Homolog of NCBI NO: 15221106 NR Description: strictosidine synthase family [Arabidopsis
  misc_feature (2)..(329): Homolog of NCBI NO: 1754983 NR Description: strictosidine synthase >gi|1754985|gb|AAB40594.1|
  misc_feature (2)..(329): Homolog of NCBI NO: 15221105 NR Description: strictosidine synthase family [Arabidopsis
  misc_feature (39)..(266): Homolog of NCBI NO: 11280567 NR Description: hypothetical protein F24I3.110 - Arabidopsis >gi|6911873|emb|CAB72173.1| putative protein [Arabidopsis
  misc_feature (39)..(266): Homolog of NCBI NO: 30694556 NR Description: strictosidine synthase-related [Arabidopsis
  misc_feature (274)..(329): Homolog of NCBI NO: 11280567 NR Description: hypothetical protein F24I3.110 - Arabidopsis >gi|6911873|emb|CAB72173.1| putative protein [Arabidopsis
  misc_feature (274)..(329): Homolog of NCBI NO: 30694556 NR Description: strictosidine synthase-related [Arabidopsis
MMRSFVSLISLLLLLSFSSSVLSTKKSSFQKLPVPGNRTGPEAFAFDSTGKGFYTGVTGGKILKYLPKKGYVDFAQITNSSKSSLCDGALGTTNVEKCGRPAGIAFNTKTGDLYVADAALGLHVIPRRGGLAKKIADSVGGKPFLFLDGLDVDPTTGVVYFTSFSSTFGPRDVLKAVATKDSTGKFFKYDPSKKVVTVLMEGLSGSAGCAVSSDGSFVLVGQFTKSNIKRYWIKGSKAGTSEDFTNSVSNPDNIKRIGSTGNFWVASVVNSATGPTNPSAVKVSSAGKVLQTIPLKDKFGDTLVSEVNEYKGQLYIGALFGPFAGILKL

SEQ ID NO: 101055 - protein, 328 aa, Arabidopsis thaliana; identical to SEQ ID NO: 88599
  peptide (1)..(328): Ceres Seq. ID no. 13606822
  misc_feature (2)..(323): Pfam Name: Strictosidine synthase Pfam Description: Strictosidine synthase
  misc_feature (1)..(328): Homolog of NCBI NO: 21431845 NR Description: Strictosidine synthase 3 precursor (SS-3)
  misc_feature (1)..(328): Homolog of NCBI NO: 30698979 NR Description: strictosidine synthase family [Arabidopsis
  misc_feature (1)..(314): Homolog of NCBI NO: 1754987 NR Description: strictosidine synthase
  misc_feature (1)..(328): Homolog of NCBI NO: 15221106 NR Description: strictosidine synthase family [Arabidopsis
  misc_feature (1)..(328): Homolog of NCBI NO: 1754983 NR Description: strictosidine synthase >gi|1754985|gb|AAB40594.1|
  misc_feature (1)..(328): Homolog of NCBI NO: 15221105 NR Description: strictosidine synthase family [Arabidopsis
  misc_feature (38)..(265): Homolog of NCBI NO: 11280567 NR Description: hypothetical protein F24I3.110 - Arabidopsis >gi|6911873|emb|CAB72173.1| putative protein [Arabidopsis
  misc_feature (38)..(265): Homolog of NCBI NO: 30694556 NR Description: strictosidine synthase-related [Arabidopsis
  misc_feature (273)..(328): Homolog of NCBI NO: 11280567 NR Description: hypothetical protein F24I3.110 - Arabidopsis >gi|6911873|emb|CAB72173.1| putative protein [Arabidopsis
  misc_feature (273)..(328): Homolog of NCBI NO: 30694556 NR Description: strictosidine synthase-related [Arabidopsis

SEQ ID NO: 101056 - DNA, 1662 bp, Arabidopsis thaliana
  misc_feature (1)..(1662): Ceres Seq. ID no. 13606823
  misc_feature: MA Experiment ID: 108434 Result: Up-regulated in Transcription
  misc_feature: MA Experiment 108434 PARAMETER Experiment Name: At_Root_Tips_cDNA_P Parameter: Tissue Value: Root Tips
  misc_feature: MA Experiment ID: 108461 Result: Down-regulated in Transcription
  misc_feature: MA Experiment 108461 PARAMETER Experiment Name: At_Germinating_Seeds_cDNA_P Parameter: Age (day) Value: 1 vs. 0
  misc_feature: MA Experiment 108461 PARAMETER Experiment Name: At_Germinating_Seeds_cDNA_P Parameter: Tissue Value: Germinating Seeds
  misc_feature: MA Experiment ID: 108462 Result: Down-regulated in Transcription
  misc_feature: MA Experiment 108462 PARAMETER Experiment Name: At_Germinating_Seeds_cDNA_P Parameter: Age (day) Value: 2 vs. 0
  misc_feature: MA Experiment 108462 PARAMETER Experiment Name: At_Germinating_Seeds_cDNA_P Parameter: Tissue Value: Germinating Seeds
  misc_feature: MA Experiment ID: 108463 Result: Down-regulated in Transcription
  misc_feature: MA Experiment 108463 PARAMETER Experiment Name: At_Germinating_Seeds_cDNA_P Parameter: Age (day) Value: 3 vs. 0
  misc_feature: MA Experiment 108463 PARAMETER Experiment Name: At_Germinating_Seeds_cDNA_P Parameter: Tissue Value: Germinating Seeds
  misc_feature: MA Experiment ID: 108464 Result: Down-regulated in Transcription
  misc_feature: MA Experiment 108464 PARAMETER Experiment Name: At_Germinating_Seeds_cDNA_P Parameter: Age (day) Value: 4 vs. 0
  misc_feature: MA Experiment 108464 PARAMETER Experiment Name: At_Germinating_Seeds_cDNA_P Parameter: Tissue Value: Germinating Seeds
  misc_feature: MA Experiment ID: 108473 Result: Down-regulated in Transcription
  misc_feature: MA Experiment 108473 PARAMETER Experiment Name: At_Drought_Flowers_cDNA_P Parameter: Timepoint (hr) Value: 7 d
  misc_feature: MA Experiment 108473 PARAMETER Experiment Name: At_Drought_Flowers_cDNA_P Parameter: Tissue Value: Flower
  misc_feature: MA Experiment 108473 PARAMETER Experiment Name: At_Drought_Flowers_cDNA_P Parameter: Treatment Value: Drought vs. No Drought
  misc_feature: MA Experiment ID: 108501 Result: Down-regulated in Transcription
  misc_feature: MA Experiment 108501 PARAMETER Experiment Name: At_ap2_floral_buds_cDNA_P Parameter: Plant Line Value: ap2 (Ler.)
  misc_feature: MA Experiment 108501 PARAMETER Experiment Name: At_ap2_floral_buds_cDNA_P Parameter: Tissue Value: Closed Flower
  misc_feature: MA Experiment ID: 108573 Result: Down-regulated in Transcription
  misc_feature: MA Experiment 108573 PARAMETER Experiment Name: At_Drought_cDNA_P Parameter: Timepoint (hr) Value: 6
  misc_feature: MA Experiment 108573 PARAMETER Experiment Name: At_Drought_cDNA_P Parameter: Tissue Value: Aerial
  misc_feature: MA Experiment 108573 PARAMETER Experiment Name: At_Drought_cDNA_P Parameter: Treatment Value: Drought vs. No Drought
  misc_feature: MA Experiment ID: 20000068 Result: Up-regulated in Transcription
  misc_feature: MA Experiment ID: 20000087 Result: Up-regulated in Transcription
  misc_feature: MA Experiment 20000087 PARAMETER Experiment Name: At_100uM_ABA_Mutants_cDNA_P Parameter: Plant Line Value: WS
  misc_feature: MA Experiment 20000087 PARAMETER Experiment Name: At_100uM_ABA_Mutants_cDNA_P Parameter: Timepoint (hr) Value: 6
  misc_feature: MA Experiment 20000087 PARAMETER Experiment Name: At_100uM_ABA_Mutants_cDNA_P Parameter: Tissue Value: Aerial
  misc_feature: MA Experiment 20000087 PARAMETER Experiment Name: At_100uM_ABA_Mutants_cDNA_P Parameter: Treatment Value: 100uM ABA vs. No Treatment
  misc_feature: MA Experiment ID: 20000265 Result: Up-regulated in Transcription
  misc_feature: MA Experiment 20000265 PARAMETER Experiment Name: At_Open_Flower_P Parameter: Age (day) Value: 21
  misc_feature: MA Experiment 20000265 PARAMETER Experiment Name: At_Open_Flower_P Parameter: Plant Line Value: WS
  misc_feature: MA Experiment 20000265 PARAMETER Experiment Name: At_Open_Flower_P Parameter: Tissue Value: Closed Flower vs. Whole Plant
  misc_feature: MA Experiment ID: 20000286 Result: Up-regulated in Transcription
  misc_feature: MA Experiment 20000286 PARAMETER Experiment Name: At_Open_Flower_P Parameter: Age (day) Value: 21
  misc_feature: MA Experiment 20000286 PARAMETER Experiment Name: At_Open_Flower_P Parameter: Plant Line Value: WS
  misc_feature: MA Experiment 20000286 PARAMETER Experiment Name: At_Open_Flower_P Parameter: Tissue Value: Half Open vs. Whole Plant
  misc_feature: MA Experiment ID: 20001910 Result: Down-regulated in Transcription
  misc_feature: MA Experiment 20001910 PARAMETER Experiment Name: At_Drought_Reproduction_P Parameter: Age (day) Value: 37
  misc_feature: MA Experiment 20001910 PARAMETER Experiment Name: At_Drought_Reproduction_P Parameter: Organism Value: A. thaliana
  misc_feature: MA Experiment 20001910 PARAMETER Experiment Name: At_Drought_Reproduction_P Parameter: Plant Line Value: WS
  misc_feature: MA Experiment 20001910 PARAMETER Experiment Name: At_Drought_Reproduction_P Parameter: Timepoint (day) Value: 7
  misc_feature: MA Experiment 20001910 PARAMETER Experiment Name: At_Drought_Reproduction_P Parameter: Tissue Value: Flowers
  misc_feature: MA Experiment 20001910 PARAMETER Experiment Name: At_Drought_Reproduction_P Parameter: Treatment Value: Drought vs. No Drought
aaacctgtattttatcaattaccacactttgtctaagcaaaatggatttattactcatatccttaaccactatcataatcgccgcctacatgcaaaatctacgacgtcggggatccaacataccgccgggaccaccaacgcgatttctggtcggaaaccttcatcaactgaaaccattatggacgcagtctttctccgagtggtcacagacttatggccccatcatatcggtgtggttaggatcacagctagctgttgtggtctcgagctctgacttagccaaacaagtgttgagagacaaagactaccaactctgtaaccgacacagaaccgcaaggatgactcagaacggcagcgatcttatttggtctgactacggagcacattatgtgaaaatgagaaaactctgtacactcgagctcttttctttgaaaagcatagagtgtttcaggtcgatgagagagatggaagtaagttccatggttaagtcgattttcaatgacttcatgagcgatgatcagaaaccagtggtgttgaggaactatctagattctgttgctttgaacattgtttcaagattagttatcgggaaaacattcgaacccaaagatggaagagagtttagatcaattgtagaaagggagactcgcttgcccggcgcaaccaagatgcttgattacaccgtttggcttaaacgtctttcgtcatggttcactagcgacaaggcgttcatgaagcacatggctcggaaaagaaattggtttaaacgagctgtaatggatgaagtatatggaggaagagatcaaaagtgttttgttcagagtctgttagagttgaaagagaaggatgagctgaccgaggagactgtgatgggactggtctggaacatgttaactgcaggagctgacacaaccgccataactattgaatgggcaatggcagagatgatcagatgcccgaccgtgaaagaaaaggtgcaggatgagcttgattccgtggttggatccggacggttaatgtctgatgcagatatcccaaaactgccgtttctgcaatgcgtactcaaagaagctctccggcttcaccctccaacaccattgatgcttccacacaaggccagcgaatcagttcaggtaggtgggtacaaagttcctaagggagccacggtttatgtcaacgtgcaggcgattgctcgagatcctgcaaactggagtaacccagatgagtttagaccagagaggtttcttgtggaggaaacggacgttaaaggtcaagactttcgggttcttccgtttgggtcgggaagacgggtgtgtccagccgctcaactcagcctcaatatgatgacattagcactaggtagtttgttgcattgtttctcatggacatcctctacacctcgagaacacattgacatgaccgagaagcctggattagtttgttacatgaaggctccattgcaggctctagcttcgtccaggctgccacaagagttatacctttaacttttaactgagatagattatattaatcaacataagataaagagagattctcaattgcgaaaaacagatgtagttatggcaagatttaggacatggatgatgacatggttcgtacaaacagaatgtagctattgatagtaaataaactaaatattcc

SEQ ID NO: 101057 - protein, 500 aa, Arabidopsis thaliana; identical to SEQ ID NO: 43749
  peptide (1)..(500): Ceres Seq. ID no. 13606824
  misc_feature (14)..(500): Homolog of NCBI NO: 15221296 NR Description: cytochrome P450, putative [Arabidopsis thaliana]
  misc_feature (14)..(493): Homolog of NCBI NO: 15221294 NR Description: cytochrome P450, putative [Arabidopsis thaliana]
  misc_feature (14)..(493): Homolog of NCBI NO: 21595281 NR Description: putative cytochrome P450 [Arabidopsis thaliana]
  misc_feature (14)..(499): Homolog of NCBI NO: 30688445 NR Description: cytochrome P450 98A3 [Arabidopsis thaliana]
  misc_feature (16)..(499): Homolog of NCBI NO: 22651521 NR Description: p-coumaroyl shikimate 3'-hydroxylase isoform 2

SEQ ID NO: 101058 - protein, 487 aa, Arabidopsis thaliana; identical to SEQ ID NO: 43750
  peptide (1)..(487): Ceres Seq. ID no. 13606825
  misc_feature (1)..(487): Homolog of NCBI NO: 15221296 NR Description: cytochrome P450, putative [Arabidopsis thaliana]
  misc_feature (1)..(480): Homolog of NCBI NO: 15221294 NR Description: cytochrome P450, putative [Arabidopsis thaliana]
  misc_feature (1)..(480): Homolog of NCBI NO: 21595281 NR Description: putative cytochrome P450 [Arabidopsis thaliana]
  misc_feature (1)..(486): Homolog of NCBI NO: 30688445 NR Description: cytochrome P450 98A3 [Arabidopsis thaliana]
  misc_feature (3)..(486): Homolog of NCBI NO: 22651521 NR Description: p-coumaroyl shikimate 3'-hydroxylase isoform 2

SEQ ID NO: 101059 - protein, 471 aa, Arabidopsis thaliana; identical to SEQ ID NO: 43751
  peptide (1)..(471): Ceres Seq. ID no. 13606826
  misc_feature (1)..(471): Homolog of NCBI NO: 15221296 NR Description: cytochrome P450, putative [Arabidopsis thaliana]
  misc_feature (1)..(464): Homolog of NCBI NO: 15221294 NR Description: cytochrome P450, putative [Arabidopsis thaliana]
  misc_feature (1)..(464): Homolog of NCBI NO: 21595281 NR Description: putative cytochrome P450 [Arabidopsis thaliana]
  misc_feature (1)..(470): Homolog of NCBI NO: 30688445 NR Description: cytochrome P450 98A3 [Arabidopsis thaliana]
  misc_feature (1)..(470): Homolog of NCBI NO: 22651521 NR Description: p-coumaroyl shikimate 3'-hydroxylase isoform 2

SEQ ID NO: 101060 - DNA, 775 bp, Arabidopsis thaliana
  misc_feature (1)..(775): Ceres Seq. ID no. 13606831
  misc_feature: MA Experiment ID: 108576 Result: Up-regulated in Transcription
  misc_feature: MA Experiment 108576 PARAMETER Experiment Name: At_42deg_Heat_cDNA_P Parameter: Temperature (deg C) Value: 42 vs. 22
  misc_feature: MA Experiment 108576 PARAMETER Experiment Name: At_42deg_Heat_cDNA_P Parameter: Timepoint (hr) Value: 1
  misc_feature: MA Experiment 108576 PARAMETER Experiment Name: At_42deg_Heat_cDNA_P Parameter: Tissue Value: Aerial
  misc_feature: MA Experiment ID: 20000087 Result: Down-regulated in Transcription
  misc_feature: MA Experiment 20000087 PARAMETER Experiment Name: At_100uM_ABA_Mutants_cDNA_P Parameter: Plant Line Value: WS
  misc_feature: MA Experiment 20000087 PARAMETER Experiment Name: At_100uM_ABA_Mutants_cDNA_P Parameter: Timepoint (hr) Value: 6
  misc_feature: MA Experiment 20000087 PARAMETER Experiment Name: At_100uM_ABA_Mutants_cDNA_P Parameter: Tissue Value: Aerial
  misc_feature: MA Experiment 20000087 PARAMETER Experiment Name: At_100uM_ABA_Mutants_cDNA_P Parameter: Treatment Value: 100uM ABA vs. No Treatment
  misc_feature: MA Experiment ID: 20000227 Result: Down-regulated in Transcription
  misc_feature: MA Experiment 20000227 PARAMETER Experiment Name: At_Root-Tips-vs-Tops_P Parameter: Tissue Value: Root Tips vs. Root Tops
  misc_feature: MA Experiment ID: 20000495 Result: Down-regulated in Transcription
  misc_feature: MA Experiment 20000495 PARAMETER Experiment Name: At_Guard_Cells_P Parameter: Harvest Date Value: 8/2/2002
  misc_feature: MA Experiment 20000495 PARAMETER Experiment Name: At_Guard_Cells_P Parameter: Organism Value: A. thaliana
  misc_feature: MA Experiment 20000495 PARAMETER Experiment Name: At_Guard_Cells_P Parameter: Tissue Value: Guard Cells vs. Leaves
  misc_feature: MA Experiment ID: 20001557 Result: Down-regulated in Transcription
  misc_feature: MA Experiment 20001557 PARAMETER Experiment Name: At_Drought_Soil_Dry_P Parameter: Age (day) Value: 27
  misc_feature: MA Experiment 20001557 PARAMETER Experiment Name: At_Drought_Soil_Dry_P Parameter: Organism Value: A. thaliana
  misc_feature: MA Experiment 20001557 PARAMETER Experiment Name: At_Drought_Soil_Dry_P Parameter: Plant Line Value: WS
  misc_feature: MA Experiment 20001557 PARAMETER Experiment Name: At_Drought_Soil_Dry_P Parameter: Post Timepoint (hr) Value: 3
  misc_feature: MA Experiment 20001557 PARAMETER Experiment Name: At_Drought_Soil_Dry_P Parameter: Post-Treatment Value: Re-Water vs. No Drought
  misc_feature: MA Experiment 20001557 PARAMETER Experiment Name: At_Drought_Soil_Dry_P Parameter: Timepoint (day) Value: 13
  misc_feature: MA Experiment 20001557 PARAMETER Experiment Name: At_Drought_Soil_Dry_P Parameter: Treatment Value: Drought vs. No Drought
acacaatcattcgttctctctctcaaagtctcaatccatctccagagagtagtgtgtttttagtggaggaagaatcagattcaaaagccaaaatcaaagcttggtgatgggatctggagctggcaatttcctcaaggttcttctcaggaacttcgatgttcttgctgggcctgtggttagtctcgtttatcctctatatgcttcagttcaagcgattgaaactcaatctcatgctgatgacaaacaatggctaacttattgggtcctttattcattacttacactcatcgagctcacattcgccaaactcatcgaatggttaccgatatggtcatacatgaagctgatcttgacttgctggcttgttattccctactttagtggcgctgcttatgtctatgaacattttgtgagaccggtgtttgttaaccctcggagcattaacatttggtatgtgccaaagaagatggatatcttcagaaaaccagacgatgtgttaacagctgctgagaagtacattgcagagaatggacctgatgcttttgagaagatcttaagccgggctgataaatcaaaaagatataataagcatgaatatgaaagctatgaaacgatgtatggtgagggttatcagtactaagagaaatttgaaaaagcttttaattttagaatgtgtgaagcaacttcatgtctttgttgtttgtttatgcttcctttttgtggatctctctcgtgtaaaaaagttgctaattaaaataaagatgctttctgctcc

SEQ ID NO: 101061 - protein, 177 aa, Arabidopsis thaliana; identical to SEQ ID NO: 24967
  peptide (1)..(177): Ceres Seq. ID no. 13606832
  misc_feature (9)..(106): Pfam Name: TB2/DP1, HVA22 family Pfam Description: TB2/DP1, HVA22 family
  misc_feature (1)..(177): Homolog of NCBI NO: 15221266 NR Description: AtHVA22a [Arabidopsis thaliana]
  misc_feature (3)..(177): Homolog of NCBI NO: 15222421 NR Description: AtHVA22c [Arabidopsis thaliana]
  misc_feature (1)..(162): Homolog of NCBI NO: 15241840 NR Description: AtHVA22b-related protein [Arabidopsis thaliana]
  misc_feature (1)..(162): Homolog of NCBI NO: 4884934 NR Description: AtHVA22b [Arabidopsis thaliana]
  misc_feature (34)..(158): Homolog of NCBI NO: 34910810 NR Description: P0042A10.34 [Oryza sativa (japonica
  misc_feature (19)..(106): Homolog of NCBI NO: 18423191 NR Description: expressed protein [Arabidopsis thaliana] AtHVA22e [Arabidopsis thaliana] AtHVA22e [Arabidopsis thaliana] >gi|21537153|gb|AAM61494.1|
  misc_feature (20)..(106): Homolog of NCBI NO: 18416458 NR Description: abscisic acid-induced - like protein [Arabidopsis >gi|4884938|gb|AAD31882.1| AtHVA22d [Arabidopsis thaliana] AtHVA22d [Arabidopsis thaliana] >gi|16604611|gb|AAL24098.1|
  misc_feature (12)..(103): Homolog of NCBI NO: 1076715 NR Description: abscisic acid-induced protein HVA22 - barley
  misc_feature (26)..(106): Homolog of NCBI NO: 8777395 NR Description: gene_id:MFB16.12~pir||T05517~similar to unknown
  misc_feature (12)..(103): Homolog of NCBI NO: 33342176 NR Description: hypothetical protein [Triticum aestivum]

SEQ ID NO: 101062 - protein, 100 aa, Arabidopsis thaliana; identical to SEQ ID NO: 24968
  peptide (1)..(100): Ceres Seq. ID no. 13606833
  misc_feature (1)..(100): Homolog of NCBI NO: 15221266 NR Description: AtHVA22a [Arabidopsis thaliana]
  misc_feature (1)..(100): Homolog of NCBI NO: 15222421 NR Description: AtHVA22c [Arabidopsis thaliana]
  misc_feature (1)..(85): Homolog of NCBI NO: 15241840 NR Description: AtHVA22b-related protein [Arabidopsis thaliana]
  misc_feature (1)..(85): Homolog of NCBI NO: 4884934 NR Description: AtHVA22b [Arabidopsis thaliana]
  misc_feature (1)..(81): Homolog of NCBI NO: 34910810 NR Description: P0042A10.34 [Oryza sativa (japonica
  misc_feature (1)..(29): Homolog of NCBI NO: 18423191 NR Description: expressed protein [Arabidopsis thaliana] AtHVA22e [Arabidopsis thaliana] AtHVA22e [Arabidopsis thaliana] >gi|21537153|gb|AAM61494.1|
  misc_feature (1)..(29): Homolog of NCBI NO: 18416458 NR Description: abscisic acid-induced - like protein [Arabidopsis >gi|4884938|gb|AAD31882.1| AtHVA22d [Arabidopsis thaliana] AtHVA22d [Arabidopsis thaliana] >gi|16604611|gb|AAL24098.1|
  misc_feature (1)..(26): Homolog of NCBI NO: 1076715 NR Description: abscisic acid-induced protein HVA22 - barley
  misc_feature (1)..(29): Homolog of NCBI NO: 8777395 NR Description: gene_id:MFB16.12~pir||T05517~similar to unknown
  misc_feature (1)..(26): Homolog of NCBI NO: 33342176 NR Description: hypothetical protein [Triticum aestivum]

SEQ ID NO: 101063 - DNA, 1078 bp, Arabidopsis thaliana
  misc_feature (1)..(1078): Ceres Seq. ID no. 13606841
  misc_feature: MA Experiment ID: 108434 Result: Down-regulated in Transcription
  misc_feature: MA Experiment 108434 PARAMETER Experiment Name: At_Root_Tips_cDNA_P Parameter: Tissue Value: Root Tips
  misc_feature: MA Experiment ID: 108576 Result: Up-regulated in Transcription
  misc_feature: MA Experiment 108576 PARAMETER Experiment Name: At_42deg_Heat_cDNA_P Parameter: Temperature (deg C) Value: 42 vs. 22
  misc_feature: MA Experiment 108576 PARAMETER Experiment Name: At_42deg_Heat_cDNA_P Parameter: Timepoint (hr) Value: 1
  misc_feature: MA Experiment 108576 PARAMETER Experiment Name: At_42deg_Heat_cDNA_P Parameter: Tissue Value: Aerial
  misc_feature: MA Experiment ID: 108595 Result: Up-regulated in Transcription
  misc_feature: MA Experiment 108595 PARAMETER Experiment Name: At_Ler-pi_Ovule_cDNA_P Parameter: Plant Line Value: null
  misc_feature: MA Experiment ID: 20000069 Result: Up-regulated in Transcription
  misc_feature: MA Experiment 20000069 PARAMETER Experiment Name: At_100uM_ABA_Mutants_cDNA_P Parameter: Plant Line Value: CS23
  misc_feature: MA Experiment 20000069 PARAMETER Experiment Name: At_100uM_ABA_Mutants_cDNA_P Parameter: Timepoint (hr) Value: 6
  misc_feature: MA Experiment 20000069 PARAMETER Experiment Name: At_100uM_ABA_Mutants_cDNA_P Parameter: Tissue Value: Aerial
  misc_feature: MA Experiment 20000069 PARAMETER Experiment Name: At_100uM_ABA_Mutants_cDNA_P Parameter: Treatment Value: 100uM ABA vs. No Treatment
  misc_feature: MA Experiment ID: 20000089 Result: Up-regulated in Transcription
  misc_feature: MA Experiment ID: 20000093 Result: Up-regulated in Transcription
  misc_feature: MA Experiment 20000093 PARAMETER Experiment Name: At_42deg_Heat_cDNA_P Parameter: Temperature (deg C) Value: 42 vs. 22
  misc_feature: MA Experiment 20000093 PARAMETER Experiment Name: At_42deg_Heat_cDNA_P Parameter: Timepoint (hr) Value: 0.5
  misc_feature: MA Experiment 20000093 PARAMETER Experiment Name: At_42deg_Heat_cDNA_P Parameter: Tissue Value: Aerial
  misc_feature: MA Experiment ID: 20000112 Result: Up-regulated in Transcription
  misc_feature: MA Experiment 20000112 PARAMETER Experiment Name: At_42deg_Heat_cDNA_P Parameter: Temperature (deg C) Value: 42 vs. 22
  misc_feature: MA Experiment 20000112 PARAMETER Experiment Name: At_42deg_Heat_cDNA_P Parameter: Timepoint (hr) Value: 2
  misc_feature: MA Experiment 20000112 PARAMETER Experiment Name: At_42deg_Heat_cDNA_P Parameter: Tissue Value: Aerial
  misc_feature: MA Experiment ID: 20000144 Result: Up-regulated in Transcription
  misc_feature: MA Experiment 20000144 PARAMETER Experiment Name: At_42deg_Heat_cDNA_P Parameter: Temperature (deg C) Value: 42 vs. 22
  misc_feature: MA Experiment 20000144 PARAMETER Experiment Name: At_42deg_Heat_cDNA_P Parameter: Timepoint (hr) Value: 1
  misc_feature: MA Experiment 20000144 PARAMETER Experiment Name: At_42deg_Heat_cDNA_P Parameter: Tissue Value: Aerial
  misc_feature: MA Experiment ID: 20000265 Result: Up-regulated in Transcription
  misc_feature: MA Experiment 20000265 PARAMETER Experiment Name: At_Open_Flower_P Parameter: Age (day) Value: 21
  misc_feature: MA Experiment 20000265 PARAMETER Experiment Name: At_Open_Flower_P Parameter: Plant Line Value: WS
  misc_feature: MA Experiment 20000265 PARAMETER Experiment Name: At_Open_Flower_P Parameter: Tissue Value: Closed Flower vs. Whole Plant
  misc_feature: MA Experiment ID: 20000286 Result: Up-regulated in Transcription
  misc_feature: MA Experiment 20000286 PARAMETER Experiment Name: At_Open_Flower_P Parameter: Age (day) Value: 21
  misc_feature: MA Experiment 20000286 PARAMETER Experiment Name: At_Open_Flower_P Parameter: Plant Line Value: WS
  misc_feature: MA Experiment 20000286 PARAMETER Experiment Name: At_Open_Flower_P Parameter: Tissue Value: Half Open vs. Whole Plant
  misc_feature: MA Experiment ID: 20000438 Result: Down-regulated in Transcription
  misc_feature: MA Experiment 20000438 PARAMETER Experiment Name: At_Shoots__P Parameter: Age (day) Value: 14
  misc_feature: MA Experiment 20000438 PARAMETER Experiment Name: At_Shoots__P Parameter: Tissue Value: Shoots vs. Whole Plant
  misc_feature: MA Experiment ID: 20000456 Result: Up-regulated in Transcription
  misc_feature: MA Experiment 20000456 PARAMETER Experiment Name: At_100uM_BA_P Parameter: Age (day) Value: 14
  misc_feature: MA Experiment 20000456 PARAMETER Experiment Name: At_100uM_BA_P Parameter: Organism Value: A. thaliana
  misc_feature: MA Experiment 20000456 PARAMETER Experiment Name: At_100uM_BA_P Parameter: Plant Line Value: WS
  misc_feature: MA Experiment 20000456 PARAMETER Experiment Name: At_100uM_BA_P Parameter: Timepoint (hr) Value: 6
  misc_feature: MA Experiment 20000456 PARAMETER Experiment Name: At_100uM_BA_P Parameter: Tissue Value: Aerial
  misc_feature: MA Experiment 20000456 PARAMETER Experiment Name: At_100uM_BA_P Parameter: Treatment Value: 100uM BA vs. No Treatment
  misc_feature: MA Experiment ID: 20000794 Result: Up-regulated in Transcription
  misc_feature: MA Experiment 20000794 PARAMETER Experiment Name: At_Petals_P Parameter: Age (day) Value: 23-25 days
  misc_feature: MA Experiment 20000794 PARAMETER Experiment Name: At_Petals_P Parameter: Plant Line Value: WS
  misc_feature: MA Experiment 20000794 PARAMETER Experiment Name: At_Petals_P Parameter: Tissue Value: Petals vs. Whole plant
  misc_feature: MA Experiment ID: 20001557 Result: Up-regulated in Transcription
  misc_feature: MA Experiment 20001557 PARAMETER Experiment Name: At_Drought_Soil_Dry_P Parameter: Age (day) Value: 27
  misc_feature: MA Experiment 20001557 PARAMETER Experiment Name: At_Drought_Soil_Dry_P Parameter: Organism Value: A. thaliana
  misc_feature: MA Experiment 20001557 PARAMETER Experiment Name: At_Drought_Soil_Dry_P Parameter: Plant Line Value: WS
  misc_feature: MA Experiment 20001557 PARAMETER Experiment Name: At_Drought_Soil_Dry_P Parameter: Post Timepoint (hr) Value: 3
  misc_feature: MA Experiment 20001557 PARAMETER Experiment Name: At_Drought_Soil_Dry_P Parameter: Post-Treatment Value: Re-Water vs. No Drought
  misc_feature: MA Experiment 20001557 PARAMETER Experiment Name: At_Drought_Soil_Dry_P Parameter: Timepoint (day) Value: 13
  misc_feature: MA Experiment 20001557 PARAMETER Experiment Name: At_Drought_Soil_Dry_P Parameter: Treatment Value: Drought vs. No Drought
  misc_feature: MA Experiment ID: 20001911 Result: Down-regulated in Transcription
  misc_feature: MA Experiment 20001911 PARAMETER Experiment Name: At_Drought_Reproduction_P Parameter: Age (day) Value: 40
  misc_feature: MA Experiment 20001911 PARAMETER Experiment Name: At_Drought_Reproduction_P Parameter: Organism Value: A. thaliana
  misc_feature: MA Experiment 20001911 PARAMETER Experiment Name: At_Drought_Reproduction_P Parameter: Plant Line Value: WS
  misc_feature: MA Experiment 20001911 PARAMETER Experiment Name: At_Drought_Reproduction_P Parameter: Timepoint (day) Value: 10
  misc_feature: MA Experiment 20001911 PARAMETER Experiment Name: At_Drought_Reproduction_P Parameter: Tissue Value: Flowers
  misc_feature: MA Experiment 20001911 PARAMETER Experiment Name: At_Drought_Reproduction_P Parameter: Treatment Value: Drought vs. No Drought
atctcataaaaacaaaaacaacaacacacatttcaaagaactctgaaatggcaaaccaaaaagggttacatgtagtgatgatgatcatcactgtttggcttctttatgcagcacctaatatccatggatggggaaaagaaggtcatgaaatcatctgtaaaatcgctcagactaggttggatgaaacagcagcaaaggccgtgaaagagctgttacctgaatctgcagaaggagacctctcaagcttgtgtctttgggctgatcgtgtcaagttcagataccactggtcttctcctcttcattacatcaacactcctgatgcatgctcataccaatacaatagggactgcaaggacgaatctggagagaaaggaagatgtgttgcgggagccatttacaactacaccacacagcttctttcctacaaaactgcagcttcatctcagtcacaatacaacttaaccgaggccctgctcttcgtgtcccatttcatgggtgatatccatcagcctctacatgtgagttatgcttcagacaaaggaggtaacaccatcgaagtacattggtacacgagaaaagctaacctccaccatatatgggattccaacattatcgaaacagctgaagcagatctctataactctgcactagaaggaatggtggatgcactcaaaaagaatatcacgacagaatgggcagatcaagttaagagatgggagacctgcacaaagaagacagcatgtccagacatatacgcatccgaaggaattcaagcagcctgtgactgggcatacaagggggtaacggaaggagacactctagaagatgaatacttctattcacgtctaccgatagtgtatcagcggttagcacagggaggggtgagactagcagctaccctaaacaggattttcggttgaagctgaagttacagcataatgattggtctaagcctgtcttcatattagattaaaaactgcattattgaaacaaggaaatagcaatcacaagccccgaacacggcaatgctctttcattatcaaacaaaataaattatgtttactcacaaagtttcttc

SEQ ID NO: 101064 - protein, 305 aa, Arabidopsis thaliana
  peptide (1)..(305): Ceres Seq. ID no. 13606842
  misc_feature (43)..(305): Pfam Name: S1/P1 Nuclease Pfam Description: S1/P1 Nuclease
  misc_feature (16)..(305): Homolog of NCBI NO: 15221343 NR Description: bifunctional nuclease -related [Arabidopsis
  misc_feature (16)..(305): Homolog of NCBI NO: 21554516 NR Description: putative bifunctional nuclease [Arabidopsis
  misc_feature (26)..(305): Homolog of NCBI NO: 4099833 NR Description: bifunctional nuclease [Zinnia elegans]
  misc_feature (30)..(304): Homolog of NCBI NO: 4099835 NR Description: bifunctional nuclease [Zinnia elegans]
  misc_feature (29)..(305): Homolog of NCBI NO: 9558456 NR Description: unnamed protein product [Oryza sativa (japonica
  misc_feature (29)..(305): Homolog of NCBI NO: 34895514 NR Description: putative bifunctional nuclease [Oryza sativa
  misc_feature (43)..(304): Homolog of NCBI NO: 22328857 NR Description: expressed protein [Arabidopsis thaliana]
  misc_feature (33)..(304): Homolog of NCBI NO: 3551956 NR Description: senescence-associated protein 6 [Hemerocallis
  misc_feature (22)..(304): Homolog of NCBI NO: 38345900 NR Description: OSJNBa0060D06.10 [Oryza sativa (japonica
  misc_feature (25)..(304): Homolog of NCBI NO: 15220307 NR Description: bifunctional nuclease bfn1 [Arabidopsis thaliana]
LIKTKTTTHISKNSEMANQKGLHVVMMIITVWLLYAAPNIHGWGKEGHEIICKIAQTRLDETAAKAVKELLPESAEGDLSSLCLWADRVKFRYHWSSPLHYINTPDACSYQYNRDCKDESGEKGRCVAGAIYNYTTQLLSYKTAASSQSQYNLTEALLFVSHFMGDIHQPLHVSYASDKGGNTIEVHWYTRKANLHHIWDSNIIETAEADLYNSALEGMVDALKKNITTEWADQVKRWETCTKKTACPDIYASEGIQAACDWAYKGVTEGDTLEDEYFYSRLPIVYQRLAQGGVRLAATLNRIFG

SEQ ID NO: 101065 - protein, 290 aa, Arabidopsis thaliana
  peptide (1)..(290): Ceres Seq. ID no. 13606843
  misc_feature (28)..(290): Pfam Name: S1/P1 Nuclease Pfam Description: S1/P1 Nuclease
  misc_feature (1)..(290): Homolog of NCBI NO: 15221343 NR Description: bifunctional nuclease -related [Arabidopsis
  misc_feature (1)..(290): Homolog of NCBI NO: 21554516 NR Description: putative bifunctional nuclease [Arabidopsis
  misc_feature (11)..(290): Homolog of NCBI NO: 4099833 NR Description: bifunctional nuclease [Zinnia elegans]
  misc_feature (15)..(289): Homolog of NCBI NO: 4099835 NR Description: bifunctional nuclease [Zinnia elegans]
  misc_feature (14)..(290): Homolog of NCBI NO: 9558456 NR Description: unnamed protein product [Oryza sativa (japonica
  misc_feature (14)..(290): Homolog of NCBI NO: 34895514 NR Description: putative bifunctional nuclease [Oryza sativa
  misc_feature (28)..(289): Homolog of NCBI NO: 22328857 NR Description: expressed protein [Arabidopsis thaliana]
  misc_feature (18)..(289): Homolog of NCBI NO: 3551956 NR Description: senescence-associated protein 6 [Hemerocallis
  misc_feature (7)..(289): Homolog of NCBI NO: 38345900 NR Description: OSJNBa0060D06.10 [Oryza sativa (japonica
  misc_feature (10)..(289): Homolog of NCBI NO: 15220307 NR Description: bifunctional nuclease bfn1 [Arabidopsis thaliana]
MANQKGLHVVMMIITVWLLYAAPNIHGWGKEGHEIICKIAQTRLDETAAKAVKELLPESAEGDLSSLCLWADRVKFRYHWSSPLHYINTPDACSYQYNRDCKDESGEKGRCVAGAIYNYTTQLLSYKTAASSQSQYNLTEALLFVSHFMGDIHQPLHVSYASDKGGNTIEVHWYTRKANLHHIWDSNIIETAEADLYNSALEGMVDALKKNITTEWADQVKRWETCTKKTACPDIYASEGIQAACDWAYKGVTEGDTLEDEYFYSRLPIVYQRLAQGGVRLAATLNRIFG

SEQ ID NO: 101066 - protein, 280 aa, Arabidopsis thaliana
  peptide (1)..(280): Ceres Seq. ID no. 13606844
  misc_feature (18)..(280): Pfam Name: S1/P1 Nuclease Pfam Description: S1/P1 Nuclease
  misc_feature (1)..(280): Homolog of NCBI NO: 15221343 NR Description: bifunctional nuclease -related [Arabidopsis
  misc_feature (1)..(280): Homolog of NCBI NO: 21554516 NR Description: putative bifunctional nuclease [Arabidopsis
  misc_feature (1)..(280): Homolog of NCBI NO: 4099833 NR Description: bifunctional nuclease [Zinnia elegans]
  misc_feature (5)..(279): Homolog of NCBI NO: 4099835 NR Description: bifunctional nuclease [Zinnia elegans]
  misc_feature (4)..(280): Homolog of NCBI NO: 9558456 NR Description: unnamed protein product [Oryza sativa (japonica
  misc_feature (4)..(280): Homolog of NCBI NO: 34895514 NR Description: putative bifunctional nuclease [Oryza sativa
  misc_feature (18)..(279): Homolog of NCBI NO: 22328857 NR Description: expressed protein [Arabidopsis thaliana]
  misc_feature (8)..(279): Homolog of NCBI NO: 3551956 NR Description: senescence-associated protein 6 [Hemerocallis
  misc_feature (1)..(279): Homolog of NCBI NO: 38345900 NR Description: OSJNBa0060D06.10 [Oryza sativa (japonica
  misc_feature (1)..(279): Homolog of NCBI NO: 15220307 NR Description: bifunctional nuclease bfn1 [Arabidopsis thaliana]
MMIITVWLLYAAPNIHGWGKEGHEIICKIAQTRLDETAAKAVKELLPESAEGDLSSLCLWADRVKFRYHWSSPLHYINTPDACSYQYNRDCKDESGEKGRCVAGAIYNYTTQLLSYKTAASSQSQYNLTEALLFVSHFMGDIHQPLHVSYASDKGGNTIEVHWYTRKANLHHIWDSNIIETAEADLYNSALEGMVDALKKNITTEWADQVKRWETCTKKTACPDIYASEGIQAACDWAYKGVTEGDTLEDEYFYSRLPIVYQRLAQGGVRLAATLNRIFG

SEQ ID NO: 101067 - DNA, 1255 bp, Arabidopsis thaliana
  misc_feature (1)..(1255): Ceres Seq. ID no. 13606856
  misc_feature: MA Experiment ID: 20000306 Result: Up-regulated in Transcription
  misc_feature: MA Experiment 20000306 PARAMETER Experiment Name: At_Germinating_Seeds_Sub_P Parameter: Age (hr) Value: 6 vs. 0
  misc_feature: MA Experiment 20000306 PARAMETER Experiment Name: At_Germinating_Seeds_Sub_P Parameter: Organism Value: A. thaliana
  misc_feature: MA Experiment 20000306 PARAMETER Experiment Name: At_Germinating_Seeds_Sub_P Parameter: Plant Line Value: WS
  misc_feature: MA Experiment 20000306 PARAMETER Experiment Name: At_Germinating_Seeds_Sub_P Parameter: Tissue Value: Germinating Seeds
  misc_feature: MA Experiment ID: 20000307 Result: Up-regulated in Transcription
  misc_feature: MA Experiment 20000307 PARAMETER Experiment Name: At_Germinating_Seeds_Sub_P Parameter: Age (hr) Value: 24 vs. 0
  misc_feature: MA Experiment 20000307 PARAMETER Experiment Name: At_Germinating_Seeds_Sub_P Parameter: Organism Value: A. thaliana
  misc_feature: MA Experiment 20000307 PARAMETER Experiment Name: At_Germinating_Seeds_Sub_P Parameter: Plant Line Value: WS
  misc_feature: MA Experiment 20000307 PARAMETER Experiment Name: At_Germinating_Seeds_Sub_P Parameter: Tissue Value: Germinating Seeds
atcacaacacaacacaaacaaaccatttacataaaacaaaaacaatttaatacttcttagtgtgtaaatgtgtgattctttcatcaataacaaaatgacatcgatattattcatgctcgtgagtctaacaattctttccatgaatctaaaagtctctcaagccacatctcgtgtcaccttccacgagccgatcgttgctgaacaccatcagcaatggatgactcggttctctcgagtttacagtgacgagctcgagaaacaaatgagattcgatgtgttcaagaaaaacttgaagttcattgagaaatttaataagaaaggggatagaacctacaagcttggtgtcaacgagtttgcggattggaccagagaggaattcattgccactcacaccggcctcaagggggttaacgggattccatcctctgaatttgtcgatgaaatgataccttcttggaattggaatgtcagtgatgtcgctggccgtgagaccaaagattggagatacgaaggagctgtaacacctgttaaataccaaggccaatgtggatgttgttgggcattctcaagcgtcgcagcggtggaaggtttgacaaagattgttggaaacaacctagtatcattgtctgaacaacaacttctagattgcgacagagagcgtgacaacggttgcaacggtggaataatgtcagacgctttcagctatataatcaaaaaccgaggcattgcctcagaggcatcatacccttaccaagcggcagaggggacatgccggtacaatgggaaaccctccgcatggatcagagggttccagaccgttccaagcaacaacgagcgtgcattgctcgaggctgtatccaagcagcctgtctcagtgtccattgacgcggatgggcccggtttcatgcattactcagggggagtgtacgatgagccgtactgtgggaccaacgtgaaccatgcagtgacgttcgttggatacggaacgagcccagaggggatcaagtactggctggctaagaactcgtggggtgagacttggggagagaatggttacattaggatccgtagagatgtggcatggcctcaaggcatgtgtggtgtggctcagtatgctttttatccggttgcctaactaaacggcagacgacttttgttatataaaagtgatattattgttttaaacattttaaacaacaaaatggtgatatatcttgttatatagtttggtttatgaactctttagatgtggtct

SEQ ID NO: 101068 - protein, 355 aa, Arabidopsis thaliana
  peptide (1)..(355): Ceres Seq. ID no. 13606857
  misc_feature (1)..(355): Homolog of NCBI NO: 30690594 NR Description: cysteine proteinase [Arabidopsis thaliana]
  misc_feature (25)..(355): Homolog of NCBI NO: 25289991 NR Description: cysteine proteinase (EC 3.4.22.-) [similarity] - thaliana >gi|9502421|gb|AAF88120.1|AC021043_13 Putative cysteine
  misc_feature (10)..(355): Homolog of NCBI NO: 18403438 NR Description: cysteine proteinase [Arabidopsis thaliana]
  misc_feature (10)..(355): Homolog of NCBI NO: 18396939 NR Description: cysteine protease [Arabidopsis thaliana]
  misc_feature (173)..(354): Homolog of NCBI NO: 25289992 NR Description: probable cysteine proteinase [imported] - thaliana >gi|9502426|gb|AAF88125.1|AC021043_18 Putative cysteine
  misc_feature (10)..(160): Homolog of NCBI NO: 25289992 NR Description: probable cysteine proteinase [imported] - thaliana >gi|9502426|gb|AAF88125.1|AC021043_18 Putative cysteine
  misc_feature (10)..(354): Homolog of NCBI NO: 18396952 NR Description: cysteine proteinase [Arabidopsis thaliana]
  misc_feature (11)..(355): Homolog of NCBI NO: 18401420 NR Description: cysteine proteinase [Arabidopsis thaliana]
  misc_feature (10)..(355): Homolog of NCBI NO: 18408828 NR Description: cysteine proteinase [Arabidopsis thaliana]
  misc_feature (12)..(355): Homolog of NCBI NO: 24285904 NR Description: cysteine proteinase precursor [Ipomoea batatas]
MCDSFINNKMTSILFMLVSLTILSMNLKVSQATSRVTFHEPIVAEHHQQWMTRFSRVYSDELEKQMRFDVFKKNLKFIEKFNKKGDRTYKLGVNEFADWTREEFIATHTGLKGVNGIPSSEFVDEMIPSWNWNVSDVAGRETKDWRYEGAVTPVKYQGQCGCCWAFSSVAAVEGLTKIVGNNLVSLSEQQLLDCDRERDNGCNGGIMSDAFSYIIKNRGIASEASYPYQAAEGTCRYNGKPSAWIRGFQTVPSNNERALLEAVSKQPVSVSIDADGPGFMHYSGGVYDEPYCGTNVNHAVTFVGYGTSPEGIKYWLAKNSWGETWGENGYIRIRRDVAWPQGMCGVAQYAFYPVA

SEQ ID NO: 101069 - protein, 346 aa, Arabidopsis thaliana
  peptide (1)..(346): Ceres Seq. ID no. 13606858
  misc_feature (1)..(346): Homolog of NCBI NO: 30690594 NR Description: cysteine proteinase [Arabidopsis thaliana]
  misc_feature (16)..(346): Homolog of NCBI NO: 25289991 NR Description: cysteine proteinase (EC 3.4.22.-) [similarity] - thaliana >gi|9502421|gb|AAF88120.1|AC021043_13 Putative cysteine
  misc_feature (1)..(346): Homolog of NCBI NO: 18403438 NR Description: cysteine proteinase [Arabidopsis thaliana]
  misc_feature (1)..(346): Homolog of NCBI NO: 18396939 NR Description: cysteine protease [Arabidopsis thaliana]
  misc_feature (164)..(345): Homolog of NCBI NO: 25289992 NR Description: probable cysteine proteinase [imported] - thaliana >gi|9502426|gb|AAF88125.1|AC021043_18 Putative cysteine
  misc_feature (1)..(151): Homolog of NCBI NO: 25289992 NR Description: probable cysteine proteinase [imported] - thaliana >gi|9502426|gb|AAF88125.1|AC021043_18 Putative cysteine
  misc_feature (1)..(345): Homolog of NCBI NO: 18396952 NR Description: cysteine proteinase [Arabidopsis thaliana]
  misc_feature (2)..(346): Homolog of NCBI NO: 18401420 NR Description: cysteine proteinase [Arabidopsis thaliana]
  misc_feature (1)..(346): Homolog of NCBI NO: 18408828 NR Description: cysteine proteinase [Arabidopsis thaliana]
  misc_feature (3)..(346): Homolog of NCBI NO: 24285904 NR Description: cysteine proteinase precursor [Ipomoea batatas]
MTSILFMLVSLTILSMNLKVSQATSRVTFHEPIVAEHHQQWMTRFSRVYSDELEKQMRFDVFKKNLKFIEKFNKKGDRTYKLGVNEFADWTREEFIATHTGLKGVNGIPSSEFVDEMIPSWNWNVSDVAGRETKDWRYEGAVTPVKYQGQCGCCWAFSSVAAVEGLTKIVGNNLVSLSEQQLLDCDRERDNGCNGGIMSDAFSYIIKNRGIASEASYPYQAAEGTCRYNGKPSAWIRGFQTVPSNNERALLEAVSKQPVSVSIDADGPGFMHYSGGVYDEPYCGTNVNHAVTFVGYGTSPEGIKYWLAKNSWGETWGENGYIRIRRDVAWPQGMCGVAQYAFYPVA

SEQ ID NO: 101070 - protein, 340 aa, Arabidopsis thaliana
  peptide (1)..(340): Ceres Seq. ID no. 13606859
  misc_feature (1)..(340): Homolog of NCBI NO: 30690594 NR Description: cysteine proteinase [Arabidopsis thaliana]
  misc_feature (10)..(340): Homolog of NCBI NO: 25289991 NR Description: cysteine proteinase (EC 3.4.22.-) [similarity] - thaliana >gi|9502421|gb|AAF88120.1|AC021043_13 Putative cysteine
  misc_feature (1)..(340): Homolog of NCBI NO: 18403438 NR Description: cysteine proteinase [Arabidopsis thaliana]
  misc_feature (1)..(340): Homolog of NCBI NO: 18396939 NR Description: cysteine protease [Arabidopsis thaliana]
  misc_feature (158)..(339): Homolog of NCBI NO: 25289992 NR Description: probable cysteine proteinase [imported] - thaliana >gi|9502426|gb|AAF88125.1|AC021043_18 Putative cysteine
  misc_feature (1)..(145): Homolog of NCBI NO: 25289992 NR Description: probable cysteine proteinase [imported] - thaliana >gi|9502426|gb|AAF88125.1|AC021043_18 Putative cysteine
  misc_feature (1)..(339): Homolog of NCBI NO: 18396952 NR Description: cysteine proteinase [Arabidopsis thaliana]
  misc_feature (1)..(340): Homolog of NCBI NO: 18401420 NR Description: cysteine proteinase [Arabidopsis thaliana]
  misc_feature (1)..(340): Homolog of NCBI NO: 18408828 NR Description: cysteine proteinase [Arabidopsis thaliana]
  misc_feature (1)..(340): Homolog of NCBI NO: 24285904 NR Description: cysteine proteinase precursor [Ipomoea batatas]
MLVSLTILSMNLKVSQATSRVTFHEPIVAEHHQQWMTRFSRVYSDELEKQMRFDVFKKNLKFIEKFNKKGDRTYKLGVNEFADWTREEFIATHTGLKGVNGIPSSEFVDEMIPSWNWNVSDVAGRETKDWRYEGAVTPVKYQGQCGCCWAFSSVAAVEGLTKIVGNNLVSLSEQQLLDCDRERDNGCNGGIMSDAFSYIIKNRGIASEASYPYQAAEGTCRYNGKPSAWIRGFQTVPSNNERALLEAVSKQPVSVSIDADGPGFMHYSGGVYDEPYCGTNVNHAVTFVGYGTSPEGIKYWLAKNSWGETWGENGYIRIRRDVAWPQGMCGVAQYAFYPVA

SEQ ID NO: 101071 - DNA, 724 bp, Arabidopsis thaliana
  misc_feature (1)..(724): Ceres Seq. ID no. 13606860
  misc_feature: MA Experiment ID: 20000315 Result: Down-regulated in Transcription
  misc_feature: MA Experiment 20000315 PARAMETER Experiment Name: At_14day_Shoots-Roots_Sub_P Parameter: Age (day) Value: 14
  misc_feature: MA Experiment 20000315 PARAMETER Experiment Name: At_14day_Shoots-Roots_Sub_P Parameter: Organism Value: A. thaliana
  misc_feature: MA Experiment 20000315 PARAMETER Experiment Name: At_14day_Shoots-Roots_Sub_P Parameter: Plant Line Value: WS
  misc_feature: MA Experiment 20000315 PARAMETER Experiment Name: At_14day_Shoots-Roots_Sub_P Parameter: Tissue Value: Shoots vs. Whole Plant
  misc_feature: MA Experiment ID: 20000355 Result: Up-regulated in Transcription
  misc_feature: MA Experiment 20000355 PARAMETER Experiment Name: At_Siliques_Sub_P Parameter: Age (day) Value: 21
  misc_feature: MA Experiment 20000355 PARAMETER Experiment Name: At_Siliques_Sub_P Parameter: Organism Value: A. thaliana
  misc_feature: MA Experiment 20000355 PARAMETER Experiment Name: At_Siliques_Sub_P Parameter: Plant Line Value: WS
  misc_feature: MA Experiment 20000355 PARAMETER Experiment Name: At_Siliques_Sub_P Parameter: Tissue Value: Less Than 5mm Siliques vs. Whole Plant
  misc_feature: MA Experiment ID: 20000440 Result: Up-regulated in Transcription
  misc_feature: MA Experiment 20000440 PARAMETER Experiment Name: At_Closed-Flower__Sub_P Parameter: Tissue Value: Closed Flower vs. Whole Plant
atggccaaattcttcattgtcttccttgcctctgccctatgtttcaccaccctcgttcacttcaccgcagctgatgccgacgactttgacaaattccacatcaagggctccgtctactgcgacacatgccgtgtccaattcatcacccgtatcagcaaatttctcgagggggcaaaggtaaagcttgagtgcaagggtcgtgagaaccagacagtgaccctaaccaaagaagccgtgaccgacaacgccggtaactaccagatggaagtaatgggtgaccacgaagaggaagtgtgcgagatcgtcctcctccaatcacctgacccagagtgtggagacgtgaacaaccaagaattcctaagaaacgcagccagaatcagtctcacggccaatgatggcattgtctccaacgagactcgaaccattaacccacttgggttcatgaggaagactcctctcgctgaatgccctcaagttttcaaggagcttggaatcgtccctgacgtcaccttctaagcttaatatacatatatacacacccatatacatcgatctctcaaagtctcaacactttcaatttttttgatgactctttttaatatataaaacatttatttatgttttttatgtgtctgtctgagtttactaattaaccatgtttttttttcgttgttattgttttatttttgggagttcttttttacgaatgatttgattaccttcc

SEQ ID NO: 101072 - protein, 171 aa, Arabidopsis thaliana
  peptide (1)..(171): Ceres Seq. ID no. 13606861
  misc_feature (34)..(158): Pfam Name: Pollen proteins Ole e I family Pfam Description: Pollen proteins Ole e I family
  misc_feature (1)..(171): Homolog of NCBI NO: 15218844 NR Description: expressed protein [Arabidopsis thaliana]
  misc_feature (2)..(171): Homolog of NCBI NO: 18422603 NR Description: Ole e I (main olive allergen)-related protein
  misc_feature (2)..(171): Homolog of NCBI NO: 21593871 NR Description: Ole e I (main olive allergen)-like protein
  misc_feature (2)..(171): Homolog of NCBI NO: 18415132 NR Description: Ole e I (main olive allergen)-related protein
  misc_feature (16)..(171): Homolog of NCBI NO: 9758935 NR Description: Ole e I (main olive allergen)-like protein
  misc_feature (2)..(168): Homolog of NCBI NO: 7486300 NR Description: hypothetical protein F28J12.250 - Arabidopsis
  misc_feature (57)..(171): Homolog of NCBI NO: 28393099 NR Description: unknown protein [Arabidopsis thaliana]
  misc_feature (1)..(168): Homolog of NCBI NO: 28380096 NR Description: Olee1-like protein precursor
  misc_feature (1)..(165): Homolog of NCBI NO: 22074346 NR Description: Che a 1 allergen precursor [Chenopodium album]
  misc_feature (31)..(167): Homolog of NCBI NO: 1362136 NR Description: major allergen OLE5c - common olive
MAKFFIVFLASALCFTTLVHFTAADADDFDKFHIKGSVYCDTCRVQFITRISKFLEGAKVKLECKGRENQTVTLTKEAVTDNAGNYQMEVMGDHEEEVCEIVLLQSPDPECGDVNNQEFLRNAARISLTANDGIVSNETRTINPLGFMRKTPLAECPQVFKELGIVPDVTF

SEQ ID NO: 101073 - DNA, 854 bp, Arabidopsis thaliana
  misc_feature (1)..(854): Ceres Seq. ID no. 13606870
  misc_feature: MA Experiment ID: 20000173 Result: Up-regulated in Transcription
  misc_feature: MA Experiment 20000173 PARAMETER Experiment Name: At_42deg_Heat_P Parameter: Age (day) Value: 14
  misc_feature: MA Experiment 20000173 PARAMETER Experiment Name: At_42deg_Heat_P Parameter: Organism Value: A. thaliana
  misc_feature: MA Experiment 20000173 PARAMETER Experiment Name: At_42deg_Heat_P Parameter: Plant Line Value: WS
  misc_feature: MA Experiment 20000173 PARAMETER Experiment Name: At_42deg_Heat_P Parameter: Temperature (deg C) Value: 42 vs. 22
  misc_feature: MA Experiment 20000173 PARAMETER Experiment Name: At_42deg_Heat_P Parameter: Timepoint (hr) Value: 6
  misc_feature: MA Experiment 20000173 PARAMETER Experiment Name: At_42deg_Heat_P Parameter: Tissue Value: Aerial
  misc_feature: MA Experiment ID: 20000179 Result: Down-regulated in Transcription
  misc_feature: MA Experiment 20000179 PARAMETER Experiment Name: At_Germinating_Seeds_P Parameter: Age (hr) Value: 6 vs. 0
  misc_feature: MA Experiment 20000179 PARAMETER Experiment Name: At_Germinating_Seeds_P Parameter: Tissue Value: Germinating Seeds
  misc_feature: MA Experiment ID: 20000180 Result: Down-regulated in Transcription
  misc_feature: MA Experiment 20000180 PARAMETER Experiment Name: At_Germinating_Seeds_P Parameter: Age (hr) Value: 24 vs. 0
  misc_feature: MA Experiment 20000180 PARAMETER Experiment Name: At_Germinating_Seeds_P Parameter: Tissue Value: Germinating Seeds
  misc_feature: MA Experiment ID: 20000436 Result: Up-regulated in Transcription
  misc_feature: MA Experiment 20000436 PARAMETER Experiment Name: At_Drought_P Parameter: Age (day) Value: 7
  misc_feature: MA Experiment 20000436 PARAMETER Experiment Name: At_Drought_P Parameter: Organism Value: A. thaliana
  misc_feature: MA Experiment 20000436 PARAMETER Experiment Name: At_Drought_P Parameter: Plant Line Value: WS
  misc_feature: MA Experiment 20000436 PARAMETER Experiment Name: At_Drought_P Parameter: Timepoint (hr) Value: 12
  misc_feature: MA Experiment 20000436 PARAMETER Experiment Name: At_Drought_P Parameter: Tissue Value: Whole Plant
  misc_feature: MA Experiment 20000436 PARAMETER Experiment Name: At_Drought_P Parameter: Treatment Value: Drought vs. No Drought
  misc_feature: MA Experiment ID: 20000437 Result: Up-regulated in Transcription
  misc_feature: MA Experiment 20000437 PARAMETER Experiment Name: At_Drought_P Parameter: Age (day) Value: 8
  misc_feature: MA Experiment 20000437 PARAMETER Experiment Name: At_Drought_P Parameter: Organism Value: A. thaliana
  misc_feature: MA Experiment 20000437 PARAMETER Experiment Name: At_Drought_P Parameter: Plant Line Value: WS
  misc_feature: MA Experiment 20000437 PARAMETER Experiment Name: At_Drought_P Parameter: Timepoint (hr) Value: 24
  misc_feature: MA Experiment 20000437 PARAMETER Experiment Name: At_Drought_P Parameter: Tissue Value: Whole Plant
  misc_feature: MA Experiment 20000437 PARAMETER Experiment Name: At_Drought_P Parameter: Treatment Value: Drought vs. No Drought
  misc_feature: MA Experiment ID: 20001555 Result: Up-regulated in Transcription
  misc_feature: MA Experiment 20001555 PARAMETER Experiment Name: At_Drought_Soil_Dry_P Parameter: Age (day) Value: 24
  misc_feature: MA Experiment 20001555 PARAMETER Experiment Name: At_Drought_Soil_Dry_P Parameter: Organism Value: A. thaliana
  misc_feature: MA Experiment 20001555 PARAMETER Experiment Name: At_Drought_Soil_Dry_P Parameter: Plant Line Value: WS
  misc_feature: MA Experiment 20001555 PARAMETER Experiment Name: At_Drought_Soil_Dry_P Parameter: Post Timepoint (hr) Value: None
  misc_feature: MA Experiment 20001555 PARAMETER Experiment Name: At_Drought_Soil_Dry_P Parameter: Post-Treatment Value: None
  misc_feature: MA Experiment 20001555 PARAMETER Experiment Name: At_Drought_Soil_Dry_P Parameter: Timepoint (day) Value: 10
  misc_feature: MA Experiment 20001555 PARAMETER Experiment Name: At_Drought_Soil_Dry_P Parameter: Treatment Value: Drought vs. No Drought
  misc_feature: MA Experiment ID: 20001556 Result: Up-regulated in Transcription
  misc_feature: MA Experiment 20001556 PARAMETER Experiment Name: At_Drought_Soil_Dry_P Parameter: Age (day) Value: 26
  misc_feature: MA Experiment 20001556 PARAMETER Experiment Name: At_Drought_Soil_Dry_P Parameter: Organism Value: A. thaliana
  misc_feature: MA Experiment 20001556 PARAMETER Experiment Name: At_Drought_Soil_Dry_P Parameter: Plant Line Value: WS
  misc_feature: MA Experiment 20001556 PARAMETER Experiment Name: At_Drought_Soil_Dry_P Parameter: Post Timepoint (hr) Value: None
  misc_feature: MA Experiment 20001556 PARAMETER Experiment Name: At_Drought_Soil_Dry_P Parameter: Post-Treatment Value: None
  misc_feature: MA Experiment 20001556 PARAMETER Experiment Name: At_Drought_Soil_Dry_P Parameter: Timepoint (day) Value: 12
  misc_feature: MA Experiment 20001556 PARAMETER Experiment Name: At_Drought_Soil_Dry_P Parameter: Treatment Value: Drought vs. No Drought
  misc_feature: MA Experiment ID: 20001557 Result: Up-regulated in Transcription
  misc_feature: MA Experiment 20001557 PARAMETER Experiment Name: At_Drought_Soil_Dry_P Parameter: Age (day) Value: 27
  misc_feature: MA Experiment 20001557 PARAMETER Experiment Name: At_Drought_Soil_Dry_P Parameter: Organism Value: A. thaliana
  misc_feature: MA Experiment 20001557 PARAMETER Experiment Name: At_Drought_Soil_Dry_P Parameter: Plant Line Value: WS
  misc_feature: MA Experiment 20001557 PARAMETER Experiment Name: At_Drought_Soil_Dry_P Parameter: Post Timepoint (hr) Value: 3
  misc_feature: MA Experiment 20001557 PARAMETER Experiment Name: At_Drought_Soil_Dry_P Parameter: Post-Treatment Value: Re-Water vs. No Drought
  misc_feature: MA Experiment 20001557 PARAMETER Experiment Name: At_Drought_Soil_Dry_P Parameter: Timepoint (day) Value: 13
  misc_feature: MA Experiment 20001557 PARAMETER Experiment Name: At_Drought_Soil_Dry_P Parameter: Treatment Value: Drought vs. No Drought
  misc_feature: MA Experiment ID: 20001558 Result: Up-regulated in Transcription
  misc_feature: MA Experiment 20001558 PARAMETER Experiment Name: At_Drought_Soil_Dry_P Parameter: Age (day) Value: 27
  misc_feature: MA Experiment 20001558 PARAMETER Experiment Name: At_Drought_Soil_Dry_P Parameter: Organism Value: A. thaliana
  misc_feature: MA Experiment 20001558 PARAMETER Experiment Name: At_Drought_Soil_Dry_P Parameter: Plant Line Value: WS
  misc_feature: MA Experiment 20001558 PARAMETER Experiment Name: At_Drought_Soil_Dry_P Parameter: Post Timepoint (hr) Value: 6
  misc_feature: MA Experiment 20001558 PARAMETER Experiment Name: At_Drought_Soil_Dry_P Parameter: Post-Treatment Value: Re-Water vs. No Drought
  misc_feature: MA Experiment 20001558 PARAMETER Experiment Name: At_Drought_Soil_Dry_P Parameter: Timepoint (day) Value: 13
  misc_feature: MA Experiment 20001558 PARAMETER Experiment Name: At_Drought_Soil_Dry_P Parameter: Treatment Value: Drought vs. No Drought
  misc_feature: MA Experiment ID: 20001904 Result: Up-regulated in Transcription
  misc_feature: MA Experiment 20001904 PARAMETER Experiment Name: At_Drought_Reproduction_P Parameter: Age (day) Value: 37
  misc_feature: MA Experiment 20001904 PARAMETER Experiment Name: At_Drought_Reproduction_P Parameter: Organism Value: A. thaliana
  misc_feature: MA Experiment 20001904 PARAMETER Experiment Name: At_Drought_Reproduction_P Parameter: Plant Line Value: WS
  misc_feature: MA Experiment 20001904 PARAMETER Experiment Name: At_Drought_Reproduction_P Parameter: Timepoint (day) Value: 7
  misc_feature: MA Experiment 20001904 PARAMETER Experiment Name: At_Drought_Reproduction_P Parameter: Tissue Value: Rosettes
  misc_feature: MA Experiment 20001904 PARAMETER Experiment Name: At_Drought_Reproduction_P Parameter: Treatment Value: Drought vs. No Drought
  misc_feature: MA Experiment ID: 20001906 Result: Up-regulated in Transcription
  misc_feature: MA Experiment 20001906 PARAMETER Experiment Name: At_Drought_Reproduction_P Parameter: Age (day) Value: 35
  misc_feature: MA Experiment 20001906 PARAMETER Experiment Name: At_Drought_Reproduction_P Parameter: Organism Value: A. thaliana
  misc_feature: MA Experiment 20001906 PARAMETER Experiment Name: At_Drought_Reproduction_P Parameter: Plant Line Value: WS
  misc_feature: MA Experiment 20001906 PARAMETER Experiment Name: At_Drought_Reproduction_P Parameter: Timepoint (day) Value: 5
  misc_feature: MA Experiment 20001906 PARAMETER Experiment Name: At_Drought_Reproduction_P Parameter: Tissue Value: Siliques
  misc_feature: MA Experiment 20001906 PARAMETER Experiment Name: At_Drought_Reproduction_P Parameter: Treatment Value: Drought vs. No Drought
  misc_feature: MA Experiment ID: 20001910 Result: Up-regulated in Transcription
  misc_feature: MA Experiment 20001910 PARAMETER Experiment Name: At_Drought_Reproduction_P Parameter: Age (day) Value: 37
  misc_feature: MA Experiment 20001910 PARAMETER Experiment Name: At_Drought_Reproduction_P Parameter: Organism Value: A. thaliana
  misc_feature: MA Experiment 20001910 PARAMETER Experiment Name: At_Drought_Reproduction_P Parameter: Plant Line Value: WS
  misc_feature: MA Experiment 20001910 PARAMETER Experiment Name: At_Drought_Reproduction_P Parameter: Timepoint (day) Value: 7
  misc_feature: MA Experiment 20001910 PARAMETER Experiment Name: At_Drought_Reproduction_P Parameter: Tissue Value: Flowers
  misc_feature: MA Experiment 20001910 PARAMETER Experiment Name: At_Drought_Reproduction_P Parameter: Treatment Value: Drought vs. No Drought
aaaattgtaaccaagaaaataaaattaaggatggctttgagcggcggcgatgatcaggtacctcctggaggtccgatgacagtttcaacacgtctgattgatgccggatcgacgatcatgcagcggcgattaccggtgaagcagatgaacactcatgtctctacttttgcgatatatggtggtgacatgtcccggctaatagggactcaccactatgtccaccgcgtcaacgacgagttccttcagtgtgctgtttacgcctctgaccgctccgatgcacctctaatcggaattgaatatgtaatatccgaccgattatatgaaactttgtctgaggatgagcaaaagctttggcactctcatgcatatgaggttaagtcaggctcgtgggcttatccacgattgcctgaggttgtggctgctccggagctcaagaacatagccaaaacgtacggaaagttttggtgcacctggcagatagaccgaggtgacaagttaccaatgggtgcacccgaactaatgatgtcacctcagggggtggggcaaggggtactaaggccagagttggtgaagagaagagatgagaagtacaacatttcgacagatgatttgaaacacacgagagcggagattgctgaaccggagtggatcaatccgatggctgactactggaagcaacatggtaagtgttttgtactcgatattgcgactgtcgaaatgaaccgtcacgcgcaattcccgtgaacaatgtcctctcatggctcacttgtatgagtgatgaagttgatatagaaatcgaatgtatatagaataatgttttactcgatttcaattacgtcaagaaaatcttaaat

SEQ ID NO: 101074 - protein, 247 aa, Arabidopsis thaliana
  peptide (1)..(247): Ceres Seq. ID no. 13606871
  misc_feature (11)..(247): Homolog of NCBI NO: 15220516 NR Description: expressed protein [Arabidopsis thaliana]
  misc_feature (16)..(247): Homolog of NCBI NO: 15242474 NR Description: expressed protein [Arabidopsis thaliana] AT5g45690/MRA19_8 [Arabidopsis thaliana]
  misc_feature (14)..(247): Homolog of NCBI NO: 34910820 NR Description: P0456A01.15 [Oryza sativa (japonica
  misc_feature (6)..(247): Homolog of NCBI NO: 18415199 NR Description: expressed protein [Arabidopsis thaliana]
  misc_feature (16)..(247): Homolog of NCBI NO: 9758672 NR Description: gene_id:MRA19.8~pir||T05029~strong similarity to
  misc_feature (6)..(247): Homolog of NCBI NO: 21617913 NR Description: unknown [Arabidopsis thaliana]
  misc_feature (6)..(247): Homolog of NCBI NO: 7452426 NR Description: hypothetical protein F13C5.90 - Arabidopsis >gi|2832620|emb|CAA16749.1| hypothetical protein [Arabidopsis >gi|7268686|emb|CAB78894.1| hypothetical protein [Arabidopsis
  misc_feature (12)..(247): Homolog of NCBI NO: 34909516 NR Description: P0481E12.28 [Oryza sativa (japonica
  misc_feature (22)..(240): Homolog of NCBI NO: 15220526 NR Description: expressed protein [Arabidopsis thaliana] T25N20.16 [Arabidopsis thaliana] >gi|17979351|gb|AAL49901.1| protein [Arabidopsis thaliana] >gi|20466017|gb|AAM20230.1|
  misc_feature (19)..(226): Homolog of NCBI NO: 16760314 NR Description: putative secreted protein [Salmonella enterica enterica serovar Typhi] >gi|29141921|ref|NP_805263.1| putative protein [Salmonella enterica subsp. enterica serovar Typhi Ty2]
KIVTKKIKLRMALSGGDDQVPPGGPMTVSTRLIDAGSTIMQRRLPVKQMNTHVSTFAIYGGDMSRLIGTHHYVHRVNDEFLQCAVYASDRSDAPLIGIEYVISDRLYETLSEDEQKLWHSHAYEVKSGSWAYPRLPEVVAAPELKNIAKTYGKFWCTWQIDRGDKLPMGAPELMMSPQGVGQGVLRPELVKRRDEKYNISTDDLKHTRAEIAEPEWINPMADYWKQHGKCFVLDIATVEMNRHAQFP

SEQ ID NO: 101075 - protein, 237 aa, Arabidopsis thaliana
  peptide (1)..(237): Ceres Seq. ID no. 13606872
  misc_feature (1)..(237): Homolog of NCBI NO: 15220516 NR Description: expressed protein [Arabidopsis thaliana]
  misc_feature (6)..(237): Homolog of NCBI NO: 15242474 NR Description: expressed protein [Arabidopsis thaliana] AT5g45690/MRA19_8 [Arabidopsis thaliana]
  misc_feature (4)..(237): Homolog of NCBI NO: 34910820 NR Description: P0456A01.15 [Oryza sativa (japonica
  misc_feature (1)..(237): Homolog of NCBI NO: 18415199 NR Description: expressed protein [Arabidopsis thaliana]
  misc_feature (6)..(237): Homolog of NCBI NO: 9758672 NR Description: gene_id:MRA19.8~pir||T05029~strong similarity to
  misc_feature (1)..(237): Homolog of NCBI NO: 21617913 NR Description: unknown [Arabidopsis thaliana]
  misc_feature (1)..(237): Homolog of NCBI NO: 7452426 NR Description: hypothetical protein F13C5.90 - Arabidopsis >gi|2832620|emb|CAA16749.1| hypothetical protein [Arabidopsis >gi|7268686|emb|CAB78894.1| hypothetical protein [Arabidopsis
  misc_feature (2)..(237): Homolog of NCBI NO: 34909516 NR Description: P0481E12.28 [Oryza sativa (japonica
  misc_feature (12)..(230): Homolog of NCBI NO: 15220526 NR Description: expressed protein [Arabidopsis thaliana] T25N20.16 [Arabidopsis thaliana] >gi|17979351|gb|AAL49901.1| protein [Arabidopsis thaliana] >gi|20466017|gb|AAM20230.1|
  misc_feature (9)..(216): Homolog of NCBI NO: 16760314 NR Description: putative secreted protein [Salmonella enterica enterica serovar Typhi] >gi|29141921|ref|NP_805263.1| putative protein [Salmonella enterica subsp. enterica serovar Typhi Ty2]
MALSGGDDQVPPGGPMTVSTRLIDAGSTIMQRRLPVKQMNTHVSTFAIYGGDMSRLIGTHHYVHRVNDEFLQCAVYASDRSDAPLIGIEYVISDRLYETLSEDEQKLWHSHAYEVKSGSWAYPRLPEVVAAPELKNIAKTYGKFWCTWQIDRGDKLPMGAPELMMSPQGVGQGVLRPELVKRRDEKYNISTDDLKHTRAEIAEPEWINPMADYWKQHGKCFVLDIATVEMNRHAQFP

SEQ ID NO: 101076 - protein, 222 aa, Arabidopsis thaliana
  peptide (1)..(222): Ceres Seq. ID no. 13606873
  misc_feature (1)..(222): Homolog of NCBI NO: 15220516 NR Description: expressed protein [Arabidopsis thaliana]
  misc_feature (1)..(222): Homolog of NCBI NO: 15242474 NR Description: expressed protein [Arabidopsis thaliana] AT5g45690/MRA19_8 [Arabidopsis thaliana]
  misc_feature (1)..(222): Homolog of NCBI NO: 34910820 NR Description: P0456A01.15 [Oryza sativa (japonica
  misc_feature (1)..(222): Homolog of NCBI NO: 18415199 NR Description: expressed protein [Arabidopsis thaliana]
  misc_feature (1)..(222): Homolog of NCBI NO: 9758672 NR Description: gene_id:MRA19.8~pir||T05029~strong similarity to
  misc_feature (1)..(222): Homolog of NCBI NO: 21617913 NR Description: unknown [Arabidopsis thaliana]
  misc_feature (1)..(222): Homolog of NCBI NO: 7452426 NR Description: hypothetical protein F13C5.90 - Arabidopsis >gi|2832620|emb|CAA16749.1| hypothetical protein [Arabidopsis >gi|7268686|emb|CAB78894.1| hypothetical protein [Arabidopsis
  misc_feature (1)..(222): Homolog of NCBI NO: 34909516 NR Description: P0481E12.28 [Oryza sativa (japonica
  misc_feature (1)..(215): Homolog of NCBI NO: 15220526 NR Description: expressed protein [Arabidopsis thaliana] T25N20.16 [Arabidopsis thaliana] >gi|17979351|gb|AAL49901.1| protein [Arabidopsis thaliana] >gi|20466017|gb|AAM20230.1|
  misc_feature (1)..(201): Homolog of NCBI NO: 16760314 NR Description: putative secreted protein [Salmonella enterica enterica serovar Typhi] >gi|29141921|ref|NP_805263.1| putative protein [Salmonella enterica subsp. enterica serovar Typhi Ty2]
MTVSTRLIDAGSTIMQRRLPVKQMNTHVSTFAIYGGDMSRLIGTHHYVHRVNDEFLQCAVYASDRSDAPLIGIEYVISDRLYETLSEDEQKLWHSHAYEVKSGSWAYPRLPEVVAAPELKNIAKTYGKFWCTWQIDRGDKLPMGAPELMMSPQGVGQGVLRPELVKRRDEKYNISTDDLKHTRAEIAEPEWINPMADYWKQHGKCFVLDIATVEMNRHAQFP

SEQ ID NO: 101077 - DNA, 1408 bp, Arabidopsis thaliana
  misc_feature (1)..(1408): Ceres Seq. ID no. 13606878
  misc_feature: MA Experiment ID: 20000166 Result: Up-regulated in Transcription
  misc_feature: MA Experiment 20000166 PARAMETER Experiment Name: At_100uM_ABA_P Parameter: Age (day) Value: 14
  misc_feature: MA Experiment 20000166 PARAMETER Experiment Name: At_100uM_ABA_P Parameter: Organism Value: A. thaliana
  misc_feature: MA Experiment 20000166 PARAMETER Experiment Name: At_100uM_ABA_P Parameter: Plant Line Value: WS
  misc_feature: MA Experiment 20000166 PARAMETER Experiment Name: At_100uM_ABA_P Parameter: Timepoint (hr) Value: 1
  misc_feature: MA Experiment 20000166 PARAMETER Experiment Name: At_100uM_ABA_P Parameter: Tissue Value: Aerial
  misc_feature: MA Experiment 20000166 PARAMETER Experiment Name: At_100uM_ABA_P Parameter: Treatment Value: 100uM ABA vs. No Treatment
  misc_feature: MA Experiment ID: 20000173 Result: Down-regulated in Transcription
  misc_feature: MA Experiment 20000173 PARAMETER Experiment Name: At_42deg_Heat_P Parameter: Age (day) Value: 14
  misc_feature: MA Experiment 20000173 PARAMETER Experiment Name: At_42deg_Heat_P Parameter: Organism Value: A. thaliana
  misc_feature: MA Experiment 20000173 PARAMETER Experiment Name: At_42deg_Heat_P Parameter: Plant Line Value: WS
  misc_feature: MA Experiment 20000173 PARAMETER Experiment Name: At_42deg_Heat_P Parameter: Temperature (deg C) Value: 42 vs. 22
  misc_feature: MA Experiment 20000173 PARAMETER Experiment Name: At_42deg_Heat_P Parameter: Timepoint (hr) Value: 6
  misc_feature: MA Experiment 20000173 PARAMETER Experiment Name: At_42deg_Heat_P Parameter: Tissue Value: Aerial
  misc_feature: MA Experiment ID: 20000179 Result: Down-regulated in Transcription
  misc_feature: MA Experiment 20000179 PARAMETER Experiment Name: At_Germinating_Seeds_P Parameter: Age (hr) Value: 6 vs. 0
  misc_feature: MA Experiment 20000179 PARAMETER Experiment Name: At_Germinating_Seeds_P Parameter: Tissue Value: Germinating Seeds
  misc_feature: MA Experiment ID: 20000182 Result: Up-regulated in Transcription
  misc_feature: MA Experiment 20000182 PARAMETER Experiment Name: At_2mM_SA_P Parameter: Age (day) Value: 14
  misc_feature: MA Experiment 20000182 PARAMETER Experiment Name: At_2mM_SA_P Parameter: Organism Value: A. thaliana
  misc_feature: MA Experiment 20000182 PARAMETER Experiment Name: At_2mM_SA_P Parameter: Plant Line Value: WS
  misc_feature: MA Experiment 20000182 PARAMETER Experiment Name: At_2mM_SA_P Parameter: Timepoint (hr) Value: 6
  misc_feature: MA Experiment 20000182 PARAMETER Experiment Name: At_2mM_SA_P Parameter: Tissue Value: Aerial
  misc_feature: MA Experiment 20000182 PARAMETER Experiment Name: At_2mM_SA_P Parameter: Treatment Value: 2mM SA vs. No Treatment
  misc_feature: MA Experiment ID: 20000184 Result: Down-regulated in Transcription
  misc_feature: MA Experiment 20000184 PARAMETER Experiment Name: At_Shoots__P Parameter: Age (day) Value: 7
  misc_feature: MA Experiment 20000184 PARAMETER Experiment Name: At_Shoots__P Parameter: Tissue Value: Shoots vs. Whole Plant
  misc_feature: MA Experiment ID: 20000185 Result: Down-regulated in Transcription
  misc_feature: MA Experiment 20000185 PARAMETER Experiment Name: At_Roots__P Parameter: Age (day) Value: 7 vs. 21
  misc_feature: MA Experiment 20000185 PARAMETER Experiment Name: At_Roots__P Parameter: Organism Value: A. thaliana
  misc_feature: MA Experiment 20000185 PARAMETER Experiment Name: At_Roots__P Parameter: Tissue Value: Roots vs. Whole Plant
  misc_feature: MA Experiment ID: 20000264 Result: Up-regulated in Transcription
  misc_feature: MA Experiment 20000264 PARAMETER Experiment Name: At_Open_Flower_P Parameter: Age (day) Value: 21
  misc_feature: MA Experiment 20000264 PARAMETER Experiment Name: At_Open_Flower_P Parameter: Plant Line Value: WS
  misc_feature: MA Experiment 20000264 PARAMETER Experiment Name: At_Open_Flower_P Parameter: Tissue Value: Open Flower vs. Whole Plant
  misc_feature: MA Experiment ID: 20000438 Result: Down-regulated in Transcription
  misc_feature: MA Experiment 20000438 PARAMETER Experiment Name: At_Shoots__P Parameter: Age (day) Value: 14
  misc_feature: MA Experiment 20000438 PARAMETER Experiment Name: At_Shoots__P Parameter: Tissue Value: Shoots vs. Whole Plant
  misc_feature: MA Experiment ID: 20000439 Result: Down-regulated in Transcription
  misc_feature: MA Experiment 20000439 PARAMETER Experiment Name: At_Roots__P Parameter: Age (day) Value: 14 vs. 21
  misc_feature: MA Experiment 20000439 PARAMETER Experiment Name: At_Roots__P Parameter: Organism Value: A. thaliana
  misc_feature: MA Experiment 20000439 PARAMETER Experiment Name: At_Roots__P Parameter: Tissue Value: Roots vs. Whole Plant
  misc_feature: MA Experiment ID: 20000456 Result: Up-regulated in Transcription
  misc_feature: MA Experiment 20000456 PARAMETER Experiment Name: At_100uM_BA_P Parameter: Age (day) Value: 14
  misc_feature: MA Experiment 20000456 PARAMETER Experiment Name: At_100uM_BA_P Parameter: Organism Value: A. thaliana
  misc_feature: MA Experiment 20000456 PARAMETER Experiment Name: At_100uM_BA_P Parameter: Plant Line Value: WS
  misc_feature: MA Experiment 20000456 PARAMETER Experiment Name: At_100uM_BA_P Parameter: Timepoint (hr) Value: 6
  misc_feature: MA Experiment 20000456 PARAMETER Experiment Name: At_100uM_BA_P Parameter: Tissue Value: Aerial
  misc_feature: MA Experiment 20000456 PARAMETER Experiment Name: At_100uM_BA_P Parameter: Treatment Value: 100uM BA vs. No Treatment
  misc_feature: MA Experiment ID: 20000460 Result: Up-regulated in Transcription
  misc_feature: MA Experiment 20000460 PARAMETER Experiment Name: At_10percent_PEG_P Parameter: Age (day) Value: 12
  misc_feature: MA Experiment 20000460 PARAMETER Experiment Name: At_10percent_PEG_P Parameter: Organism Value: A. thaliana
  misc_feature: MA Experiment 20000460 PARAMETER Experiment Name: At_10percent_PEG_P Parameter: Plant Line Value: WS
  misc_feature: MA Experiment 20000460 PARAMETER Experiment Name: At_10percent_PEG_P Parameter: Timepoint (day) Value: 12
  misc_feature: MA Experiment 20000460 PARAMETER Experiment Name: At_10percent_PEG_P Parameter: Tissue Value: Whole Plant
  misc_feature: MA Experiment 20000460 PARAMETER Experiment Name: At_10percent_PEG_P Parameter: Treatment Value: 10percent PEG vs. No Treatment
  misc_feature: MA Experiment ID: 20000495 Result: Down-regulated in Transcription
  misc_feature: MA Experiment 20000495 PARAMETER Experiment Name: At_Guard_Cells_P Parameter: Harvest Date Value: 8/2/2002
  misc_feature: MA Experiment 20000495 PARAMETER Experiment Name: At_Guard_Cells_P Parameter: Organism Value: A. thaliana
  misc_feature: MA Experiment 20000495 PARAMETER Experiment Name: At_Guard_Cells_P Parameter: Tissue Value: Guard Cells vs. Leaves
  misc_feature: MA Experiment ID: 20000794 Result: Up-regulated in Transcription
  misc_feature: MA Experiment 20000794 PARAMETER Experiment Name: At_Petals_P Parameter: Age (day) Value: 23-25 days
  misc_feature: MA Experiment 20000794 PARAMETER Experiment Name: At_Petals_P Parameter: Plant Line Value: WS
  misc_feature: MA Experiment 20000794 PARAMETER Experiment Name: At_Petals_P Parameter: Tissue Value: Petals vs. Whole plant
  misc_feature: MA Experiment ID: 20001757 Result: Down-regulated in Transcription
  misc_feature: MA Experiment 20001757 PARAMETER Experiment Name: At_50mM_NH4NO3_L-to-H_P Parameter: Timepoint (hr) Value: 6
  misc_feature: MA Experiment 20001757 PARAMETER Experiment Name: At_50mM_NH4NO3_L-to-H_P Parameter: Tissue Value: Leaf
  misc_feature: MA Experiment 20001757 PARAMETER Experiment Name: At_50mM_NH4NO3_L-to-H_P Parameter: Treatment Value: 50mM NH4NO3 vs 100mM Mannitol
  misc_feature: MA Experiment ID: 20001904 Result: Up-regulated in Transcription
  misc_feature: MA Experiment 20001904 PARAMETER Experiment Name: At_Drought_Reproduction_P Parameter: Age (day) Value: 37
  misc_feature: MA Experiment 20001904 PARAMETER Experiment Name: At_Drought_Reproduction_P Parameter: Organism Value: A. thaliana
  misc_feature: MA Experiment 20001904 PARAMETER Experiment Name: At_Drought_Reproduction_P Parameter: Plant Line Value: WS
  misc_feature: MA Experiment 20001904 PARAMETER Experiment Name: At_Drought_Reproduction_P Parameter: Timepoint (day) Value: 7
  misc_feature: MA Experiment 20001904 PARAMETER Experiment Name: At_Drought_Reproduction_P Parameter: Tissue Value: Rosettes
  misc_feature: MA Experiment 20001904 PARAMETER Experiment Name: At_Drought_Reproduction_P Parameter: Treatment Value: Drought vs. No Drought
  misc_feature: MA Experiment ID: 20001905 Result: Up-regulated in Transcription
  misc_feature: MA Experiment 20001905 PARAMETER Experiment Name: At_Drought_Reproduction_P Parameter: Age (day) Value: 40
  misc_feature: MA Experiment 20001905 PARAMETER Experiment Name: At_Drought_Reproduction_P Parameter: Organism Value: A. thaliana
  misc_feature: MA Experiment 20001905 PARAMETER Experiment Name: At_Drought_Reproduction_P Parameter: Plant Line Value: WS
  misc_feature: MA Experiment 20001905 PARAMETER Experiment Name: At_Drought_Reproduction_P Parameter: Timepoint (day) Value: 10
  misc_feature: MA Experiment 20001905 PARAMETER Experiment Name: At_Drought_Reproduction_P Parameter: Tissue Value: Rosettes
  misc_feature: MA Experiment 20001905 PARAMETER Experiment Name: At_Drought_Reproduction_P Parameter: Treatment Value: Drought vs. No Drought
  misc_feature: MA Experiment ID: 20001906 Result: Down-regulated in Transcription
  misc_feature: MA Experiment 20001906 PARAMETER Experiment Name: At_Drought_Reproduction_P Parameter: Age (day) Value: 35
  misc_feature: MA Experiment 20001906 PARAMETER Experiment Name: At_Drought_Reproduction_P Parameter: Organism Value: A. thaliana
  misc_feature: MA Experiment 20001906 PARAMETER Experiment Name: At_Drought_Reproduction_P Parameter: Plant Line Value: WS
  misc_feature: MA Experiment 20001906 PARAMETER Experiment Name: At_Drought_Reproduction_P Parameter: Timepoint (day) Value: 5
  misc_feature: MA Experiment 20001906 PARAMETER Experiment Name: At_Drought_Reproduction_P Parameter: Tissue Value: Siliques
  misc_feature: MA Experiment 20001906 PARAMETER Experiment Name: At_Drought_Reproduction_P Parameter: Treatment Value: Drought vs. No Drought
agttcctaaatcataactacaaaaacttttccttcttcttcctcaacctttgcttcaatcttcaacaactttctttttataaagattttgcaagttaagtgtaaacctacaaaaaccaaacatggtggttttgccacagccagtcactttagataaccacatctccctaatccccacatacaaaccggttccggttctcacttcccattcaatccccgtcgtcaacctagccgatccggaagcgaaaacccgaatcgtaaaagcctgcgaggagttcgggttcttcaaggtcgtaaaccacggagtccgacccgaactcatgactcggttagagcaggaggctattggcttcttcggcttgcctcagtctcttaaaaaccgggccggtccacctgaaccgtacggttatggtaataaacggattggaccaaacggtgacgttggttggattgagtatctcctcctcaatgctaatcctcagctctcctctcctaaaacctccgccgttttccgtcaaacccctcaaattttccgtgagtcggtggaggagtacatgaaggagattaaggaagtgtcgtacaaggtgttggagatggttgccgaagaactagggatagagccaagggacactctgagtaaaatgctgagagatgagaagagtgactcgtgcctgagactaaaccattatccggcggcggaggaagaggcggagaagatggtgaaggtggggtttggggaacacacagacccacagataatctcagtgctaagatctaataacacggcgggtcttcaaatctgtgtgaaagatggaagttgggtcgctgtccctcctgatcactcttctttcttcattaatgttggagatgctcttcaggttatgactaacgggaggttcaagagtgttaaacacagggtcttagccgatacaaggagatcgaggatttcaatgatatatttcggcggaccgccattgagccagaagatcgcaccattgccatgccttgtccctgagcaagatgattggctttacaaagaattcacttggtctcaatacaaatcttctgcttacaagtctaagcttggtgattatagacttggtctctttgagaaacaacctcttctcaatcataaaacccttgtatgagagtagtcatgatgatctttatcatcctttgtacgatagaaagtcataatcacaaaaagaaggaaatggatagtgttttggattagcttttttatgtttggtatgtttttcattaggtacaaaagctttaggctttgcttagagtttgacccaaccaaacctaacttttgtatcttctcgtcttcttcttctttttgccataatttgtttatctttcttgtaacaattagctagtgtttattttctctttatgtttcatct

SEQ ID NO: 101078 - protein, 341 aa, Arabidopsis thaliana
  peptide (1)..(341): Ceres Seq. ID no. 13606879
  misc_feature (180)..(283): Pfam Name: 2OG-Fe(II) oxygenase superfamily Pfam Description: 2OG-Fe(II) oxygenase superfamily
  misc_feature (1)..(341): Homolog of NCBI NO: 15220645 NR Description: gibberellin 2-oxidase (GA2-oxidase) (ga2ox2)
  misc_feature (1)..(333): Homolog of NCBI NO: 15226777 NR Description: gibberellin 2-oxidase (GA2-oxidase) (ga2ox3)
  misc_feature (1)..(331): Homolog of NCBI NO: 4678586 NR Description: GA 2-oxidase [Phaseolus coccineus]
  misc_feature (1)..(331): Homolog of NCBI NO: 9971227 NR Description: gibberellin 2-oxidase No1 [Lactuca sativa]
  misc_feature (21)..(336): Homolog of NCBI NO: 15218350 NR Description: gibberellin 2-oxidase (GA2-oxidase) (ga2ox1)
MVVLPQPVTLDNHISLIPTYKPVPVLTSHSIPVVNLADPEAKTRIVKACEEFGFFKVVNHGVRPELMTRLEQEAIGFFGLPQSLKNRAGPPEPYGYGNKRIGPNGDVGWIEYLLLNANPQLSSPKTSAVFRQTPQIFRESVEEYMKEIKEVSYKVLEMVAEELGIEPRDTLSKMLRDEKSDSCLRLNHYPAAEEEAEKMVKVGFGEHTDPQIISVLRSNNTAGLQICVKDGSWVAVPPDHSSFFINVGDALQVMTNGRFKSVKHRVLADTRRSRISMIYFGGPPLSQKIAPLPCLVPEQDDWLYKEFTWSQYKSSAYKSKLGDYRLGLFEKQPLLNHKTLV

SEQ ID NO: 101079 - protein, 275 aa, Arabidopsis thaliana
  peptide (1)..(275): Ceres Seq. ID no. 13606880
  misc_feature (114)..(217): Pfam Name: 2OG-Fe(II) oxygenase superfamily Pfam Description: 2OG-Fe(II) oxygenase superfamily
  misc_feature (1)..(275): Homolog of NCBI NO: 15220645 NR Description: gibberellin 2-oxidase (GA2-oxidase) (ga2ox2)
  misc_feature (1)..(267): Homolog of NCBI NO: 15226777 NR Description: gibberellin 2-oxidase (GA2-oxidase) (ga2ox3)
  misc_feature (1)..(265): Homolog of NCBI NO: 4678586 NR Description: GA 2-oxidase [Phaseolus coccineus]
  misc_feature (1)..(265): Homolog of NCBI NO: 9971227 NR Description: gibberellin 2-oxidase No1 [Lactuca sativa]
  misc_feature (1)..(270): Homolog of NCBI NO: 15218350 NR Description: gibberellin 2-oxidase (GA2-oxidase) (ga2ox1)
MTRLEQEAIGFFGLPQSLKNRAGPPEPYGYGNKRIGPNGDVGWIEYLLLNANPQLSSPKTSAVFRQTPQIFRESVEEYMKEIKEVSYKVLEMVAEELGIEPRDTLSKMLRDEKSDSCLRLNHYPAAEEEAEKMVKVGFGEHTDPQIISVLRSNNTAGLQICVKDGSWVAVPPDHSSFFINVGDALQVMTNGRFKSVKHRVLADTRRSRISMIYFGGPPLSQKIAPLPCLVPEQDDWLYKEFTWSQYKSSAYKSKLGDYRLGLFEKQPLLNHKTLV

SEQ ID NO: 101080 - protein, 197 aa, Arabidopsis thaliana
  peptide (1)..(197): Ceres Seq. ID no. 13606881
  misc_feature (36)..(139): Pfam Name: 2OG-Fe(II) oxygenase superfamily Pfam Description: 2OG-Fe(II) oxygenase superfamily
  misc_feature (1)..(197): Homolog of NCBI NO: 15220645 NR Description: gibberellin 2-oxidase (GA2-oxidase) (ga2ox2)
  misc_feature (1)..(189): Homolog of NCBI NO: 15226777 NR Description: gibberellin 2-oxidase (GA2-oxidase) (ga2ox3)
  misc_feature (1)..(187): Homolog of NCBI NO: 4678586 NR Description: GA 2-oxidase [Phaseolus coccineus]
  misc_feature (1)..(187): Homolog of NCBI NO: 9971227 NR Description: gibberellin 2-oxidase No1 [Lactuca sativa]
  misc_feature (1)..(192): Homolog of NCBI NO: 15218350 NR Description: gibberellin 2-oxidase (GA2-oxidase) (ga2ox1)
MKEIKEVSYKVLEMVAEELGIEPRDTLSKMLRDEKSDSCLRLNHYPAAEEEAEKMVKVGFGEHTDPQIISVLRSNNTAGLQICVKDGSWVAVPPDHSSFFINVGDALQVMTNGRFKSVKHRVLADTRRSRISMIYFGGPPLSQKIAPLPCLVPEQDDWLYKEFTWSQYKSSAYKSKLGDYRLGLFEKQPLLNHKTLV

SEQ ID NO: 101081 - DNA, 1702 bp, Arabidopsis thaliana
  misc_feature (1)..(1702): Ceres Seq. ID no. 13606882
  misc_feature: MA Experiment ID: 20000166 Result: Up-regulated in Transcription
  misc_feature: MA Experiment 20000166 PARAMETER Experiment Name: At_100uM_ABA_P Parameter: Age (day) Value: 14
  misc_feature: MA Experiment 20000166 PARAMETER Experiment Name: At_100uM_ABA_P Parameter: Organism Value: A. thaliana
  misc_feature: MA Experiment 20000166 PARAMETER Experiment Name: At_100uM_ABA_P Parameter: Plant Line Value: WS
  misc_feature: MA Experiment 20000166 PARAMETER Experiment Name: At_100uM_ABA_P Parameter: Timepoint (hr) Value: 1
  misc_feature: MA Experiment 20000166 PARAMETER Experiment Name: At_100uM_ABA_P Parameter: Tissue Value: Aerial
  misc_feature: MA Experiment 20000166 PARAMETER Experiment Name: At_100uM_ABA_P Parameter: Treatment Value: 100uM ABA vs. No Treatment
  misc_feature: MA Experiment ID: 20000182 Result: Up-regulated in Transcription
  misc_feature: MA Experiment 20000182 PARAMETER Experiment Name: At_2mM_SA_P Parameter: Age (day) Value: 14
  misc_feature: MA Experiment 20000182 PARAMETER Experiment Name: At_2mM_SA_P Parameter: Organism Value: A. thaliana
  misc_feature: MA Experiment 20000182 PARAMETER Experiment Name: At_2mM_SA_P Parameter: Plant Line Value: WS
  misc_feature: MA Experiment 20000182 PARAMETER Experiment Name: At_2mM_SA_P Parameter: Timepoint (hr) Value: 6
  misc_feature: MA Experiment 20000182 PARAMETER Experiment Name: At_2mM_SA_P Parameter: Tissue Value: Aerial
  misc_feature: MA Experiment 20000182 PARAMETER Experiment Name: At_2mM_SA_P Parameter: Treatment Value: 2mM SA vs. No Treatment
  misc_feature: MA Experiment ID: 20000184 Result: Down-regulated in Transcription
  misc_feature: MA Experiment 20000184 PARAMETER Experiment Name: At_Shoots__P Parameter: Age (day) Value: 7
  misc_feature: MA Experiment 20000184 PARAMETER Experiment Name: At_Shoots__P Parameter: Tissue Value: Shoots vs. Whole Plant
  misc_feature: MA Experiment ID: 20000211 Result: Up-regulated in Transcription
  misc_feature: MA Experiment 20000211 PARAMETER Experiment Name: At_0.001percent_MeJA__P Parameter: Age (day) Value: 14
  misc_feature: MA Experiment 20000211 PARAMETER Experiment Name: At_0.001percent_MeJA__P Parameter: Organism Value: A. thaliana
  misc_feature: MA Experiment 20000211 PARAMETER Experiment Name: At_0.001percent_MeJA__P Parameter: Plant Line Value: WS
  misc_feature: MA Experiment 20000211 PARAMETER Experiment Name: At_0.001percent_MeJA__P Parameter: Timepoint (hr) Value: 1
  misc_feature: MA Experiment 20000211 PARAMETER Experiment Name: At_0.001percent_MeJA__P Parameter: Tissue Value: Aerial
  misc_feature: MA Experiment 20000211 PARAMETER Experiment Name: At_0.001percent_MeJA__P Parameter: Treatment Value: 0.001percent MeJA vs. No Treatment
  misc_feature: MA Experiment ID: 20000234 Result: Down-regulated in Transcription
  misc_feature: MA Experiment 20000234 PARAMETER Experiment Name: At_Siliques_P Parameter: Age (day) Value: 21
  misc_feature: MA Experiment 20000234 PARAMETER Experiment Name: At_Siliques_P Parameter: Organism Value: A. thaliana
  misc_feature: MA Experiment 20000234 PARAMETER Experiment Name: At_Siliques_P Parameter: Plant Line Value: WS
  misc_feature: MA Experiment 20000234 PARAMETER Experiment Name: At_Siliques_P Parameter: Tissue Value: Less Than 5mm Siliques vs. Whole Plant
  misc_feature: MA Experiment ID: 20000235 Result: Down-regulated in Transcription
  misc_feature: MA Experiment 20000235 PARAMETER Experiment Name: At_Siliques_P Parameter: Age (day) Value: 21
  misc_feature: MA Experiment 20000235 PARAMETER Experiment Name: At_Siliques_P Parameter: Organism Value: A. thaliana
  misc_feature: MA Experiment 20000235 PARAMETER Experiment Name: At_Siliques_P Parameter: Plant Line Value: WS
  misc_feature: MA Experiment 20000235 PARAMETER Experiment Name: At_Siliques_P Parameter: Tissue Value: 5-10mm Siliques vs. Whole Plant
  misc_feature: MA Experiment ID: 20000264 Result: Down-regulated in Transcription
  misc_feature: MA Experiment 20000264 PARAMETER Experiment Name: At_Open_Flower_P Parameter: Age (day) Value: 21
  misc_feature: MA Experiment 20000264 PARAMETER Experiment Name: At_Open_Flower_P Parameter: Plant Line Value: WS
  misc_feature: MA Experiment 20000264 PARAMETER Experiment Name: At_Open_Flower_P Parameter: Tissue Value: Open Flower vs. Whole Plant
  misc_feature: MA Experiment ID: 20000438 Result: Down-regulated in Transcription
  misc_feature: MA Experiment 20000438 PARAMETER Experiment Name: At_Shoots__P Parameter: Age (day) Value: 14
  misc_feature: MA Experiment 20000438 PARAMETER Experiment Name: At_Shoots__P Parameter: Tissue Value: Shoots vs. Whole Plant
  misc_feature: MA Experiment ID: 20001557 Result: Up-regulated in Transcription
  misc_feature: MA Experiment 20001557 PARAMETER Experiment Name: At_Drought_Soil_Dry_P Parameter: Age (day) Value: 27
  misc_feature: MA Experiment 20001557 PARAMETER Experiment Name: At_Drought_Soil_Dry_P Parameter: Organism Value: A. thaliana
  misc_feature: MA Experiment 20001557 PARAMETER Experiment Name: At_Drought_Soil_Dry_P Parameter: Plant Line Value: WS
  misc_feature: MA Experiment 20001557 PARAMETER Experiment Name: At_Drought_Soil_Dry_P Parameter: Post Timepoint (hr) Value: 3
  misc_feature: MA Experiment 20001557 PARAMETER Experiment Name: At_Drought_Soil_Dry_P Parameter: Post-Treatment Value: Re-Water vs. No Drought
  misc_feature: MA Experiment 20001557 PARAMETER Experiment Name: At_Drought_Soil_Dry_P Parameter: Timepoint (day) Value: 13
  misc_feature: MA Experiment 20001557 PARAMETER Experiment Name: At_Drought_Soil_Dry_P Parameter: Treatment Value: Drought vs. No Drought
  misc_feature: MA Experiment ID: 20001560 Result: Up-regulated in Transcription
  misc_feature: MA Experiment 20001560 PARAMETER Experiment Name: At_Drought_Soil_Dry_P Parameter: Age (day) Value: 28
  misc_feature: MA Experiment 20001560 PARAMETER Experiment Name: At_Drought_Soil_Dry_P Parameter: Organism Value: A. thaliana
  misc_feature: MA Experiment 20001560 PARAMETER Experiment Name: At_Drought_Soil_Dry_P Parameter: Plant Line Value: WS
  misc_feature: MA Experiment 20001560 PARAMETER Experiment Name: At_Drought_Soil_Dry_P Parameter: Post Timepoint (hr) Value: None
  misc_feature: MA Experiment 20001560 PARAMETER Experiment Name: At_Drought_Soil_Dry_P Parameter: Post-Treatment Value: None
  misc_feature: MA Experiment 20001560 PARAMETER Experiment Name: At_Drought_Soil_Dry_P Parameter: Timepoint (day) Value: 14
  misc_feature: MA Experiment 20001560 PARAMETER Experiment Name: At_Drought_Soil_Dry_P Parameter: Treatment Value: Drought vs. No Drought
agaggaattagagaaagcaagctttgtgtctgtaaatataaagagatagagaaaagatttggcattggcaatggattacgagaggatacagaaagtgcagaagagtataatctcgccaacgaagctgagaatgaagctaatgggtccactcaataacatgaagcgagaaggatccaagtccaacagtaactcttcaagaacatctccttctcgtcttcagattccagatgactccgagttctccaagaacagcttgttagcttctaactcttattcagacgacgatgtggcagctacaactacggatatagaagtagctaagctgccaaatgagccggttttgtatccaaccgagaacgataatcaaggctcaaaagatcggtgtgaaggtgttgttccaagggaaaatgatcagcctagactgcagcaatttaggaaaggggacttgaatatggcttctcctcatataatgagacctcaagaagatgaaaaccttgattatgacagtaacgctagctcttcaagcttcgagtttcaccgagctcgtggtgagcgttcgaatcagaatcatggctcaagaggatatccttcaagacaaatgccatctaaatggaatgatgctgagaagtggataatgagcagacagaacatggtgatgaggaagaacggtcaagggaaccgaatacctgtgagaattgtgcctgataatgcaggttacgagcataacaaatctaggatggatctgtgccaatcctcacaagttgatgggtttgagaagttccctaatgttgttccctcggcgccacatcctattctaactcaagagtatggaggagactcgttgattgaccaatccacacaaagcaatgatcttgcggattcatcacatgatcatacaacaggtggtcctgcgattcgttcggtatgtatgagagatatgggaaccgaaatgacacctataccgagtcaagaaccttcaagatctgtgacaccagttggtgcaacaactcctcttcgtagcccgacttcatctctcccttctactcctagaggtggccaaccagaggaatcttctatgtcgaaaaacacaagaagagaactatctgaggaggaagagaaagcgaagacgcgaagagagattgtagctcttggagttcagctagggaagatgaacatcgccgcttgggcaagtaaagaagaagaggagaacaagaaaaacaatggagatgcagaggaggcacagaagattgagtttgaaaaacgagcgactgcatgggaagaagcagagaaatccaaacataatgcgaggtataagcgtgaggaaatcagaatccaagcttgggaaagtcaggagaaagccaaactcgaagcagaaatgcgacgtatagaggctaaagttgagcagatgaaagctgaagctgaagcaaagataatgaagaaaattgcgttggctaagcaaaggtcagaagagaaacgggctttggcggaagctagaaaaacccgtgatgctgagaaggcagtggctgaagcccaatatattcgggaaactggtagaataccggcatcaagttacaagatatgttgtggttggttctcatgaggcattggattgagtttttggtcttctgagtaaaccatgattggattctcaaagcccctttgtgtaatatagaaatggaatgcatattatgttgcatagact

SEQ ID NO: 101082 - protein, 509 aa, Arabidopsis thaliana
  peptide (1)..(509): Ceres Seq. ID no. 13606883
  misc_feature (390)..(501): Pfam Name: Remorin, C-terminal region Pfam Description: Remorin, C-terminal region
  misc_feature (1)..(509): Homolog of NCBI NO: 15220725 NR Description: expressed protein [Arabidopsis thaliana]
  misc_feature (208)..(504): Homolog of NCBI NO: 18395321 NR Description: expressed protein [Arabidopsis thaliana]
  misc_feature (280)..(508): Homolog of NCBI NO: 38344336 NR Description: OSJNBa0058K23.18 [Oryza sativa (japonica
  misc_feature (280)..(507): Homolog of NCBI NO: 34902218 NR Description: Unknown protein [Oryza sativa (japonica
  misc_feature (306)..(503): Homolog of NCBI NO: 18408804 NR Description: expressed protein [Arabidopsis thaliana] F12A21.28 [Arabidopsis thaliana]
  misc_feature (306)..(503): Homolog of NCBI NO: 28393368 NR Description: unknown protein [Arabidopsis thaliana]
  misc_feature (306)..(503): Homolog of NCBI NO: 21536537 NR Description: unknown [Arabidopsis thaliana]
  misc_feature (1)..(495): Homolog of NCBI NO: 38344336 NR Description: OSJNBa0058K23.18 [Oryza sativa (japonica
  misc_feature (288)..(488): Homolog of NCBI NO: 15220963 NR Description: hypothetical protein [Arabidopsis thaliana]
  misc_feature (282)..(466): Homolog of NCBI NO: 28393368 NR Description: unknown protein [Arabidopsis thaliana]
MDYERIQKVQKSIISPTKLRMKLMGPLNNMKREGSKSNSNSSRTSPSRLQIPDDSEFSKNSLLASNSYSDDDVAATTTDIEVAKLPNEPVLYPTENDNQGSKDRCEGVVPRENDQPRLQQFRKGDLNMASPHIMRPQEDENLDYDSNASSSSFEFHRARGERSNQNHGSRGYPSRQMPSKWNDAEKWIMSRQNMVMRKNGQGNRIPVRIVPDNAGYEHNKSRMDLCQSSQVDGFEKFPNVVPSAPHPILTQEYGGDSLIDQSTQSNDLADSSHDHTTGGPAIRSVCMRDMGTEMTPIPSQEPSRSVTPVGATTPLRSPTSSLPSTPRGGQPEESSMSKNTRRELSEEEEKAKTRREIVALGVQLGKMNIAAWASKEEEENKKNNGDAEEAQKIEFEKRATAWEEAEKSKHNARYKREEIRIQAWESQEKAKLEAEMRRIEAKVEQMKAEAEAKIMKKIALAKQRSEEKRALAEARKTRDAEKAVAEAQYIRETGRIPASSYKICCGWFS

SEQ ID NO: 101083 - protein, 489 aa, Arabidopsis thaliana
  peptide (1)..(489): Ceres Seq. ID no. 13606884
  misc_feature (370)..(481): Pfam Name: Remorin, C-terminal region Pfam Description: Remorin, C-terminal region
  misc_feature (1)..(489): Homolog of NCBI NO: 15220725 NR Description: expressed protein [Arabidopsis thaliana]
  misc_feature (188)..(484): Homolog of NCBI NO: 18395321 NR Description: expressed protein [Arabidopsis thaliana]
  misc_feature (260)..(488): Homolog of NCBI NO: 38344336 NR Description: OSJNBa0058K23.18 [Oryza sativa (japonica
  misc_feature (260)..(487): Homolog of NCBI NO: 34902218 NR Description: Unknown protein [Oryza sativa (japonica
  misc_feature (286)..(483): Homolog of NCBI NO: 18408804 NR Description: expressed protein [Arabidopsis thaliana] F12A21.28 [Arabidopsis thaliana]
  misc_feature (286)..(483): Homolog of NCBI NO: 21536537 NR Description: unknown [Arabidopsis thaliana]
  misc_feature (286)..(483): Homolog of NCBI NO: 28393368 NR Description: unknown protein [Arabidopsis thaliana]
  misc_feature (1)..(475): Homolog of NCBI NO: 38344336 NR Description: OSJNBa0058K23.18 [Oryza sativa (japonica
  misc_feature (268)..(468): Homolog of NCBI NO: 15220963 NR Description: hypothetical protein [Arabidopsis thaliana]
  misc_feature (262)..(446): Homolog of NCBI NO: 28393368 NR Description: unknown protein [Arabidopsis thaliana]
MKLMGPLNNMKREGSKSNSNSSRTSPSRLQIPDDSEFSKNSLLASNSYSDDDVAATTTDIEVAKLPNEPVLYPTENDNQGSKDRCEGVVPRENDQPRLQQFRKGDLNMASPHIMRPQEDENLDYDSNASSSSFEFHRARGERSNQNHGSRGYPSRQMPSKWNDAEKWIMSRQNMVMRKNGQGNRIPVRIVPDNAGYEHNKSRMDLCQSSQVDGFEKFPNVVPSAPHPILTQEYGGDSLIDQSTQSNDLADSSHDHTTGGPAIRSVCMRDMGTEMTPIPSQEPSRSVTPVGATTPLRSPTSSLPSTPRGGQPEESSMSKNTRRELSEEEEKAKTRREIVALGVQLGKMNIAAWASKEEEENKKNNGDAEEAQKIEFEKRATAWEEAEKSKHNARYKREEIRIQAWESQEKAKLEAEMRRIEAKVEQMKAEAEAKIMKKIALAKQRSEEKRALAEARKTRDAEKAVAEAQYIRETGRIPASSYKICCGWFS

SEQ ID NO: 101084 - protein, 486 aa, Arabidopsis thaliana
  peptide (1)..(486): Ceres Seq. ID no. 13606885
  misc_feature (367)..(478): Pfam Name: Remorin, C-terminal region Pfam Description: Remorin, C-terminal region
  misc_feature (1)..(486): Homolog of NCBI NO: 15220725 NR Description: expressed protein [Arabidopsis thaliana]
  misc_feature (185)..(481): Homolog of NCBI NO: 18395321 NR Description: expressed protein [Arabidopsis thaliana]
  misc_feature (257)..(485): Homolog of NCBI NO: 38344336 NR Description: OSJNBa0058K23.18 [Oryza sativa (japonica
  misc_feature (257)..(484): Homolog of NCBI NO: 34902218 NR Description: Unknown protein [Oryza sativa (japonica
  misc_feature (283)..(480): Homolog of NCBI NO: 18408804 NR Description: expressed protein [Arabidopsis thaliana] F12A21.28 [Arabidopsis thaliana]
  misc_feature (283)..(480): Homolog of NCBI NO: 21536537 NR Description: unknown [Arabidopsis thaliana]
  misc_feature (283)..(480): Homolog of NCBI NO: 28393368 NR Description: unknown protein [Arabidopsis thaliana]
  misc_feature (1)..(472): Homolog of NCBI NO: 38344336 NR Description: OSJNBa0058K23.18 [Oryza sativa (japonica
  misc_feature (265)..(465): Homolog of NCBI NO: 15220963 NR Description: hypothetical protein [Arabidopsis thaliana]
  misc_feature (259)..(443): Homolog of NCBI NO: 28393368 NR Description: unknown protein [Arabidopsis thaliana]
MGPLNNMKREGSKSNSNSSRTSPSRLQIPDDSEFSKNSLLASNSYSDDDVAATTTDIEVAKLPNEPVLYPTENDNQGSKDRCEGVVPRENDQPRLQQFRKGDLNMASPHIMRPQEDENLDYDSNASSSSFEFHRARGERSNQNHGSRGYPSRQMPSKWNDAEKWIMSRQNMVMRKNGQGNRIPVRIVPDNAGYEHNKSRMDLCQSSQVDGFEKFPNVVPSAPHPILTQEYGGDSLIDQSTQSNDLADSSHDHTTGGPAIRSVCMRDMGTEMTPIPSQEPSRSVTPVGATTPLRSPTSSLPSTPRGGQPEESSMSKNTRRELSEEEEKAKTRREIVALGVQLGKMNIAAWASKEEEENKKNNGDAEEAQKIEFEKRATAWEEAEKSKHNARYKREEIRIQAWESQEKAKLEAEMRRIEAKVEQMKAEAEAKIMKKIALAKQRSEEKRALAEARKTRDAEKAVAEAQYIRETGRIPASSYKICCGWFS

SEQ ID NO: 101085 - DNA, 1514 bp, Arabidopsis thaliana
  misc_feature (1)..(1514): Ceres Seq. ID no. 13606886
  misc_feature: MA Experiment ID: 108462 Result: Up-regulated in Transcription
  misc_feature: MA Experiment 108462 PARAMETER Experiment Name: At_Germinating_Seeds_cDNA_P Parameter: Age (day) Value: 2 vs. 0
  misc_feature: MA Experiment 108462 PARAMETER Experiment Name: At_Germinating_Seeds_cDNA_P Parameter: Tissue Value: Germinating Seeds
  misc_feature: MA Experiment ID: 108464 Result: Up-regulated in Transcription
  misc_feature: MA Experiment 108464 PARAMETER Experiment Name: At_Germinating_Seeds_cDNA_P Parameter: Age (day) Value: 4 vs. 0
  misc_feature: MA Experiment 108464 PARAMETER Experiment Name: At_Germinating_Seeds_cDNA_P Parameter: Tissue Value: Germinating Seeds
  misc_feature: MA Experiment ID: 108488 Result: Up-regulated in Transcription
  misc_feature: MA Experiment ID: 108489 Result: Up-regulated in Transcription
  misc_feature: MA Experiment ID: 108594 Result: Down-regulated in Transcription
  misc_feature: MA Experiment 108594 PARAMETER Experiment Name: At_Ler-rhl_Root_cDNA_P Parameter: Plant Line Value: null
  misc_feature: MA Experiment ID: 20000111 Result: Down-regulated in Transcription
  misc_feature: MA Experiment 20000111 PARAMETER Experiment Name: At_42deg_Heat_cDNA_P Parameter: Temperature (deg C) Value: 42 vs. 22
  misc_feature: MA Experiment 20000111 PARAMETER Experiment Name: At_42deg_Heat_cDNA_P Parameter: Timepoint (hr) Value: 6
  misc_feature: MA Experiment 20000111 PARAMETER Experiment Name: At_42deg_Heat_cDNA_P Parameter: Tissue Value: Aerial
  misc_feature: MA Experiment ID: 20000113 Result: Down-regulated in Transcription
  misc_feature: MA Experiment 20000113 PARAMETER Experiment Name: At_42deg_Heat_cDNA_P Parameter: Temperature (deg C) Value: 42 vs. 22
  misc_feature: MA Experiment 20000113 PARAMETER Experiment Name: At_42deg_Heat_cDNA_P Parameter: Timepoint (hr) Value: 8
  misc_feature: MA Experiment 20000113 PARAMETER Experiment Name: At_42deg_Heat_cDNA_P Parameter: Tissue Value: Aerial
  misc_feature: MA Experiment ID: 20000306 Result: Up-regulated in Transcription
  misc_feature: MA Experiment 20000306 PARAMETER Experiment Name: At_Germinating_Seeds_Sub_P Parameter: Age (hr) Value: 6 vs. 0
  misc_feature: MA Experiment 20000306 PARAMETER Experiment Name: At_Germinating_Seeds_Sub_P Parameter: Organism Value: A. thaliana
  misc_feature: MA Experiment 20000306 PARAMETER Experiment Name: At_Germinating_Seeds_Sub_P Parameter: Plant Line Value: WS
  misc_feature: MA Experiment 20000306 PARAMETER Experiment Name: At_Germinating_Seeds_Sub_P Parameter: Tissue Value: Germinating Seeds
  misc_feature: MA Experiment ID: 20000307 Result: Up-regulated in Transcription
  misc_feature: MA Experiment 20000307 PARAMETER Experiment Name: At_Germinating_Seeds_Sub_P Parameter: Age (hr) Value: 24 vs. 0
  misc_feature: MA Experiment 20000307 PARAMETER Experiment Name: At_Germinating_Seeds_Sub_P Parameter: Organism Value: A. thaliana
  misc_feature: MA Experiment 20000307 PARAMETER Experiment Name: At_Germinating_Seeds_Sub_P Parameter: Plant Line Value: WS
  misc_feature: MA Experiment 20000307 PARAMETER Experiment Name: At_Germinating_Seeds_Sub_P Parameter: Tissue Value: Germinating Seeds
  misc_feature: MA Experiment ID: 20000314 Result: Up-regulated in Transcription
  misc_feature: MA Experiment 20000314 PARAMETER Experiment Name: At_14day_Shoots-Roots_Sub_P Parameter: Age (day) Value: 14
  misc_feature: MA Experiment 20000314 PARAMETER Experiment Name: At_14day_Shoots-Roots_Sub_P Parameter: Organism Value: A. thaliana
  misc_feature: MA Experiment 20000314 PARAMETER Experiment Name: At_14day_Shoots-Roots_Sub_P Parameter: Plant Line Value: WS
  misc_feature: MA Experiment 20000314 PARAMETER Experiment Name: At_14day_Shoots-Roots_Sub_P Parameter: Tissue Value: Roots vs. Whole Plant
  misc_feature: MA Experiment ID: 20000327 Result: Down-regulated in Transcription
  misc_feature: MA Experiment 20000327 PARAMETER Experiment Name: At_42deg_Heat_Sub_P Parameter: Age (day) Value: 14
  misc_feature: MA Experiment 20000327 PARAMETER Experiment Name: At_42deg_Heat_Sub_P Parameter: Organism Value: A. thaliana
  misc_feature: MA Experiment 20000327 PARAMETER Experiment Name: At_42deg_Heat_Sub_P Parameter: Plant Line Value: WS
  misc_feature: MA Experiment 20000327 PARAMETER Experiment Name: At_42deg_Heat_Sub_P Parameter: Temperature (deg C) Value: 42 vs. 22
  misc_feature: MA Experiment 20000327 PARAMETER Experiment Name: At_42deg_Heat_Sub_P Parameter: Timepoint (hr) Value: 1
  misc_feature: MA Experiment 20000327 PARAMETER Experiment Name: At_42deg_Heat_Sub_P Parameter: Tissue Value: Aerial
  misc_feature: MA Experiment ID: 20001806 Result: Up-regulated in Transcription
  misc_feature: MA Experiment 20001806 PARAMETER Experiment Name: At_50mM_NH4NO3_L-to-H_Sub_P Parameter: Timepoint (hr) Value: 4
  misc_feature: MA Experiment 20001806 PARAMETER Experiment Name: At_50mM_NH4NO3_L-to-H_Sub_P Parameter: Tissue Value: Leaf
  misc_feature: MA Experiment 20001806 PARAMETER Experiment Name: At_50mM_NH4NO3_L-to-H_Sub_P Parameter: Treatment Value: 50mM NH4NO3 vs 100mM Mannitol
  misc_feature: MA Experiment ID: 20001807 Result: Up-regulated in Transcription
  misc_feature: MA Experiment 20001807 PARAMETER Experiment Name: At_50mM_NH4NO3_L-to-H_Sub_P Parameter: Timepoint (hr) Value: 6
  misc_feature: MA Experiment 20001807 PARAMETER Experiment Name: At_50mM_NH4NO3_L-to-H_Sub_P Parameter: Tissue Value: Leaf
  misc_feature: MA Experiment 20001807 PARAMETER Experiment Name: At_50mM_NH4NO3_L-to-H_Sub_P Parameter: Treatment Value: 50mM NH4NO3 vs 100mM Mannitol
aattaattaattaagaagtctgagagcgtcagttggaggagtccaaaagaggagaagaaggaagcttggcctttgaggagattcaaaggatcgtgttgcttactgtatttaaaaaccctagagttcatcatcatcttcctctcattattgattgctctaatcaggttccgacgagactaataatcctttctcagatcgataacaatgtctcactctgctgtttctcaggctggtgctgtctcagtttcaattgaaaaccaacgttctcttagaagatccgtcttcaagaacaatagcataagcttcaacagcaagtcatggtcatcttctttagcattgaaccagaagacaacaagcataagagatgggaaacggtacccgagcacgacaatatgtatgtcggttcaacaaacaagtagttccaaggttactgtctctcctatagagttggaagaccctaaggatcctcctttgaacttgtacaaacccaaggagtcttacaccgctaagattgtctctgtggagcgagtagttggcccgaaagcccctggagaaacttgtcatatcgtcatcgatcatgatggtaaccttccttactgggaaggacagagttacggtgtgattcctccaggtgagaacccgaagaaaccgggagcgccacacaatgtgcgcctttactcaattgcatcaacaaggtacggagatttctttgacggtaaaacagcgagtttgtgtgtacgtagagctgtttattacgaccctgagactggaaaagaagatccttcaaagaacggagtctgcagcaacttcctatgtgattcaaagcccggtgacaagattcaaatcaccggtccatctgggaaggtaatgctattacccgagagtgatccaaacgcgacacacataatgatagccacgggaacaggagtggctccatacagaggctacttacgtcgaatgttcatggaaaacgtcccaaacaagacatttagcggcttagcttggctcttcttaggcgtggccaacaccgatagccttctctatgacgaagagtttaccaagtacctaaaagaccatccagacaactttaggttcgacaaggcattgagcagagaggagaagaacaagaaaggtggaaagatgtacgtgcaggacaagattgaagaatatagtgatgagatcttcaagcttttggacaatggagctcatatttacttctgtgggcttaaaggaatgatgcctgggattcaagatacacttaagagagttgcagaagagagaggtgagagctgggacttgaagctttctcagctcaggaagaacaagcagtggcacgttgaagtctattgagctctttatttgtatttgctgtttttgatttttgatttaagaatcgtaataaatttgaatttggtgtttttctacttttcaaacatgatatgatgataatatctgaaatttgttggttttgagaagagaatattctcagagaataatcaatatatcatttatgt

SEQ ID NO: 101086 - protein, 381 aa, Arabidopsis thaliana
  peptide (1)..(381): Ceres Seq. ID no. 13606887
  misc_feature (230)..(351): Pfam Name: Oxidoreductase NAD-binding domain Pfam Description: Oxidoreductase NAD-binding domain
  misc_feature (1)..(381): Homolog of NCBI NO: 18397542 NR Description: ferredoxin--NADP(+) reductase (adrenodoxin
  misc_feature (1)..(381): Homolog of NCBI NO: 21593597 NR Description: ferrodoxin NADP oxidoreductase, putative
  misc_feature (1)..(381): Homolog of NCBI NO: 30691910 NR Description: ferredoxin--NADP(+) reductase (adrenodoxin putative [Arabidopsis thaliana] >gi|25285861|pir||B86430
  misc_feature (1)..(381): Homolog of NCBI NO: 7433380 NR Description: ferredoxin-NADP reductase (EC 1.18.1.2) - garden (fragment) >gi|1480347|emb|CAA67796.1| ferrodoxin NADP
  misc_feature (1)..(381): Homolog of NCBI NO: 3913648 NR Description: Ferredoxin--NADP reductase, root isozyme,
  misc_feature (24)..(381): Homolog of NCBI NO: 18412939 NR Description: ferredoxin--NADP(+) reductase (adrenodoxin
  misc_feature (1)..(381): Homolog of NCBI NO: 3913650 NR Description: Ferredoxin--NADP reductase, root-type isozyme,
  misc_feature (24)..(381): Homolog of NCBI NO: 21592875 NR Description: ferredoxin--NADP+ reductase-like protein
  misc_feature (24)..(381): Homolog of NCBI NO: 22530948 NR Description: ferredoxin--NADP+ reductase-like protein
  misc_feature (31)..(381): Homolog of NCBI NO: 25285860 NR Description: ferredoxin-NADP+ reductase-like protein
MSHSAVSQAGAVSVSIENQRSLRRSVFKNNSISFNSKSWSSSLALNQKTTSIRDGKRYPSTTICMSVQQTSSSKVTVSPIELEDPKDPPLNLYKPKESYTAKIVSVERVVGPKAPGETCHIVIDHDGNLPYWEGQSYGVIPPGENPKKPGAPHNVRLYSIASTRYGDFFDGKTASLCVRRAVYYDPETGKEDPSKNGVCSNFLCDSKPGDKIQITGPSGKVMLLPESDPNATHIMIATGTGVAPYRGYLRRMFMENVPNKTFSGLAWLFLGVANTDSLLYDEEFTKYLKDHPDNFRFDKALSREEKNKKGGKMYVQDKIEEYSDEIFKLLDNGAHIYFCGLKGMMPGIQDTLKRVAEERGESWDLKLSQLRKNKQWHVEVY

SEQ ID NO: 101087 - protein, 317 aa, Arabidopsis thaliana; identical to SEQ ID NO: 25346
  peptide (1)..(317): Ceres Seq. ID no. 13606888
  misc_feature (166)..(287): Pfam Name: Oxidoreductase NAD-binding domain Pfam Description: Oxidoreductase NAD-binding domain
  misc_feature (1)..(317): Homolog of NCBI NO: 18397542 NR Description: ferredoxin--NADP(+) reductase (adrenodoxin
  misc_feature (1)..(317): Homolog of NCBI NO: 21593597 NR Description: ferrodoxin NADP oxidoreductase, putative
  misc_feature (1)..(317): Homolog of NCBI NO: 30691910 NR Description: ferredoxin--NADP(+) reductase (adrenodoxin putative [Arabidopsis thaliana] >gi|25285861|pir||B86430
  misc_feature (1)..(317): Homolog of NCBI NO: 7433380 NR Description: ferredoxin-NADP reductase (EC 1.18.1.2) - garden (fragment) >gi|1480347|emb|CAA67796.1| ferrodoxin NADP
  misc_feature (1)..(317): Homolog of NCBI NO: 3913648 NR Description: Ferredoxin--NADP reductase, root isozyme,
  misc_feature (1)..(317): Homolog of NCBI NO: 18412939 NR Description: ferredoxin--NADP(+) reductase (adrenodoxin
  misc_feature (1)..(317): Homolog of NCBI NO: 3913650 NR Description: Ferredoxin--NADP reductase, root-type isozyme,
  misc_feature (1)..(317): Homolog of NCBI NO: 21592875 NR Description: ferredoxin--NADP+ reductase-like protein
  misc_feature (1)..(317): Homolog of NCBI NO: 22530948 NR Description: ferredoxin--NADP+ reductase-like protein
  misc_feature (1)..(317): Homolog of NCBI NO: 25285860 NR Description: ferredoxin-NADP+ reductase-like protein

SEQ ID NO: 101088 - DNA, 1404 bp, Arabidopsis thaliana
  misc_feature (1)..(1404): Ceres Seq. ID no. 13606889
  misc_feature: MA Experiment ID: 20000182 Result: Up-regulated in Transcription
  misc_feature: MA Experiment 20000182 PARAMETER Experiment Name: At_2mM_SA_P Parameter: Age (day) Value: 14
  misc_feature: MA Experiment 20000182 PARAMETER Experiment Name: At_2mM_SA_P Parameter: Organism Value: A. thaliana
  misc_feature: MA Experiment 20000182 PARAMETER Experiment Name: At_2mM_SA_P Parameter: Plant Line Value: WS
  misc_feature: MA Experiment 20000182 PARAMETER Experiment Name: At_2mM_SA_P Parameter: Timepoint (hr) Value: 6
  misc_feature: MA Experiment 20000182 PARAMETER Experiment Name: At_2mM_SA_P Parameter: Tissue Value: Aerial
  misc_feature: MA Experiment 20000182 PARAMETER Experiment Name: At_2mM_SA_P Parameter: Treatment Value: 2mM SA vs. No Treatment
  misc_feature: MA Experiment ID: 20000184 Result: Down-regulated in Transcription
  misc_feature: MA Experiment 20000184 PARAMETER Experiment Name: At_Shoots__P Parameter: Age (day) Value: 7
  misc_feature: MA Experiment 20000184 PARAMETER Experiment Name: At_Shoots__P Parameter: Tissue Value: Shoots vs. Whole Plant
  misc_feature: MA Experiment ID: 20000438 Result: Down-regulated in Transcription
  misc_feature: MA Experiment 20000438 PARAMETER Experiment Name: At_Shoots__P Parameter: Age (day) Value: 14
  misc_feature: MA Experiment 20000438 PARAMETER Experiment Name: At_Shoots__P Parameter: Tissue Value: Shoots vs. Whole Plant
gcaggactaaaatcccaacacctccctcctgagttctttgattaaatccccaatttcaattttagggttttgattcccattgtttcttttgatttatcttcattccggaaattgctccggtgaaacagcagccaccgccacatctttctccttctccggcaagcaacttcattccggattttcgtctgagacttcattcttgtctccctcttcgaccaaactgacacttattccgacaaaaccctctgattagaccgtcggaatggaatcacgggttttgttctctagtcaattcaacttcccggtgaattcaccgtttaagacccgtgaaacctcgattgctccgctcacaccttcccggaatgttctctccttctctttccgtagtcccgcagagagatgtgcgatgaggattgtaccgcttgtaaaagctgcttcgtctactccacagatagtagcggaggtcgatggttcgtctcacgaaccaagaaggaagaagcttgctgtgtttgtgtcgggaggtggttcaaatttcaggaagattcatgagggatgcagtgatggttctgttaatggtgatgttgttttgttggtcactaacaaaaaagattgtggaggtgctgagtatgcaagaagtaatggaattcctgttttagtattcccaaaagcgaaacgagaaccatctgatggactctctccttcagaacttgtagatgtactaaggaaatatggtgtagactttgttcttttagctggatatttgaaacttataccggtcgagctggtccaagcttttcctaaacggattctaaatattcatcctgctcttcttccggctttcggaggcaaaggtctttatggtataaaagtgcataaagctgttctagaatcgggagctagatattcgggtccgacaattcacttcgtcaatgaggagtacgatacaggtcggatacttgctcaaagtgcagtccgtgtgattgctaatgatacaccagaagaattggccaaaagggttcttcatgaggaacacaaactgtatgtcgaggtggtgggtgcgatttgcgaagagcggattaaatggagagaagacggtgtccctctcattcaaaacaaacaaaaccctgacgagtactattagattctcaacaaatgaagttattcattggatgttagattagtcacattttcaaaacaaagtgtttcaacataggttatgtagaagaagtttttttgcccgaagtatagattgagacatgtttctgatactaaattttgtttcggttgggtcagaatcatatggaaggagatgaaattcgagtcaggagacagcattttaatgcttgtgttgtataataccaacagtctttattcaattttttcctagaatgttttattaccttg

SEQ ID NO: 101089 - protein, 292 aa, Arabidopsis thaliana
  peptide (1)..(292): Ceres Seq. ID no. 13606890
  misc_feature (78)..(264): Pfam Name: Formyl transferase Pfam Description: Formyl transferase
  misc_feature (1)..(292): Homolog of NCBI NO: 15221650 NR Description: phosphoribosylglycinamide formyltransferase thaliana] >gi|14917033|sp|P52422|PUR3_ARATH
  misc_feature (76)..(270): Homolog of NCBI NO: 480622 NR Description: phosphoribosylglycinamide formyltransferase (EC
  misc_feature (56)..(291): Homolog of NCBI NO: 12644307 NR Description: Phosphoribosylglycinamide formyltransferase,
  misc_feature (56)..(290): Homolog of NCBI NO: 7433568 NR Description: phosphoribosylglycinamide formyltransferase (EC
  misc_feature (8)..(291): Homolog of NCBI NO: 37992753 NR Description: glycinamide ribonucleotide transformylase
MESRVLFSSQFNFPVNSPFKTRETSIAPLTPSRNVLSFSFRSPAERCAMRIVPLVKAASSTPQIVAEVDGSSHEPRRKKLAVFVSGGGSNFRKIHEGCSDGSVNGDVVLLVTNKKDCGGAEYARSNGIPVLVFPKAKREPSDGLSPSELVDVLRKYGVDFVLLAGYLKLIPVELVQAFPKRILNIHPALLPAFGGKGLYGIKVHKAVLESGARYSGPTIHFVNEEYDTGRILAQSAVRVIANDTPEELAKRVLHEEHKLYVEVVGAICEERIKWREDGVPLIQNKQNPDEYY

SEQ ID NO: 101090 - protein, 244 aa, Arabidopsis thaliana
  peptide (1)..(244): Ceres Seq. ID no. 13606891
  misc_feature (30)..(216): Pfam Name: Formyl transferase Pfam Description: Formyl transferase
  misc_feature (1)..(244): Homolog of NCBI NO: 15221650 NR Description: phosphoribosylglycinamide formyltransferase thaliana] >gi|14917033|sp|P52422|PUR3_ARATH
  misc_feature (28)..(222): Homolog of NCBI NO: 480622 NR Description: phosphoribosylglycinamide formyltransferase (EC
  misc_feature (8)..(243): Homolog of NCBI NO: 12644307 NR Description: Phosphoribosylglycinamide formyltransferase,
  misc_feature (8)..(242): Homolog of NCBI NO: 7433568 NR Description: phosphoribosylglycinamide formyltransferase (EC
  misc_feature (1)..(243): Homolog of NCBI NO: 37992753 NR Description: glycinamide ribonucleotide transformylase
MRIVPLVKAASSTPQIVAEVDGSSHEPRRKKLAVFVSGGGSNFRKIHEGCSDGSVNGDVVLLVTNKKDCGGAEYARSNGIPVLVFPKAKREPSDGLSPSELVDVLRKYGVDFVLLAGYLKLIPVELVQAFPKRILNIHPALLPAFGGKGLYGIKVHKAVLESGARYSGPTIHFVNEEYDTGRILAQSAVRVIANDTPEELAKRVLHEEHKLYVEVVGAICEERIKWREDGVPLIQNKQNPDEYY

SEQ ID NO: 101091 - DNA, 1544 bp, Arabidopsis thaliana
  misc_feature (1)..(1544): Ceres Seq. ID no. 13606925
  misc_feature: MA Experiment ID: 20000180 Result: Down-regulated in Transcription
  misc_feature: MA Experiment 20000180 PARAMETER Experiment Name: At_Germinating_Seeds_P Parameter: Age (hr) Value: 24 vs. 0
  misc_feature: MA Experiment 20000180 PARAMETER Experiment Name: At_Germinating_Seeds_P Parameter: Tissue Value: Germinating Seeds
  misc_feature: MA Experiment ID: 20000438 Result: Down-regulated in Transcription
  misc_feature: MA Experiment 20000438 PARAMETER Experiment Name: At_Shoots__P Parameter: Age (day) Value: 14
  misc_feature: MA Experiment 20000438 PARAMETER Experiment Name: At_Shoots__P Parameter: Tissue Value: Shoots vs. Whole Plant
  misc_feature: MA Experiment ID: 20001247 Result: Down-regulated in Transcription
  misc_feature: MA Experiment 20001247 PARAMETER Experiment Name: At_Far-red-induction_P Parameter: Age (day) Value: 7
  misc_feature: MA Experiment 20001247 PARAMETER Experiment Name: At_Far-red-induction_P Parameter: Light Value: Far-red vs. White
  misc_feature: MA Experiment 20001247 PARAMETER Experiment Name: At_Far-red-induction_P Parameter: Organism Value: A. thaliana
  misc_feature: MA Experiment 20001247 PARAMETER Experiment Name: At_Far-red-induction_P Parameter: Plant Line Value: Columbia
  misc_feature: MA Experiment 20001247 PARAMETER Experiment Name: At_Far-red-induction_P Parameter: Timepoint (hr) Value: 1
  misc_feature: MA Experiment 20001247 PARAMETER Experiment Name: At_Far-red-induction_P Parameter: Tissue Value: Whole Plant
  misc_feature: MA Experiment ID: 20001556 Result: Up-regulated in Transcription
  misc_feature: MA Experiment 20001556 PARAMETER Experiment Name: At_Drought_Soil_Dry_P Parameter: Age (day) Value: 26
  misc_feature: MA Experiment 20001556 PARAMETER Experiment Name: At_Drought_Soil_Dry_P Parameter: Organism Value: A. thaliana
  misc_feature: MA Experiment 20001556 PARAMETER Experiment Name: At_Drought_Soil_Dry_P Parameter: Plant Line Value: WS
  misc_feature: MA Experiment 20001556 PARAMETER Experiment Name: At_Drought_Soil_Dry_P Parameter: Post Timepoint (hr) Value: None
  misc_feature: MA Experiment 20001556 PARAMETER Experiment Name: At_Drought_Soil_Dry_P Parameter: Post-Treatment Value: None
  misc_feature: MA Experiment 20001556 PARAMETER Experiment Name: At_Drought_Soil_Dry_P Parameter: Timepoint (day) Value: 12
  misc_feature: MA Experiment 20001556 PARAMETER Experiment Name: At_Drought_Soil_Dry_P Parameter: Treatment Value: Drought vs. No Drought
attcttcctctctctttttgggcgggaaactgtaccagaaaaaaacctcaagagtgagaactgagaagaagaacgatcgagagcgagagagagagtgatggcggcagaagagggtaaagatgaggcgggattggatcaggtggaagaagagttctctatttggaaaaggaacacaccttttctctacgatcttatgatctctcacccactagaatggccttctcttactctccactgggttccttcgacgccgattccgtactcgaaagatccttactttgccgtccataagcttatccttgggactcatacctccggtggtgcccaagattttctaatggtcgccgatgtcgttattccgacacccgacgctgaaccaggattaggtggaagagatcaggaacctatcgtccctaaggtggagattaagcagaagatacgtgttgatggagaagtgaacagagcgaggtgtatgccacaaaagccaactcttgtgggtgctaaaacaagtggctctgaggtgtttctgtttgattacgccagactctctggaaagccccaaacaagtgagtgtgatcctgatctgaggctaatgggacatgaacaagaaggttatggattggcttggagttcctttaaggagggttatcttttgagtggctcacaagatcagagaatctgcctttgggatgtctcagcgactgccactgataaagttttgaacccaatgcatgtgtatgagggacatcaaagtatcatcgaagatgtagcatggcacatgaagaatgaaaacatattcgggtctgcgggtgatgattgtcaattggtgatatgggacttacggactaaccaaatgcaacaccaagtcaaagttcacgagagagagataaactatctttctttcaatcccttcaatgaatgggtactagccacagcttcctcagactcaactgtcgccttgtttgaccttcgtaagctgactgcgccattacatgtcctgagcaaacacgagggagaagttttccaagtggagtgggatcccaaccatgaaacagtgcttgcatcttctggcgaggacagaagactcatggtctgggatatcaacagggttggggatgagcagcttgaaatagagttggatgcagaagatggtccacctgagctgctcttctctcatggaggccacaaggccaagatatcagactttgcctggaacaaggacgagccttgggtcatctcaagtgtagctgaagacaacagtcttcaagtctggcaaatggcggaaagcatctaccgcgaagatgacgaggatgaggatgatgatgatgaaggcaaccaaaatgcacaacattccaatgaaaaccagaaatgattcaagtctttggcggatgatgatgacttacaattgttgttgttaacgtgtttgagccaatatataataaacaagtttggtgtatgtgctaccctaagtatgaaacgctcgtttattccaggacgtctgttatgattcttgagtttaataatagttcagtaaaccctattgc

SEQ ID NO: 101092 - protein, 424 aa, Arabidopsis thaliana
  peptide (1)..(424): Ceres Seq. ID no. 13606926
  misc_feature (1)..(424): Homolog of NCBI NO: 15236251 NR Description: WD-40 repeat protein (MSI3) [Arabidopsis thaliana]
  misc_feature (1)..(424): Homolog of NCBI NO: 2394233 NR Description: WD-40 repeat protein [Arabidopsis thaliana]
  misc_feature (1)..(424): Homolog of NCBI NO: 27754479 NR Description: putative WD-40 repeat protein (MSI3) [Arabidopsis
  misc_feature (3)..(416): Homolog of NCBI NO: 21593624 NR Description: putative WD-40 repeat protein, MSI2 [Arabidopsis
  misc_feature (3)..(416): Homolog of NCBI NO: 15227294 NR Description: WD-40 repeat protein (MSI2) [Arabidopsis thaliana]
  misc_feature (1)..(409): Homolog of NCBI NO: 3122386 NR Description: WD-40 repeat protein MSI1 >gi|7444288|pir||T04324
  misc_feature (4)..(404): Homolog of NCBI NO: 15237140 NR Description: WD-40 repeat protein (MSI1) [Arabidopsis thaliana]
  misc_feature (1)..(405): Homolog of NCBI NO: 31207939 NR Description: ENSANGP00000014714 [Anopheles gambiae]
  misc_feature (1)..(412): Homolog of NCBI NO: 5032027 NR Description: retinoblastoma binding protein 4;
  misc_feature (1)..(412): Homolog of NCBI NO: 34871596 NR Description: similar to retinoblastoma-binding protein mRbAp48
MAAEEGKDEAGLDQVEEEFSIWKRNTPFLYDLMISHPLEWPSLTLHWVPSTPIPYSKDPYFAVHKLILGTHTSGGAQDFLMVADVVIPTPDAEPGLGGRDQEPIVPKVEIKQKIRVDGEVNRARCMPQKPTLVGAKTSGSEVFLFDYARLSGKPQTSECDPDLRLMGHEQEGYGLAWSSFKEGYLLSGSQDQRICLWDVSATATDKVLNPMHVYEGHQSIIEDVAWHMKNENIFGSAGDDCQLVIWDLRTNQMQHQVKVHEREINYLSFNPFNEWVLATASSDSTVALFDLRKLTAPLHVLSKHEGEVFQVEWDPNHETVLASSGEDRRLMVWDINRVGDEQLEIELDAEDGPPELLFSHGGHKAKISDFAWNKDEPWVISSVAEDNSLQVWQMAESIYREDDEDEDDDDEGNQNAQHSNENQK

SEQ ID NO: 101093 - protein, 392 aa, Arabidopsis thaliana
  peptide (1)..(392): Ceres Seq. ID no. 13606927
  misc_feature (1)..(392): Homolog of NCBI NO: 15236251 NR Description: WD-40 repeat protein (MSI3) [Arabidopsis thaliana]
  misc_feature (1)..(392): Homolog of NCBI NO: 2394233 NR Description: WD-40 repeat protein [Arabidopsis thaliana]
  misc_feature (1)..(392): Homolog of NCBI NO: 27754479 NR Description: putative WD-40 repeat protein (MSI3) [Arabidopsis
  misc_feature (1)..(384): Homolog of NCBI NO: 21593624 NR Description: putative WD-40 repeat protein, MSI2 [Arabidopsis
  misc_feature (1)..(384): Homolog of NCBI NO: 15227294 NR Description: WD-40 repeat protein (MSI2) [Arabidopsis thaliana]
  misc_feature (1)..(377): Homolog of NCBI NO: 3122386 NR Description: WD-40 repeat protein MSI1 >gi|7444288|pir||T04324
  misc_feature (1)..(372): Homolog of NCBI NO: 15237140 NR Description: WD-40 repeat protein (MSI1) [Arabidopsis thaliana]
  misc_feature (1)..(373): Homolog of NCBI NO: 31207939 NR Description: ENSANGP00000014714 [Anopheles gambiae]
  misc_feature (1)..(380): Homolog of NCBI NO: 5032027 NR Description: retinoblastoma binding protein 4;
  misc_feature (1)..(380): Homolog of NCBI NO: 34871596 NR Description: similar to retinoblastoma-binding protein mRbAp48
MISHPLEWPSLTLHWVPSTPIPYSKDPYFAVHKLILGTHTSGGAQDFLMVADVVIPTPDAEPGLGGRDQEPIVPKVEIKQKIRVDGEVNRARCMPQKPTLVGAKTSGSEVFLFDYARLSGKPQTSECDPDLRLMGHEQEGYGLAWSSFKEGYLLSGSQDQRICLWDVSATATDKVLNPMHVYEGHQSIIEDVAWHMKNENIFGSAGDDCQLVIWDLRTNQMQHQVKVHEREINYLSFNPFNEWVLATASSDSTVALFDLRKLTAPLHVLSKHEGEVFQVEWDPNHETVLASSGEDRRLMVWDINRVGDEQLEIELDAEDGPPELLFSHGGHKAKISDFAWNKDEPWVISSVAEDNSLQVWQMAESIYREDDEDEDDDDEGNQNAQHSNENQK

SEQ ID NO: 101094 - protein, 344 aa, Arabidopsis thaliana
  peptide (1)..(344): Ceres Seq. ID no. 13606928
  misc_feature (1)..(344): Homolog of NCBI NO: 15236251 NR Description: WD-40 repeat protein (MSI3) [Arabidopsis thaliana]
  misc_feature (1)..(344): Homolog of NCBI NO: 2394233 NR Description: WD-40 repeat protein [Arabidopsis thaliana]
  misc_feature (1)..(344): Homolog of NCBI NO: 27754479 NR Description: putative WD-40 repeat protein (MSI3) [Arabidopsis
  misc_feature (1)..(336): Homolog of NCBI NO: 21593624 NR Description: putative WD-40 repeat protein, MSI2 [Arabidopsis
  misc_feature (1)..(336): Homolog of NCBI NO: 15227294 NR Description: WD-40 repeat protein (MSI2) [Arabidopsis thaliana]
  misc_feature (1)..(329): Homolog of NCBI NO: 3122386 NR Description: WD-40 repeat protein MSI1 >gi|7444288|pir||T04324
  misc_feature (1)..(324): Homolog of NCBI NO: 15237140 NR Description: WD-40 repeat protein (MSI1) [Arabidopsis thaliana]
  misc_feature (1)..(325): Homolog of NCBI NO: 31207939 NR Description: ENSANGP00000014714 [Anopheles gambiae]
  misc_feature (1)..(332): Homolog of NCBI NO: 5032027 NR Description: retinoblastoma binding protein 4;
  misc_feature (1)..(332): Homolog of NCBI NO: 34871596 NR Description: similar to retinoblastoma-binding protein mRbAp48
MVADVVIPTPDAEPGLGGRDQEPIVPKVEIKQKIRVDGEVNRARCMPQKPTLVGAKTSGSEVFLFDYARLSGKPQTSECDPDLRLMGHEQEGYGLAWSSFKEGYLLSGSQDQRICLWDVSATATDKVLNPMHVYEGHQSIIEDVAWHMKNENIFGSAGDDCQLVIWDLRTNQMQHQVKVHEREINYLSFNPFNEWVLATASSDSTVALFDLRKLTAPLHVLSKHEGEVFQVEWDPNHETVLASSGEDRRLMVWDINRVGDEQLEIELDAEDGPPELLFSHGGHKAKISDFAWNKDEPWVISSVAEDNSLQVWQMAESIYREDDEDEDDDDEGNQNAQHSNENQK

SEQ ID NO: 101095 - DNA, 1948 bp, Arabidopsis thaliana
  misc_feature (1)..(1948): Ceres Seq. ID no. 13606944
  misc_feature: MA Experiment ID: 20000307 Result: Down-regulated in Transcription
  misc_feature: MA Experiment 20000307 PARAMETER Experiment Name: At_Germinating_Seeds_Sub_P Parameter: Age (hr) Value: 24 vs. 0
  misc_feature: MA Experiment 20000307 PARAMETER Experiment Name: At_Germinating_Seeds_Sub_P Parameter: Organism Value: A. thaliana
  misc_feature: MA Experiment 20000307 PARAMETER Experiment Name: At_Germinating_Seeds_Sub_P Parameter: Plant Line Value: WS
  misc_feature: MA Experiment 20000307 PARAMETER Experiment Name: At_Germinating_Seeds_Sub_P Parameter: Tissue Value: Germinating Seeds
  misc_feature: MA Experiment ID: 20000314 Result: Down-regulated in Transcription
  misc_feature: MA Experiment 20000314 PARAMETER Experiment Name: At_14day_Shoots-Roots_Sub_P Parameter: Age (day) Value: 14
  misc_feature: MA Experiment 20000314 PARAMETER Experiment Name: At_14day_Shoots-Roots_Sub_P Parameter: Organism Value: A. thaliana
  misc_feature: MA Experiment 20000314 PARAMETER Experiment Name: At_14day_Shoots-Roots_Sub_P Parameter: Plant Line Value: WS
  misc_feature: MA Experiment 20000314 PARAMETER Experiment Name: At_14day_Shoots-Roots_Sub_P Parameter: Tissue Value: Roots vs. Whole Plant
  misc_feature: MA Experiment ID: 20001807 Result: Down-regulated in Transcription
  misc_feature: MA Experiment 20001807 PARAMETER Experiment Name: At_50mM_NH4NO3_L-to-H_Sub_P Parameter: Timepoint (hr) Value: 6
  misc_feature: MA Experiment 20001807 PARAMETER Experiment Name: At_50mM_NH4NO3_L-to-H_Sub_P Parameter: Tissue Value: Leaf
  misc_feature: MA Experiment 20001807 PARAMETER Experiment Name: At_50mM_NH4NO3_L-to-H_Sub_P Parameter: Treatment Value: 50mM NH4NO3 vs 100mM Mannitol
atggcagaggaatttggcaaagggcattggctaaaaataataagacactcgttagagtgctcgtccctcgtgcccttacctgcctaattccaactatctggcaaaatcatgactttgatccaagatgccgagttgaaaccaaggatgggttcttttaagaagaggagctcttctaagaatttgaggtattcaatgacaaagagaagaagaagtagcaaagtgatgtctgtggagatcatcgaagatgtgcatgacgcagaggagttgaaagccgttgatgcttttcgccaatcgcttattctcgatgagctactcccggagaaacacgatgactaccatatgatgcttagatttttgaaggctagaaaatttgatcttgagaaaaccaaacagatgtggactgaaatgcttagatggaggaaagaatttggtgctgatactgtcatggaggagtttgatttcaaggaaattgatgaagtgttgaaatactaccctcaaggacaccatggagttgacaaggaaggacgacctgtgtacattgagaggcttggtttagtagattctaccaagttgatgcaagtcacaaccatggataggtatgtcaactaccatgttatggagtttgagaggaccttcaatgttaagttcccagcgtgctctatcgccgcgaagaagcacattgatcagagcacaactattcttgatgtccaaggagtgggactgaaaaacttcaacaaggctgctagagacttgattactcgtcttcaaaaggtcgatggtgacaactatcctgagaccttgaacaggatgtttatcatcaatgctggctcaggattcagaatgttgtggaacacggttaagtccttccttgacccgaagactacagcaaaaatccatgttcttggcaacaagtaccaaagcaagttgcttgagataattgatgaaagtgaacttcctgagtttcttggaggttcatgtacttgtgctgacaatggtggctgcatgcgctctgacaaaggcccatggaaaaatccagagatcatgaagagagttcacaatggtgatcacaaatgctcaaaaggatcccaagctgaaaactctggagagaagaccatccctgaggaagatgactctacaacagagccggcttctgaagaggaaaaggcttcaaaagaggtcgaaattgtcccggccgctcacccagcttggaacatgccagaagctcacaaattttccctctcaaagaaagaagtttacgccattcaagaggcgtgcaacaacgctacaacagaaggagggaggtcacctattttcacaggggtcatggctcttgtgatgggtgttgtcactatgattaaagtgactaaaaacgtcccaaggaaactaaccgagtcaaccttgtactcgagccccgtgtactgcgatgatgcatcaatgaacaagagtgcgatgcagtcagagaaaatgactgtacctgcaatctcaggggaagatttcatggccattatgaaacgaatggctgagttggaacagaaagtgaccgtcttaagcgcgcagccaacagttatgcctccggataaggaagagatgcttaacgctgccattagccggtccaatgtattggagcaagagcttgctgccaccaagaaggctttggatgattctcttggtcgtcaggaggagcttgtggcgtacatcgagaaaaagaagaagaagaagaagctgttcaactactggtgagagaagaaccatgaagcgaaggcttagtggtggctttatttgtttgattgtatccaaaatatctctgaccaaaatcatcaaagccaagcttattgtaaaaccaatttcttgtgtttcttattattaaagaatggtgaaaagaaagaaagttttgttctttctcttgtgtatattatcaaaataccatgtacatcaaattgcaattttc

SEQ ID NO: 101096 - protein, 543 aa, Arabidopsis thaliana
  peptide (1)..(543): Ceres Seq. ID no. 13606945
  misc_feature (129)..(315): Pfam Name: CRAL/TRIO domain Pfam Description: CRAL/TRIO domain
  misc_feature (1)..(543): Homolog of NCBI NO: 18419847 NR Description: hosphatidylinositol/phophatidylcholine transfer [Arabidopsis thaliana] >gi|15215780|gb|AAK91435.1| [Arabidopsis thaliana] >gi|23463079|gb|AAN33209.1|
  misc_feature (1)..(543): Homolog of NCBI NO: 25407729 NR Description: hypothetical protein AT4g36490 [imported] - thaliana >gi|4006913|emb|CAB16843.1| hypothetical protein thaliana] >gi|7270597|emb|CAB80315.1| hypothetical protein
  misc_feature (10)..(542): Homolog of NCBI NO: 15224125 NR Description: phosphatidylinositol/phophatidylcholine transfer - related [Arabidopsis thaliana] >gi|25411836|pir||C84561
  misc_feature (12)..(540): Homolog of NCBI NO: 14517816 NR Description: phosphatidylinositol transfer-like protein II
  misc_feature (8)..(542): Homolog of NCBI NO: 18399733 NR Description: phosphatidylinositol phophatidylcholine transfer - related [Arabidopsis thaliana] >gi|16209642|gb|AAL14382.1| [Arabidopsis thaliana] >gi|20197914|gb|AAM15309.1| putative
  misc_feature (12)..(539): Homolog of NCBI NO: 15236152 NR Description: hypothetical protein [Arabidopsis thaliana]
  misc_feature (8)..(351): Homolog of NCBI NO: 14486705 NR Description: phosphatidylinositol transfer-like protein III
  misc_feature (393)..(540): Homolog of NCBI NO: 14486705 NR Description: phosphatidylinositol transfer-like protein III
  misc_feature (5)..(514): Homolog of NCBI NO: 15234966 NR Description: SEC14 - like protein [Arabidopsis thaliana]
  misc_feature (5)..(540): Homolog of NCBI NO: 18398094 NR Description: phosphatidylinositol/phosphatidylcholine transfer - related [Arabidopsis thaliana] At2g16380/F16F14.12 [Arabidopsis thaliana]
MTLIQDAELKPRMGSFKKRSSSKNLRYSMTKRRRSSKVMSVEIIEDVHDAEELKAVDAFRQSLILDELLPEKHDDYHMMLRFLKARKFDLEKTKQMWTEMLRWRKEFGADTVMEEFDFKEIDEVLKYYPQGHHGVDKEGRPVYIERLGLVDSTKLMQVTTMDRYVNYHVMEFERTFNVKFPACSIAAKKHIDQSTTILDVQGVGLKNFNKAARDLITRLQKVDGDNYPETLNRMFIINAGSGFRMLWNTVKSFLDPKTTAKIHVLGNKYQSKLLEIIDESELPEFLGGSCTCADNGGCMRSDKGPWKNPEIMKRVHNGDHKCSKGSQAENSGEKTIPEEDDSTTEPASEEEKASKEVEIVPAAHPAWNMPEAHKFSLSKKEVYAIQEACNNATTEGGRSPIFTGVMALVMGVVTMIKVTKNVPRKLTESTLYSSPVYCDDASMNKSAMQSEKMTVPAISGEDFMAIMKRMAELEQKVTVLSAQPTVMPPDKEEMLNAAISRSNVLEQELAATKKALDDSLGRQEELVAYIEKKKKKKKLFNYW

SEQ ID NO: 101097 - protein, 531 aa, Arabidopsis thaliana
  peptide (1)..(531): Ceres Seq. ID no. 13606946
  misc_feature (117)..(303): Pfam Name: CRAL/TRIO domain Pfam Description: CRAL/TRIO domain
  misc_feature (1)..(531): Homolog of NCBI NO: 18419847 NR Description: hosphatidylinositol/phophatidylcholine transfer [Arabidopsis thaliana] >gi|15215780|gb|AAK91435.1| [Arabidopsis thaliana] >gi|23463079|gb|AAN33209.1|
  misc_feature (1)..(531): Homolog of NCBI NO: 25407729 NR Description: hypothetical protein AT4g36490 [imported] - thaliana >gi|4006913|emb|CAB16843.1| hypothetical protein thaliana] >gi|7270597|emb|CAB80315.1| hypothetical protein
  misc_feature (1)..(530): Homolog of NCBI NO: 15224125 NR Description: phosphatidylinositol/phophatidylcholine transfer - related [Arabidopsis thaliana] >gi|25411836|pir||C84561
  misc_feature (1)..(528): Homolog of NCBI NO: 14517816 NR Description: phosphatidylinositol transfer-like protein II
  misc_feature (1)..(530): Homolog of NCBI NO: 18399733 NR Description: phosphatidylinositol phophatidylcholine transfer - related [Arabidopsis thaliana] >gi|16209642|gb|AAL14382.1| [Arabidopsis thaliana] >gi|20197914|gb|AAM15309.1| putative
  misc_feature (1)..(527): Homolog of NCBI NO: 15236152 NR Description: hypothetical protein [Arabidopsis thaliana]
  misc_feature (1)..(339): Homolog of NCBI NO: 14486705 NR Description: phosphatidylinositol transfer-like protein III
  misc_feature (381)..(528): Homolog of NCBI NO: 14486705 NR Description: phosphatidylinositol transfer-like protein III
  misc_feature (1)..(502): Homolog of NCBI NO: 15234966 NR Description: SEC14 - like protein [Arabidopsis thaliana]
  misc_feature (1)..(528): Homolog of NCBI NO: 18398094 NR Description: phosphatidylinositol/phosphatidylcholine transfer - related [Arabidopsis thaliana] At2g16380/F16F14.12 [Arabidopsis thaliana]
MGSFKKRSSSKNLRYSMTKRRRSSKVMSVEIIEDVHDAEELKAVDAFRQSLILDELLPEKHDDYHMMLRFLKARKFDLEKTKQMWTEMLRWRKEFGADTVMEEFDFKEIDEVLKYYPQGHHGVDKEGRPVYIERLGLVDSTKLMQVTTMDRYVNYHVMEFERTFNVKFPACSIAAKKHIDQSTTILDVQGVGLKNFNKAARDLITRLQKVDGDNYPETLNRMFIINAGSGFRMLWNTVKSFLDPKTTAKIHVLGNKYQSKLLEIIDESELPEFLGGSCTCADNGGCMRSDKGPWKNPEIMKRVHNGDHKCSKGSQAENSGEKTIPEEDDSTTEPASEEEKASKEVEIVPAAHPAWNMPEAHKFSLSKKEVYAIQEACNNATTEGGRSPIFTGVMALVMGVVTMIKVTKNVPRKLTESTLYSSPVYCDDASMNKSAMQSEKMTVPAISGEDFMAIMKRMAELEQKVTVLSAQPTVMPPDKEEMLNAAISRSNVLEQELAATKKALDDSLGRQEELVAYIEKKKKKKKLFNYW

SEQ ID NO: 101098 - protein, 515 aa, Arabidopsis thaliana
  peptide (1)..(515): Ceres Seq. ID no. 13606947
  misc_feature (101)..(287): Pfam Name: CRAL/TRIO domain Pfam Description: CRAL/TRIO domain
  misc_feature (1)..(515): Homolog of NCBI NO: 18419847 NR Description: hosphatidylinositol/phophatidylcholine transfer [Arabidopsis thaliana] >gi|15215780|gb|AAK91435.1| [Arabidopsis thaliana] >gi|23463079|gb|AAN33209.1|
  misc_feature (1)..(515): Homolog of NCBI NO: 25407729 NR Description: hypothetical protein AT4g36490 [imported] - thaliana >gi|4006913|emb|CAB16843.1| hypothetical protein thaliana] >gi|7270597|emb|CAB80315.1| hypothetical protein
  misc_feature (1)..(514): Homolog of NCBI NO: 15224125 NR Description: phosphatidylinositol/phophatidylcholine transfer - related [Arabidopsis thaliana] >gi|25411836|pir||C84561
  misc_feature (1)..(512): Homolog of NCBI NO: 14517816 NR Description: phosphatidylinositol transfer-like protein II
  misc_feature (1)..(514): Homolog of NCBI NO: 18399733 NR Description: phosphatidylinositol phophatidylcholine transfer - related [Arabidopsis thaliana] >gi|16209642|gb|AAL14382.1| [Arabidopsis thaliana] >gi|20197914|gb|AAM15309.1| putative
  misc_feature (1)..(511): Homolog of NCBI NO: 15236152 NR Description: hypothetical protein [Arabidopsis thaliana]
  misc_feature (1)..(323): Homolog of NCBI NO: 14486705 NR Description: phosphatidylinositol transfer-like protein III
  misc_feature (365)..(512): Homolog of NCBI NO: 14486705 NR Description: phosphatidylinositol transfer-like protein III
  misc_feature (1)..(486): Homolog of NCBI NO: 15234966 NR Description: SEC14 - like protein [Arabidopsis thaliana]
  misc_feature (1)..(512): Homolog of NCBI NO: 18398094 NR Description: phosphatidylinositol/phosphatidylcholine transfer - related [Arabidopsis thaliana] At2g16380/F16F14.12 [Arabidopsis thaliana]
MTKRRRSSKVMSVEIIEDVHDAEELKAVDAFRQSLILDELLPEKHDDYHMMLRFLKARKFDLEKTKQMWTEMLRWRKEFGADTVMEEFDFKEIDEVLKYYPQGHHGVDKEGRPVYIERLGLVDSTKLMQVTTMDRYVNYHVMEFERTFNVKFPACSIAAKKHIDQSTTILDVQGVGLKNFNKAARDLITRLQKVDGDNYPETLNRMFIINAGSGFRMLWNTVKSFLDPKTTAKIHVLGNKYQSKLLEIIDESELPEFLGGSCTCADNGGCMRSDKGPWKNPEIMKRVHNGDHKCSKGSQAENSGEKTIPEEDDSTTEPASEEEKASKEVEIVPAAHPAWNMPEAHKFSLSKKEVYAIQEACNNATTEGGRSPIFTGVMALVMGVVTMIKVTKNVPRKLTESTLYSSPVYCDDASMNKSAMQSEKMTVPAISGEDFMAIMKRMAELEQKVTVLSAQPTVMPPDKEEMLNAAISRSNVLEQELAATKKALDDSLGRQEELVAYIEKKKKKKKLFNYW

SEQ ID NO: 101099 - DNA, 1612 bp, Arabidopsis thaliana
  misc_feature (1)..(1612): Ceres Seq. ID no. 13606952
  misc_feature: MA Experiment ID: 20000171 Result: Down-regulated in Transcription
  misc_feature: MA Experiment 20000171 PARAMETER Experiment Name: At_42deg_Heat_P Parameter: Age (day) Value: 14
  misc_feature: MA Experiment 20000171 PARAMETER Experiment Name: At_42deg_Heat_P Parameter: Organism Value: A. thaliana
  misc_feature: MA Experiment 20000171 PARAMETER Experiment Name: At_42deg_Heat_P Parameter: Plant Line Value: WS
  misc_feature: MA Experiment 20000171 PARAMETER Experiment Name: At_42deg_Heat_P Parameter: Temperature (deg C) Value: 42 vs. 22
  misc_feature: MA Experiment 20000171 PARAMETER Experiment Name: At_42deg_Heat_P Parameter: Timepoint (hr) Value: 1
  misc_feature: MA Experiment 20000171 PARAMETER Experiment Name: At_42deg_Heat_P Parameter: Tissue Value: Aerial
  misc_feature: MA Experiment ID: 20000173 Result: Down-regulated in Transcription
  misc_feature: MA Experiment 20000173 PARAMETER Experiment Name: At_42deg_Heat_P Parameter: Age (day) Value: 14
  misc_feature: MA Experiment 20000173 PARAMETER Experiment Name: At_42deg_Heat_P Parameter: Organism Value: A. thaliana
  misc_feature: MA Experiment 20000173 PARAMETER Experiment Name: At_42deg_Heat_P Parameter: Plant Line Value: WS
  misc_feature: MA Experiment 20000173 PARAMETER Experiment Name: At_42deg_Heat_P Parameter: Temperature (deg C) Value: 42 vs. 22
  misc_feature: MA Experiment 20000173 PARAMETER Experiment Name: At_42deg_Heat_P Parameter: Timepoint (hr) Value: 6
  misc_feature: MA Experiment 20000173 PARAMETER Experiment Name: At_42deg_Heat_P Parameter: Tissue Value: Aerial
  misc_feature: MA Experiment ID: 20000179 Result: Down-regulated in Transcription
  misc_feature: MA Experiment 20000179 PARAMETER Experiment Name: At_Germinating_Seeds_P Parameter: Age (hr) Value: 6 vs. 0
  misc_feature: MA Experiment 20000179 PARAMETER Experiment Name: At_Germinating_Seeds_P Parameter: Tissue Value: Germinating Seeds
  misc_feature: MA Experiment ID: 20000180 Result: Down-regulated in Transcription
  misc_feature: MA Experiment 20000180 PARAMETER Experiment Name: At_Germinating_Seeds_P Parameter: Age (hr) Value: 24 vs. 0
  misc_feature: MA Experiment 20000180 PARAMETER Experiment Name: At_Germinating_Seeds_P Parameter: Tissue Value: Germinating Seeds
  misc_feature: MA Experiment ID: 20000182 Result: Up-regulated in Transcription
  misc_feature: MA Experiment 20000182 PARAMETER Experiment Name: At_2mM_SA_P Parameter: Age (day) Value: 14
  misc_feature: MA Experiment 20000182 PARAMETER Experiment Name: At_2mM_SA_P Parameter: Organism Value: A. thaliana
  misc_feature: MA Experiment 20000182 PARAMETER Experiment Name: At_2mM_SA_P Parameter: Plant Line Value: WS
  misc_feature: MA Experiment 20000182 PARAMETER Experiment Name: At_2mM_SA_P Parameter: Timepoint (hr) Value: 6
  misc_feature: MA Experiment 20000182 PARAMETER Experiment Name: At_2mM_SA_P Parameter: Tissue Value: Aerial
  misc_feature: MA Experiment 20000182 PARAMETER Experiment Name: At_2mM_SA_P Parameter: Treatment Value: 2mM SA vs. No Treatment
  misc_feature: MA Experiment ID: 20000185 Result: Down-regulated in Transcription
  misc_feature: MA Experiment 20000185 PARAMETER Experiment Name: At_Roots__P Parameter: Age (day) Value: 7 vs. 21
  misc_feature: MA Experiment 20000185 PARAMETER Experiment Name: At_Roots__P Parameter: Organism Value: A. thaliana
  misc_feature: MA Experiment 20000185 PARAMETER Experiment Name: At_Roots__P Parameter: Tissue Value: Roots vs. Whole Plant
  misc_feature: MA Experiment ID: 20000227 Result: Down-regulated in Transcription
  misc_feature: MA Experiment 20000227 PARAMETER Experiment Name: At_Root-Tips-vs-Tops_P Parameter: Tissue Value: Root Tips vs. Root Tops
  misc_feature: MA Experiment ID: 20000234 Result: Down-regulated in Transcription
  misc_feature: MA Experiment 20000234 PARAMETER Experiment Name: At_Siliques_P Parameter: Age (day) Value: 21
  misc_feature: MA Experiment 20000234 PARAMETER Experiment Name: At_Siliques_P Parameter: Organism Value: A. thaliana
  misc_feature: MA Experiment 20000234 PARAMETER Experiment Name: At_Siliques_P Parameter: Plant Line Value: WS
  misc_feature: MA Experiment 20000234 PARAMETER Experiment Name: At_Siliques_P Parameter: Tissue Value: Less Than 5mm Siliques vs. Whole Plant
  misc_feature: MA Experiment ID: 20000235 Result: Down-regulated in Transcription
  misc_feature: MA Experiment 20000235 PARAMETER Experiment Name: At_Siliques_P Parameter: Age (day) Value: 21
  misc_feature: MA Experiment 20000235 PARAMETER Experiment Name: At_Siliques_P Parameter: Organism Value: A. thaliana
  misc_feature: MA Experiment 20000235 PARAMETER Experiment Name: At_Siliques_P Parameter: Plant Line Value: WS
  misc_feature: MA Experiment 20000235 PARAMETER Experiment Name: At_Siliques_P Parameter: Tissue Value: 5-10mm Siliques vs. Whole Plant
  misc_feature: MA Experiment ID: 20000264 Result: Down-regulated in Transcription
  misc_feature: MA Experiment 20000264 PARAMETER Experiment Name: At_Open_Flower_P Parameter: Age (day) Value: 21
  misc_feature: MA Experiment 20000264 PARAMETER Experiment Name: At_Open_Flower_P Parameter: Plant Line Value: WS
  misc_feature: MA Experiment 20000264 PARAMETER Experiment Name: At_Open_Flower_P Parameter: Tissue Value: Open Flower vs. Whole Plant
  misc_feature: MA Experiment ID: 20000267 Result: Down-regulated in Transcription
  misc_feature: MA Experiment 20000267 PARAMETER Experiment Name: At_Drought_P Parameter: Age (day) Value: 7
  misc_feature: MA Experiment 20000267 PARAMETER Experiment Name: At_Drought_P Parameter: Organism Value: A. thaliana
  misc_feature: MA Experiment 20000267 PARAMETER Experiment Name: At_Drought_P Parameter: Plant Line Value: WS
  misc_feature: MA Experiment 20000267 PARAMETER Experiment Name: At_Drought_P Parameter: Timepoint (hr) Value: 6
  misc_feature: MA Experiment 20000267 PARAMETER Experiment Name: At_Drought_P Parameter: Tissue Value: Whole Plant
  misc_feature: MA Experiment 20000267 PARAMETER Experiment Name: At_Drought_P Parameter: Treatment Value: Drought vs. No Drought
  misc_feature: MA Experiment ID: 20000268 Result: Down-regulated in Transcription
  misc_feature: MA Experiment 20000268 PARAMETER Experiment Name: At_100mM_NaCl__P Parameter: Age (day) Value: 14
  misc_feature: MA Experiment 20000268 PARAMETER Experiment Name: At_100mM_NaCl__P Parameter: Organism Value: A. thaliana
  misc_feature: MA Experiment 20000268 PARAMETER Experiment Name: At_100mM_NaCl__P Parameter: Plant Line Value: WS
  misc_feature: MA Experiment 20000268 PARAMETER Experiment Name: At_100mM_NaCl__P Parameter: Timepoint (hr) Value: 6
  misc_feature: MA Experiment 20000268 PARAMETER Experiment Name: At_100mM_NaCl__P Parameter: Tissue Value: Whole Plant
  misc_feature: MA Experiment 20000268 PARAMETER Experiment Name: At_100mM_NaCl__P Parameter: Treatment Value: 100mM NaCl vs. No Treatment
  misc_feature: MA Experiment ID: 20000286 Result: Down-regulated in Transcription
  misc_feature: MA Experiment 20000286 PARAMETER Experiment Name: At_Open_Flower_P Parameter: Age (day) Value: 21
  misc_feature: MA Experiment 20000286 PARAMETER Experiment Name: At_Open_Flower_P Parameter: Plant Line Value: WS
  misc_feature: MA Experiment 20000286 PARAMETER Experiment Name: At_Open_Flower_P Parameter: Tissue Value: Half Open vs. Whole Plant
  misc_feature: MA Experiment ID: 20000436 Result: Down-regulated in Transcription
  misc_feature: MA Experiment 20000436 PARAMETER Experiment Name: At_Drought_P Parameter: Age (day) Value: 7
  misc_feature: MA Experiment 20000436 PARAMETER Experiment Name: At_Drought_P Parameter: Organism Value: A. thaliana
  misc_feature: MA Experiment 20000436 PARAMETER Experiment Name: At_Drought_P Parameter: Plant Line Value: WS
  misc_feature: MA Experiment 20000436 PARAMETER Experiment Name: At_Drought_P Parameter: Timepoint (hr) Value: 12
  misc_feature: MA Experiment 20000436 PARAMETER Experiment Name: At_Drought_P Parameter: Tissue Value: Whole Plant
  misc_feature: MA Experiment 20000436 PARAMETER Experiment Name: At_Drought_P Parameter: Treatment Value: Drought vs. No Drought
  misc_feature: MA Experiment ID: 20000437 Result: Down-regulated in Transcription
  misc_feature: MA Experiment 20000437 PARAMETER Experiment Name: At_Drought_P Parameter: Age (day) Value: 8
  misc_feature: MA Experiment 20000437 PARAMETER Experiment Name: At_Drought_P Parameter: Organism Value: A. thaliana
  misc_feature: MA Experiment 20000437 PARAMETER Experiment Name: At_Drought_P Parameter: Plant Line Value: WS
  misc_feature: MA Experiment 20000437 PARAMETER Experiment Name: At_Drought_P Parameter: Timepoint (hr) Value: 24
  misc_feature: MA Experiment 20000437 PARAMETER Experiment Name: At_Drought_P Parameter: Tissue Value: Whole Plant
  misc_feature: MA Experiment 20000437 PARAMETER Experiment Name: At_Drought_P Parameter: Treatment Value: Drought vs. No Drought
  misc_feature: MA Experiment ID: 20000438 Result: Down-regulated in Transcription
  misc_feature: MA Experiment 20000438 PARAMETER Experiment Name: At_Shoots__P Parameter: Age (day) Value: 14
  misc_feature: MA Experiment 20000438 PARAMETER Experiment Name: At_Shoots__P Parameter: Tissue Value: Shoots vs. Whole Plant
  misc_feature: MA Experiment ID: 20000439 Result: Down-regulated in Transcription
  misc_feature: MA Experiment 20000439 PARAMETER Experiment Name: At_Roots__P Parameter: Age (day) Value: 14 vs. 21
  misc_feature: MA Experiment 20000439 PARAMETER Experiment Name: At_Roots__P Parameter: Organism Value: A. thaliana
  misc_feature: MA Experiment 20000439 PARAMETER Experiment Name: At_Roots__P Parameter: Tissue Value: Roots vs. Whole Plant
  misc_feature: MA Experiment ID: 20000441 Result: Up-regulated in Transcription
  misc_feature: MA Experiment 20000441 PARAMETER Experiment Name: At_1uM_BR-BRZ__P Parameter: Tissue Value: Shoot Apices
  misc_feature: MA Experiment 20000441 PARAMETER Experiment Name: At_1uM_BR-BRZ__P Parameter: Treatment Value: 1uM BR vs. No Treatment
  misc_feature: MA Experiment ID: 20000496 Result: Up-regulated in Transcription
  misc_feature: MA Experiment 20000496 PARAMETER Experiment Name: At_Guard_Cells_P Parameter: Harvest Date Value: 7/19/2002
  misc_feature: MA Experiment 20000496 PARAMETER Experiment Name: At_Guard_Cells_P Parameter: Organism Value: Canola
  misc_feature: MA Experiment 20000496 PARAMETER Experiment Name: At_Guard_Cells_P Parameter: Tissue Value: Guard Cells vs. Leaves
  misc_feature: MA Experiment ID: 20000794 Result: Down-regulated in Transcription
  misc_feature: MA Experiment 20000794 PARAMETER Experiment Name: At_Petals_P Parameter: Age (day) Value: 23-25 days
  misc_feature: MA Experiment 20000794 PARAMETER Experiment Name: At_Petals_P Parameter: Plant Line Value: WS
  misc_feature: MA Experiment 20000794 PARAMETER Experiment Name: At_Petals_P Parameter: Tissue Value: Petals vs. Whole plant
  misc_feature: MA Experiment ID: 20001247 Result: Up-regulated in Transcription
  misc_feature: MA Experiment 20001247 PARAMETER Experiment Name: At_Far-red-induction_P Parameter: Age (day) Value: 7
  misc_feature: MA Experiment 20001247 PARAMETER Experiment Name: At_Far-red-induction_P Parameter: Light Value: Far-red vs. White
  misc_feature: MA Experiment 20001247 PARAMETER Experiment Name: At_Far-red-induction_P Parameter: Organism Value: A. thaliana
  misc_feature: MA Experiment 20001247 PARAMETER Experiment Name: At_Far-red-induction_P Parameter: Plant Line Value: Columbia
  misc_feature: MA Experiment 20001247 PARAMETER Experiment Name: At_Far-red-induction_P Parameter: Timepoint (hr) Value: 1
  misc_feature: MA Experiment 20001247 PARAMETER Experiment Name: At_Far-red-induction_P Parameter: Tissue Value: Whole Plant
  misc_feature: MA Experiment ID: 20001248 Result: Up-regulated in Transcription
  misc_feature: MA Experiment 20001248 PARAMETER Experiment Name: At_Far-red-induction_P Parameter: Age (day) Value: 7
  misc_feature: MA Experiment 20001248 PARAMETER Experiment Name: At_Far-red-induction_P Parameter: Light Value: Far-red vs. White
  misc_feature: MA Experiment 20001248 PARAMETER Experiment Name: At_Far-red-induction_P Parameter: Organism Value: A. thaliana
  misc_feature: MA Experiment 20001248 PARAMETER Experiment Name: At_Far-red-induction_P Parameter: Plant Line Value: Columbia
  misc_feature: MA Experiment 20001248 PARAMETER Experiment Name: At_Far-red-induction_P Parameter: Timepoint (hr) Value: 4
  misc_feature: MA Experiment 20001248 PARAMETER Experiment Name: At_Far-red-induction_P Parameter: Tissue Value: Whole Plant
  misc_feature: MA Experiment ID: 20001450 Result: Up-regulated in Transcription
  misc_feature: MA Experiment 20001450 PARAMETER Experiment Name: At_Far-red-induction_P Parameter: Age (day) Value: 7
  misc_feature: MA Experiment 20001450 PARAMETER Experiment Name: At_Far-red-induction_P Parameter: Light Value: Far-red vs. White
  misc_feature: MA Experiment 20001450 PARAMETER Experiment Name: At_Far-red-induction_P Parameter: Organism Value: A. thaliana
  misc_feature: MA Experiment 20001450 PARAMETER Experiment Name: At_Far-red-induction_P Parameter: Plant Line Value: Columbia
  misc_feature: MA Experiment 20001450 PARAMETER Experiment Name: At_Far-red-induction_P Parameter: Timepoint (hr) Value: 8
  misc_feature: MA Experiment 20001450 PARAMETER Experiment Name: At_Far-red-induction_P Parameter: Tissue Value: Whole Plant
  misc_feature: MA Experiment ID: 20001451 Result: Up-regulated in Transcription
  misc_feature: MA Experiment 20001451 PARAMETER Experiment Name: At_Far-red-induction_P Parameter: Age (day) Value: 7
  misc_feature: MA Experiment 20001451 PARAMETER Experiment Name: At_Far-red-induction_P Parameter: Light Value: Far-red vs. White
  misc_feature: MA Experiment 20001451 PARAMETER Experiment Name: At_Far-red-induction_P Parameter: Organism Value: A. thaliana
  misc_feature: MA Experiment 20001451 PARAMETER Experiment Name: At_Far-red-induction_P Parameter: Plant Line Value: Columbia
  misc_feature: MA Experiment 20001451 PARAMETER Experiment Name: At_Far-red-induction_P Parameter: Timepoint (hr) Value: 24
  misc_feature: MA Experiment 20001451 PARAMETER Experiment Name: At_Far-red-induction_P Parameter: Tissue Value: Whole Plant
  misc_feature: MA Experiment ID: 20001554 Result: Down-regulated in Transcription
  misc_feature: MA Experiment 20001554 PARAMETER Experiment Name: At_Drought_Soil_Dry_P Parameter: Age (day) Value: 21
  misc_feature: MA Experiment 20001554 PARAMETER Experiment Name: At_Drought_Soil_Dry_P Parameter: Organism Value: A. thaliana
  misc_feature: MA Experiment 20001554 PARAMETER Experiment Name: At_Drought_Soil_Dry_P Parameter: Plant Line Value: WS
  misc_feature: MA Experiment 20001554 PARAMETER Experiment Name: At_Drought_Soil_Dry_P Parameter: Post Timepoint (hr) Value: None
  misc_feature: MA Experiment 20001554 PARAMETER Experiment Name: At_Drought_Soil_Dry_P Parameter: Post-Treatment Value: None
  misc_feature: MA Experiment 20001554 PARAMETER Experiment Name: At_Drought_Soil_Dry_P Parameter: Timepoint (day) Value: 7
  misc_feature: MA Experiment 20001554 PARAMETER Experiment Name: At_Drought_Soil_Dry_P Parameter: Treatment Value: Drought vs. No Drought
  misc_feature: MA Experiment ID: 20001555 Result: Down-regulated in Transcription
  misc_feature: MA Experiment 20001555 PARAMETER Experiment Name: At_Drought_Soil_Dry_P Parameter: Age (day) Value: 24
  misc_feature: MA Experiment 20001555 PARAMETER Experiment Name: At_Drought_Soil_Dry_P Parameter: Organism Value: A. thaliana
  misc_feature: MA Experiment 20001555 PARAMETER Experiment Name: At_Drought_Soil_Dry_P Parameter: Plant Line Value: WS
  misc_feature: MA Experiment 20001555 PARAMETER Experiment Name: At_Drought_Soil_Dry_P Parameter: Post Timepoint (hr) Value: None
  misc_feature: MA Experiment 20001555 PARAMETER Experiment Name: At_Drought_Soil_Dry_P Parameter: Post-Treatment Value: None
  misc_feature: MA Experiment 20001555 PARAMETER Experiment Name: At_Drought_Soil_Dry_P Parameter: Timepoint (day) Value: 10
  misc_feature: MA Experiment 20001555 PARAMETER Experiment Name: At_Drought_Soil_Dry_P Parameter: Treatment Value: Drought vs. No Drought
  misc_feature: MA Experiment ID: 20001556 Result: Down-regulated in Transcription
  misc_feature: MA Experiment 20001556 PARAMETER Experiment Name: At_Drought_Soil_Dry_P Parameter: Age (day) Value: 26
  misc_feature: MA Experiment 20001556 PARAMETER Experiment Name: At_Drought_Soil_Dry_P Parameter: Organism Value: A. thaliana
  misc_feature: MA Experiment 20001556 PARAMETER Experiment Name: At_Drought_Soil_Dry_P Parameter: Plant Line Value: WS
  misc_feature: MA Experiment 20001556 PARAMETER Experiment Name: At_Drought_Soil_Dry_P Parameter: Post Timepoint (hr) Value: None
  misc_feature: MA Experiment 20001556 PARAMETER Experiment Name: At_Drought_Soil_Dry_P Parameter: Post-Treatment Value: None
  misc_feature: MA Experiment 20001556 PARAMETER Experiment Name: At_Drought_Soil_Dry_P Parameter: Timepoint (day) Value: 12
  misc_feature: MA Experiment 20001556 PARAMETER Experiment Name: At_Drought_Soil_Dry_P Parameter: Treatment Value: Drought vs. No Drought
  misc_feature: MA Experiment ID: 20001558 Result: Down-regulated in Transcription
  misc_feature: MA Experiment 20001558 PARAMETER Experiment Name: At_Drought_Soil_Dry_P Parameter: Age (day) Value: 27
  misc_feature: MA Experiment 20001558 PARAMETER Experiment Name: At_Drought_Soil_Dry_P Parameter: Organism Value: A. thaliana
  misc_feature: MA Experiment 20001558 PARAMETER Experiment Name: At_Drought_Soil_Dry_P Parameter: Plant Line Value: WS
  misc_feature: MA Experiment 20001558 PARAMETER Experiment Name: At_Drought_Soil_Dry_P Parameter: Post Timepoint (hr) Value: 6
  misc_feature: MA Experiment 20001558 PARAMETER Experiment Name: At_Drought_Soil_Dry_P Parameter: Post-Treatment Value: Re-Water vs. No Drought
  misc_feature: MA Experiment 20001558 PARAMETER Experiment Name: At_Drought_Soil_Dry_P Parameter: Timepoint (day) Value: 13
  misc_feature: MA Experiment 20001558 PARAMETER Experiment Name: At_Drought_Soil_Dry_P Parameter: Treatment Value: Drought vs. No Drought
  misc_feature: MA Experiment ID: 20001560 Result: Down-regulated in Transcription
  misc_feature: MA Experiment 20001560 PARAMETER Experiment Name: At_Drought_Soil_Dry_P Parameter: Age (day) Value: 28
  misc_feature: MA Experiment 20001560 PARAMETER Experiment Name: At_Drought_Soil_Dry_P Parameter: Organism Value: A. thaliana
  misc_feature: MA Experiment 20001560 PARAMETER Experiment Name: At_Drought_Soil_Dry_P Parameter: Plant Line Value: WS
  misc_feature: MA Experiment 20001560 PARAMETER Experiment Name: At_Drought_Soil_Dry_P Parameter: Post Timepoint (hr) Value: None
  misc_feature: MA Experiment 20001560 PARAMETER Experiment Name: At_Drought_Soil_Dry_P Parameter: Post-Treatment Value: None
  misc_feature: MA Experiment 20001560 PARAMETER Experiment Name: At_Drought_Soil_Dry_P Parameter: Timepoint (day) Value: 14
  misc_feature: MA Experiment 20001560 PARAMETER Experiment Name: At_Drought_Soil_Dry_P Parameter: Treatment Value: Drought vs. No Drought
  misc_feature: MA Experiment ID: 20001756 Result: Up-regulated in Transcription
  misc_feature: MA Experiment 20001756 PARAMETER Experiment Name: At_50mM_NH4NO3_L-to-H_P Parameter: Timepoint (hr) Value: 4
  misc_feature: MA Experiment 20001756 PARAMETER Experiment Name: At_50mM_NH4NO3_L-to-H_P Parameter: Tissue Value: Leaf
  misc_feature: MA Experiment 20001756 PARAMETER Experiment Name: At_50mM_NH4NO3_L-to-H_P Parameter: Treatment Value: 50mM NH4NO3 vs 100mM Mannitol
  misc_feature: MA Experiment ID: 20001757 Result: Up-regulated in Transcription
  misc_feature: MA Experiment 20001757 PARAMETER Experiment Name: At_50mM_NH4NO3_L-to-H_P Parameter: Timepoint (hr) Value: 6
  misc_feature: MA Experiment 20001757 PARAMETER Experiment Name: At_50mM_NH4NO3_L-to-H_P Parameter: Tissue Value: Leaf
  misc_feature: MA Experiment 20001757 PARAMETER Experiment Name: At_50mM_NH4NO3_L-to-H_P Parameter: Treatment Value: 50mM NH4NO3 vs 100mM Mannitol
  misc_feature: MA Experiment ID: 20001904 Result: Down-regulated in Transcription
  misc_feature: MA Experiment 20001904 PARAMETER Experiment Name: At_Drought_Reproduction_P Parameter: Age (day) Value: 37
  misc_feature: MA Experiment 20001904 PARAMETER Experiment Name: At_Drought_Reproduction_P Parameter: Organism Value: A. thaliana
  misc_feature: MA Experiment 20001904 PARAMETER Experiment Name: At_Drought_Reproduction_P Parameter: Plant Line Value: WS
  misc_feature: MA Experiment 20001904 PARAMETER Experiment Name: At_Drought_Reproduction_P Parameter: Timepoint (day) Value: 7
  misc_feature: MA Experiment 20001904 PARAMETER Experiment Name: At_Drought_Reproduction_P Parameter: Tissue Value: Rosettes
  misc_feature: MA Experiment 20001904 PARAMETER Experiment Name: At_Drought_Reproduction_P Parameter: Treatment Value: Drought vs. No Drought
atggccgatcaaatctccggcgagaagccggccggagttaatagattcgctcttcaatgtgctatcgtcgcctccatcgtctccatcatctttggttacgatactggtgttatgagtggagcgatggtgtttatagaagaagatttgaagacaaacgacgttcaaatagaagttctcactggaattctcaacctttgtgcccttgtcggatcattgctcgccggaagaacgtcggacataatcggacggcgttacacaatcgtcttggcctcaatactattcatgttaggctcaatattgatgggttggggtccgaattatccggttctcctatccggtagatgcaccgctggactcggagtcggttttgctctgatggttgctccggtttactctgccgagatcgcaactgcttcacatagaggactcttagcttctcttcctcacctttgtatcagtatagggattttactaggttatatcgtgaattacttcttctccaagttacctatgcatatcggttggagactcatgctcggtatagccgcggttccgtccctagtgctagcgttcgggatcttgaaaatgccggaatctccacggtggttgattatgcaaggccgtcttaaggaaggcaaggagatattggaattggtatctaattcccctgaagaagcagaactccgctttcaagacatcaaagctgctgcgggaatcgacccgaaatgcgtagacgatgttgtgaaaatggagggtaagaagactcatggtgaaggagtgtggaaagagctcattctaagaccaactcctgcagtgagacgtgttcttttaactgctcttgggattcatttcttccaacacgcctccggaatcgaagcagtgcttttatacggtccgaggatctttaagaaagcaggaatcacgactaaagacaagcttttcttggttactatcggtgtcggaatcatgaaaacgacgtttattttcactgcgactttattgttagacaaggtaggtcgaaggaagcttttgttgaccagcgttggaggaatggtcattgcgttgacaatgttgggatttgggcttacaatggcccaaaatgctggcgggaaattagcgtgggctttagtactgagcatagttgcggcttatagtttcgtggcgtttttctctattgggctcggcccaataacttgggtctacagttctgaggttttcccgttgaagcttagggcacaaggagcgagtctcggcgttgcggtgaacagagtaatgaacgccaccgtgtcgatgtcgtttttgtcgttgactagtgcgataaccaccggtggagctttctttatgttcgccggagttgcggcagtggcgtggaatttcttcttcttcctcttgccggagacgaaaggaaaatcacttgaagaaatcgaagcgctttttcaaagagacggtgataaagtacgcggcgaaaacggtgcagcttagcatgatgaatataatgttatcattaaatgaaacgacagcgtttggggtttctcactcattacacgacgtcgtttagttgtacttttgtgtggcttttatcaaattataaatcaacggtcaagattgacgc

SEQ ID NO: 101100 - protein, 493 aa, Arabidopsis thaliana
  peptide (1)..(493): Ceres Seq. ID no. 13606953
  misc_feature (20)..(479): Pfam Name: Sugar (and other) transporter Pfam Description: Sugar (and other) transporter
  misc_feature (1)..(493): Homolog of NCBI NO: 15234491 NR Description: mannitol transporter, putative [Arabidopsis
  misc_feature (13)..(485): Homolog of NCBI NO: 15224183 NR Description: mannitol transporter, putative [Arabidopsis
  misc_feature (14)..(479): Homolog of NCBI NO: 30025133 NR Description: putative sorbitol transporter [Prunus cerasus]
  misc_feature (9)..(479): Homolog of NCBI NO: 15230212 NR Description: mannitol transporter, putative [Arabidopsis >gi|9293909|dbj|BAB01812.1| sugar transporter protein
  misc_feature (14)..(493): Homolog of NCBI NO: 13129489 NR Description: Putative sugar transporter [Oryza sativa]
  misc_feature (26)..(479): Homolog of NCBI NO: 29691878 NR Description: sorbitol transporter [Malus x domestica]
  misc_feature (8)..(479): Homolog of NCBI NO: 15226696 NR Description: mannitol transporter, putative [Arabidopsis
  misc_feature (8)..(479): Homolog of NCBI NO: 15226682 NR Description: mannitol transporter, putative [Arabidopsis
  misc_feature (8)..(479): Homolog of NCBI NO: 28316433 NR Description: sorbitol transporter [Prunus cerasus]
  misc_feature (1)..(479): Homolog of NCBI NO: 16118827 NR Description: putative sugar transporter [Oryza sativa]
MADQISGEKPAGVNRFALQCAIVASIVSIIFGYDTGVMSGAMVFIEEDLKTNDVQIEVLTGILNLCALVGSLLAGRTSDIIGRRYTIVLASILFMLGSILMGWGPNYPVLLSGRCTAGLGVGFALMVAPVYSAEIATASHRGLLASLPHLCISIGILLGYIVNYFFSKLPMHIGWRLMLGIAAVPSLVLAFGILKMPESPRWLIMQGRLKEGKEILELVSNSPEEAELRFQDIKAAAGIDPKCVDDVVKMEGKKTHGEGVWKELILRPTPAVRRVLLTALGIHFFQHASGIEAVLLYGPRIFKKAGITTKDKLFLVTIGVGIMKTTFIFTATLLLDKVGRRKLLLTSVGGMVIALTMLGFGLTMAQNAGGKLAWALVLSIVAAYSFVAFFSIGLGPITWVYSSEVFPLKLRAQGASLGVAVNRVMNATVSMSFLSLTSAITTGGAFFMFAGVAAVAWNFFFFLLPETKGKSLEEIEALFQRDGDKVRGENGAA

SEQ ID NO: 101101 - protein, 456 aa, Arabidopsis thaliana
  peptide (1)..(456): Ceres Seq. ID no. 13606954
  misc_feature (1)..(442): Pfam Name: Sugar (and other) transporter Pfam Description: Sugar (and other) transporter
  misc_feature (1)..(456): Homolog of NCBI NO: 15234491 NR Description: mannitol transporter, putative [Arabidopsis
  misc_feature (1)..(448): Homolog of NCBI NO: 15224183 NR Description: mannitol transporter, putative [Arabidopsis
  misc_feature (1)..(442): Homolog of NCBI NO: 30025133 NR Description: putative sorbitol transporter [Prunus cerasus]
  misc_feature (1)..(442): Homolog of NCBI NO: 15230212 NR Description: mannitol transporter, putative [Arabidopsis >gi|9293909|dbj|BAB01812.1| sugar transporter protein
  misc_feature (1)..(456): Homolog of NCBI NO: 13129489 NR Description: Putative sugar transporter [Oryza sativa]
  misc_feature (1)..(442): Homolog of NCBI NO: 29691878 NR Description: sorbitol transporter [Malus x domestica]
  misc_feature (1)..(442): Homolog of NCBI NO: 15226696 NR Description: mannitol transporter, putative [Arabidopsis
  misc_feature (1)..(442): Homolog of NCBI NO: 15226682 NR Description: mannitol transporter, putative [Arabidopsis
  misc_feature (1)..(442): Homolog of NCBI NO: 28316433 NR Description: sorbitol transporter [Prunus cerasus]
  misc_feature (1)..(442): Homolog of NCBI NO: 16118827 NR Description: putative sugar transporter [Oryza sativa]
MSGAMVFIEEDLKTNDVQIEVLTGILNLCALVGSLLAGRTSDIIGRRYTIVLASILFMLGSILMGWGPNYPVLLSGRCTAGLGVGFALMVAPVYSAEIATASHRGLLASLPHLCISIGILLGYIVNYFFSKLPMHIGWRLMLGIAAVPSLVLAFGILKMPESPRWLIMQGRLKEGKEILELVSNSPEEAELRFQDIKAAAGIDPKCVDDVVKMEGKKTHGEGVWKELILRPTPAVRRVLLTALGIHFFQHASGIEAVLLYGPRIFKKAGITTKDKLFLVTIGVGIMKTTFIFTATLLLDKVGRRKLLLTSVGGMVIALTMLGFGLTMAQNAGGKLAWALVLSIVAAYSFVAFFSIGLGPITWVYSSEVFPLKLRAQGASLGVAVNRVMNATVSMSFLSLTSAITTGGAFFMFAGVAAVAWNFFFFLLPETKGKSLEEIEALFQRDGDKVRGENGAA

SEQ ID NO: 101102 - protein, 452 aa, Arabidopsis thaliana
  peptide (1)..(452): Ceres Seq. ID no. 13606955
  misc_feature (1)..(438): Pfam Name: Sugar (and other) transporter Pfam Description: Sugar (and other) transporter
  misc_feature (1)..(452): Homolog of NCBI NO: 15234491 NR Description: mannitol transporter, putative [Arabidopsis
  misc_feature (1)..(444): Homolog of NCBI NO: 15224183 NR Description: mannitol transporter, putative [Arabidopsis
  misc_feature (1)..(438): Homolog of NCBI NO: 30025133 NR Description: putative sorbitol transporter [Prunus cerasus]
  misc_feature (1)..(438): Homolog of NCBI NO: 15230212 NR Description: mannitol transporter, putative [Arabidopsis >gi|9293909|dbj|BAB01812.1| sugar transporter protein
  misc_feature (1)..(452): Homolog of NCBI NO: 13129489 NR Description: Putative sugar transporter [Oryza sativa]
  misc_feature (1)..(438): Homolog of NCBI NO: 29691878 NR Description: sorbitol transporter [Malus x domestica]
  misc_feature (1)..(438): Homolog of NCBI NO: 15226696 NR Description: mannitol transporter, putative [Arabidopsis
  misc_feature (1)..(438): Homolog of NCBI NO: 15226682 NR Description: mannitol transporter, putative [Arabidopsis
  misc_feature (1)..(438): Homolog of NCBI NO: 28316433 NR Description: sorbitol transporter [Prunus cerasus]
  misc_feature (1)..(438): Homolog of NCBI NO: 16118827 NR Description: putative sugar transporter [Oryza sativa]
MVFIEEDLKTNDVQIEVLTGILNLCALVGSLLAGRTSDIIGRRYTIVLASILFMLGSILMGWGPNYPVLLSGRCTAGLGVGFALMVAPVYSAEIATASHRGLLASLPHLCISIGILLGYIVNYFFSKLPMHIGWRLMLGIAAVPSLVLAFGILKMPESPRWLIMQGRLKEGKEILELVSNSPEEAELRFQDIKAAAGIDPKCVDDVVKMEGKKTHGEGVWKELILRPTPAVRRVLLTALGIHFFQHASGIEAVLLYGPRIFKKAGITTKDKLFLVTIGVGIMKTTFIFTATLLLDKVGRRKLLLTSVGGMVIALTMLGFGLTMAQNAGGKLAWALVLSIVAAYSFVAFFSIGLGPITWVYSSEVFPLKLRAQGASLGVAVNRVMNATVSMSFLSLTSAITTGGAFFMFAGVAAVAWNFFFFLLPETKGKSLEEIEALFQRDGDKVRGENGAA

SEQ ID NO: 101103 - DNA, 973 bp, Arabidopsis thaliana
  misc_feature (1)..(973): Ceres Seq. ID no. 13606956
  misc_feature: MA Experiment ID: 20000185 Result: Up-regulated in Transcription
  misc_feature: MA Experiment 20000185 PARAMETER Experiment Name: At_Roots__P Parameter: Age (day) Value: 7 vs. 21
  misc_feature: MA Experiment 20000185 PARAMETER Experiment Name: At_Roots__P Parameter: Organism Value: A. thaliana
  misc_feature: MA Experiment 20000185 PARAMETER Experiment Name: At_Roots__P Parameter: Tissue Value: Roots vs. Whole Plant
attcatcggtctgagttattttgcttgctctttgaaattctgacaatggcagtgaacgttgatgcagagtacctcaaagagatagagaaaactcgtagagaccttcgagctctcatctcttccagaaactgtgctcccattatgctccgtcttgcatggcatgatgcaggaacctatgatgccaagaagaaaaccggaggtgccaatggatctatcagattcaaggaagagctaaaccgtccacacaacaaaggtttggagaaggcagtcgccttctgcgaggaagtaaaggctaagcatcccagagtctcttacgcagacctttatcagctcgctggagttgttgcagtggaggttactggcggccctgcaatcccatttacaccaggccgtaaggatgctgattccgcggacgatggagaacttccaaatccaaatgaaggtgcctcacatttaagaactctcttctctcgtatgggtctattggatagagacattgtagctctctctggaggtcacactttgggacgtgcacataaggagagatcagattttgaaggtccttggacacaggaccctctcaagtttgataactcgtatttcgtagagcttctaaaaggggagactccgggattgctacaacttaaaaccgacaaggctctacttgatgatcccaagttccacccttttgttaagctgtatgcaaaggacgaggatatgttcttcaaagcctatgcaatttcacacaagaaactctcagaactaggatttaatccgccaagaagaattccttcagcagtgacgcagcagacgcttggaatcgctgttgctgcagctgtggtgatctttacaatatgctatgaagcaagcagaagaggcaagtgaggaagtttcgcagatgcaataagggacgagagaaaaatgttaattgaatgtatgcaataaatacaaagattcatgcaatgttacctcc

SEQ ID NO: 101104 - protein, 294 aa, Arabidopsis thaliana
  peptide (1)..(294): Ceres Seq. ID no. 13606957
  misc_feature (31)..(237): Pfam Name: Peroxidase Pfam Description: Peroxidase
  misc_feature (16)..(294): Homolog of NCBI NO: 15233425 NR Description: ascorbate peroxidase, putative [Arabidopsis
  misc_feature (34)..(294): Homolog of NCBI NO: 31980502 NR Description: putative ascorbate peroxidase APX5 [Arabidopsis
  misc_feature (20)..(294): Homolog of NCBI NO: 15430584 NR Description: peroxisomal ascorbate peroxidase [Cucurbita cv.
  misc_feature (14)..(294): Homolog of NCBI NO: 4835909 NR Description: cytosolic ascorbate peroxidase [Mesembryanthemum
  misc_feature (20)..(294): Homolog of NCBI NO: 7484726 NR Description: L-ascorbate peroxidase (EC 1.11.1.11),
  misc_feature (20)..(294): Homolog of NCBI NO: 5442410 NR Description: ascorbate peroxidase [Zantedeschia aethiopica]
  misc_feature (20)..(294): Homolog of NCBI NO: 17066705 NR Description: ascorbate peroxidase [Capsicum annuum]
  misc_feature (20)..(294): Homolog of NCBI NO: 15236239 NR Description: ascorbate peroxidase, putative (APX) [Arabidopsis
  misc_feature (20)..(294): Homolog of NCBI NO: 15080682 NR Description: peroxisome type ascorbate peroxidase [Hordeum
  misc_feature (20)..(294): Homolog of NCBI NO: 3288066 NR Description: ascorbate peroxidase [Arabidopsis thaliana]
IHRSELFCLLFEILTMAVNVDAEYLKEIEKTRRDLRALISSRNCAPIMLRLAWHDAGTYDAKKKTGGANGSIRFKEELNRPHNKGLEKAVAFCEEVKAKHPRVSYADLYQLAGVVAVEVTGGPAIPFTPGRKDADSADDGELPNPNEGASHLRTLFSRMGLLDRDIVALSGGHTLGRAHKERSDFEGPWTQDPLKFDNSYFVELLKGETPGLLQLKTDKALLDDPKFHPFVKLYAKDEDMFFKAYAISHKKLSELGFNPPRRIPSAVTQQTLGIAVAAAVVIFTICYEASRRGK

SEQ ID NO: 101105 - protein, 279 aa, Arabidopsis thaliana
  peptide (1)..(279): Ceres Seq. ID no. 13606958
  misc_feature (16)..(222): Pfam Name: Peroxidase Pfam Description: Peroxidase
  misc_feature (1)..(279): Homolog of NCBI NO: 15233425 NR Description: ascorbate peroxidase, putative [Arabidopsis
  misc_feature (19)..(279): Homolog of NCBI NO: 31980502 NR Description: putative ascorbate peroxidase APX5 [Arabidopsis
  misc_feature (5)..(279): Homolog of NCBI NO: 15430584 NR Description: peroxisomal ascorbate peroxidase [Cucurbita cv.
  misc_feature (1)..(279): Homolog of NCBI NO: 4835909 NR Description: cytosolic ascorbate peroxidase [Mesembryanthemum
  misc_feature (5)..(279): Homolog of NCBI NO: 7484726 NR Description: L-ascorbate peroxidase (EC 1.11.1.11),
  misc_feature (5)..(279): Homolog of NCBI NO: 5442410 NR Description: ascorbate peroxidase [Zantedeschia aethiopica]
  misc_feature (5)..(279): Homolog of NCBI NO: 17066705 NR Description: ascorbate peroxidase [Capsicum annuum]
  misc_feature (5)..(279): Homolog of NCBI NO: 15236239 NR Description: ascorbate peroxidase, putative (APX) [Arabidopsis
  misc_feature (5)..(279): Homolog of NCBI NO: 15080682 NR Description: peroxisome type ascorbate peroxidase [Hordeum
  misc_feature (5)..(279): Homolog of NCBI NO: 3288066 NR Description: ascorbate peroxidase [Arabidopsis thaliana]
MAVNVDAEYLKEIEKTRRDLRALISSRNCAPIMLRLAWHDAGTYDAKKKTGGANGSIRFKEELNRPHNKGLEKAVAFCEEVKAKHPRVSYADLYQLAGVVAVEVTGGPAIPFTPGRKDADSADDGELPNPNEGASHLRTLFSRMGLLDRDIVALSGGHTLGRAHKERSDFEGPWTQDPLKFDNSYFVELLKGETPGLLQLKTDKALLDDPKFHPFVKLYAKDEDMFFKAYAISHKKLSELGFNPPRRIPSAVTQQTLGIAVAAAVVIFTICYEASRRGK

SEQ ID NO: 101106 - protein, 247 aa, Arabidopsis thaliana
  peptide (1)..(247): Ceres Seq. ID no. 13606959
  misc_feature (1)..(190): Pfam Name: Peroxidase Pfam Description: Peroxidase
  misc_feature (1)..(247): Homolog of NCBI NO: 15233425 NR Description: ascorbate peroxidase, putative [Arabidopsis
  misc_feature (1)..(247): Homolog of NCBI NO: 31980502 NR Description: putative ascorbate peroxidase APX5 [Arabidopsis
  misc_feature (1)..(247): Homolog of NCBI NO: 15430584 NR Description: peroxisomal ascorbate peroxidase [Cucurbita cv.
  misc_feature (1)..(247): Homolog of NCBI NO: 4835909 NR Description: cytosolic ascorbate peroxidase [Mesembryanthemum
  misc_feature (1)..(247): Homolog of NCBI NO: 7484726 NR Description: L-ascorbate peroxidase (EC 1.11.1.11),
  misc_feature (1)..(247): Homolog of NCBI NO: 5442410 NR Description: ascorbate peroxidase [Zantedeschia aethiopica]
  misc_feature (1)..(247): Homolog of NCBI NO: 17066705 NR Description: ascorbate peroxidase [Capsicum annuum]
  misc_feature (1)..(247): Homolog of NCBI NO: 15236239 NR Description: ascorbate peroxidase, putative (APX) [Arabidopsis
  misc_feature (1)..(247): Homolog of NCBI NO: 15080682 NR Description: peroxisome type ascorbate peroxidase [Hordeum
  misc_feature (1)..(247): Homolog of NCBI NO: 3288066 NR Description: ascorbate peroxidase [Arabidopsis thaliana]
MLRLAWHDAGTYDAKKKTGGANGSIRFKEELNRPHNKGLEKAVAFCEEVKAKHPRVSYADLYQLAGVVAVEVTGGPAIPFTPGRKDADSADDGELPNPNEGASHLRTLFSRMGLLDRDIVALSGGHTLGRAHKERSDFEGPWTQDPLKFDNSYFVELLKGETPGLLQLKTDKALLDDPKFHPFVKLYAKDEDMFFKAYAISHKKLSELGFNPPRRIPSAVTQQTLGIAVAAAVVIFTICYEASRRGK

SEQ ID NO: 101107 - DNA, 4777 bp, Arabidopsis thaliana
  misc_feature (1)..(4777): Ceres Seq. ID no. 13606964
  misc_feature: MA Experiment ID: 20000173 Result: Down-regulated in Transcription
  misc_feature: MA Experiment 20000173 PARAMETER Experiment Name: At_42deg_Heat_P Parameter: Age (day) Value: 14
  misc_feature: MA Experiment 20000173 PARAMETER Experiment Name: At_42deg_Heat_P Parameter: Organism Value: A. thaliana
  misc_feature: MA Experiment 20000173 PARAMETER Experiment Name: At_42deg_Heat_P Parameter: Plant Line Value: WS
  misc_feature: MA Experiment 20000173 PARAMETER Experiment Name: At_42deg_Heat_P Parameter: Temperature (deg C) Value: 42 vs. 22
  misc_feature: MA Experiment 20000173 PARAMETER Experiment Name: At_42deg_Heat_P Parameter: Timepoint (hr) Value: 6
  misc_feature: MA Experiment 20000173 PARAMETER Experiment Name: At_42deg_Heat_P Parameter: Tissue Value: Aerial
  misc_feature: MA Experiment ID: 20000180 Result: Up-regulated in Transcription
  misc_feature: MA Experiment 20000180 PARAMETER Experiment Name: At_Germinating_Seeds_P Parameter: Age (hr) Value: 24 vs. 0
  misc_feature: MA Experiment 20000180 PARAMETER Experiment Name: At_Germinating_Seeds_P Parameter: Tissue Value: Germinating Seeds
  misc_feature: MA Experiment ID: 20000184 Result: Down-regulated in Transcription
  misc_feature: MA Experiment 20000184 PARAMETER Experiment Name: At_Shoots__P Parameter: Age (day) Value: 7
  misc_feature: MA Experiment 20000184 PARAMETER Experiment Name: At_Shoots__P Parameter: Tissue Value: Shoots vs. Whole Plant
  misc_feature: MA Experiment ID: 20001247 Result: Up-regulated in Transcription
  misc_feature: MA Experiment 20001247 PARAMETER Experiment Name: At_Far-red-induction_P Parameter: Age (day) Value: 7
  misc_feature: MA Experiment 20001247 PARAMETER Experiment Name: At_Far-red-induction_P Parameter: Light Value: Far-red vs. White
  misc_feature: MA Experiment 20001247 PARAMETER Experiment Name: At_Far-red-induction_P Parameter: Organism Value: A. thaliana
  misc_feature: MA Experiment 20001247 PARAMETER Experiment Name: At_Far-red-induction_P Parameter: Plant Line Value: Columbia
  misc_feature: MA Experiment 20001247 PARAMETER Experiment Name: At_Far-red-induction_P Parameter: Timepoint (hr) Value: 1
  misc_feature: MA Experiment 20001247 PARAMETER Experiment Name: At_Far-red-induction_P Parameter: Tissue Value: Whole Plant
atgtcgaatccgatgttcccggagaaatgggaggagagctcaacaagtaaaagcagcagaagagttcataaaaggagagagaggaagatgtggaagaaacccatcaagctttctagatttcccagtttcggtttctccggttccgacttcactcttgatcagattccggccatcttctccggctacactgccgagtctgaagattcctcttcctccgagatgtctgatgattccagaacttactcgaaatcatctgatgagaatgaggagcttgaccaggcaagtctcacaatctgttctgaaaggccaagatcggtgaagagacgagcgaaatcgaagagtatttcacgaatttcaagcatgaaggttcttaggagacagtcaacgaggacattatatggagcaggacagagattgaagaagatgagatctatgaagcgtttaacttcaaattcgagacaaattctaaggaaaaagaatcttgataggggagattttggattgttacagcctcattacttgagaccaacgagttcttctgcttcaaagaatgtcgaaaacaatcagaagaatcttggagcagctaggttgaagagaatagcaagcttgagatacaatggtttgcttaaagctacatgttcttcagctatgaaaggttcttcttctaagaggagtaatgatgtttgcacttataggtattgttctctgcatggtaggcgtcatagccacgctgcggataacaatgctggtgttccatctttgaagcggtttgtgtcgatgaggaggaagtttatgaataggcagaagagtgtgaaccggaggttggtgttattgaagaggactttgagtagaaagagagggcctttaggtggtcgggttgtgactgatcaagaatcaaaggaggtggatgataatgtagatggagattctgatgaagaggtgtttgaagaagaggtttccagctctgtggatggtggaaatgataatgaatcgattggaagatctagtgagacagtaatggttgatgttgatgataatgtggatagaggaatggatgcaatggagactgttgcatcaaaggttcaggaatctaaaacggagactgtaggtgccacactatggcgcgctatatgtgagcaaactgtgacgggtcacgatcatgatgatggtaaggtcgatggaacgacgagtgatggaactgtgggagataatgaagaagtttgcagagaaggttcctctggagaattgagagaagaggatggaaagaaaaccgaatatgtatggaatgaaactgtaacgctcgttaagcaagcgtttgatgagatacttgcggaaatcaccgatgatgactcgtctgatgatatttctatgacgaaggatgaagctttagaggttggattgggggaagaagatgtaggagcggattcgagtgattcaagttgctcggatatgcagcctgttatagaaagagatacacatttgtctgtgattgcttctacttttcatatgagagatgaatttggtcatcagagaggtcccaagaagtggagttacttgaaaagagtaatacttctcaagagatttctcaagtctttggaccgaaaagagaggcgtaagttatctgatggcaaagagagtgaaacaataatgcggttgagaagagagctggttggggagaggaagaatgcagaagaatggatgcttgatcacgcacttaggcaagtcatttcgacacttgctccatcgcagaaaaagaaagtaaaacatcttgttaaagcttttgaaagtttaatcccaatggatggtggttctagaggtcatgatgatcttgtaagtcctgcaagagaagagaacgaaacagtgaactcgcaaacgcaaacgatcttgagagacaataaagacgctactgatatactagaagtttcaccagcaaaggatcttgaagaaacaaacttaacttgtgaagcatcatcctttttgtctattgatatgaaatctgatgaagagaacgaaacagtgaactcaccaacgatctggagagacaatgaagacactactgatctactggaagttgtaccagcaaaggatcttgaagaaacaaacttaactagtgaatcatcatcatctctgtgtattggtatgaaatctgatgaagctttggaatcaacagcagatgcaagtttatgtaatcatcttgctgtggaagaagaagtagatgggttggctttgggttcgtttatagaagaagaagaaaagaagggagaatctgaaaagcaaaatctttctacatggaggaaccttatacagaagcacatggtcatgagagacaacagcgagggaaatcgtaatgaaactgagcaagaacacaagtggtcctatggaactgatcagatgacaggtattgatgatgctaatgctgcagctgttaaatcgattcagctagcatttgaaacgattctctcggagatacctgactcatcgtccgacgaagagagtgtttcggaatcatctaactctcttaaagaggagaaagaacatcaaggagagaccaagaggagctggaacagcttgagaaaggttatacttttgaaaagatttgtgaaaagcttggagaaagtacaggttcctaatccgagaaagatgcgtaatcttcctgttgagtctgcatttgaggcagaaaatgtattcctgagacaccgatcaataatggaaggaacaagaacagaaggagaggaaatgatgctggattatgctctgagacaagcgatatcaagattggctcctatacagagaaagaaggtagacctccttgtgcaagcctttgatattgtccttgatggccatgatacacctaaacaaaccaagaacagtgatactccccggaacaatgatgaaactaaagaaggaaaaccgagagtagaggaaggttgtgaagtcaacaaagatgagcagaagattaaaaatgtctttgcaagatttcaggtacatcaaaaagacttgaaaggagaagaggaggttcataatacgcctaaggaatccagaaatttgcctcctatcagaaattttaaacagcgaatcgtggttgagaaagggaaagactcgagaatgtggaagctcatctataaacacatggtaacagagaaagaaggaattgattctgcaaatgctgaatcagtggcttcagttgaaagtgaatatgatgatgaggctggtggtcttcagattgatgcaagaagaagcggaacagttacacttgttagagaagcgcttgagaaaattctctctgaaattccggataactcatctgatgatcagtctatggacagtgatataactacggagcaagaactatttgaaagaaactctcaagtcagtgaagaaaagagtgaagtttcttcagctaccttcaaaccaaagtttactgagaaaagagtgaagggatggaacaatgtgaagaaagtcattcttctaaagcgatttgttagtgacttaggaagtctgacaagactcagccccaagacacctcgtgttttgccatgggaacccgatccagaaaccgaaaagatccgtttgaggcatcaggaaatcggagggaagaggaattcagaggaatggatgctcgattatgctctacgacaagccatatcgacattagcaccgtctcagaaaagaaaagtctctcttcttgcacaagctttcgacactataagcttacaagatatggggagtggttcaaccccggggtcagcagcatcgtccaggaacatctctcgtcaatccagcatttcttctatggcggcccattatgaaaatgaagctaatgctgagatcattagaggaaaactgagaaatctccaagaagatctcaaagagagtgcaaaacttgatggtgtatccaaagatttggaagagaaacaacagtgctcgagcttgtggcggatattatgcaaacagatggaagacaacgagaaaaaccaaacattgcctgaagaaacaagaaaagaagaagaagaagaagaactgaaagaagacacaagtgtggatggtgaaaagatggaactttaccaaaccgaagcagtggaactattaggagaagtcatagatggaatctctcttgaagagagtcaagatcagaacctaaacaatgaagaaacaagacagaagagtgaaactctacaggtctcaaaagtgaggattgaccgatggagcaacctcaaaagagcgattttgcttaggagattcgtcaaagccttagagaatgtaaggaaattcaacccaagagagcctcggttcttgcctccgaaccccgaagttgaagcggaaaaggtgaatcttaggcatcaagaaacccaaaacaagaaaaatggcgatgaatggatggtcgataacgcacttcaaggagtggtttcgaagctaacaccagctcgcaaacttaaagttcagttattggtgcaagcgtttgagtcactttcggctacagggaactgagaccaagcaatatttcttattacaaagtttccagttcataagcttcagaaaacaaagaaccatgaagaacaatatctaaaagactaatcaaggaaccggaagataactaaagacattttatttgctcttgcaaattatctcatgtgtttctttgtcttttgttcttgcattgattcattattttgattaaaatggattcaattacagagttgtcaaacctctttgagtttcgtctatatacacattctcttgattttgatgatataaaagaaataaaacaacagtgtat

SEQ ID NO: 101108 - protein, 1495 aa, Arabidopsis thaliana
  peptide (1)..(1495): Ceres Seq. ID no. 13606965
  misc_feature (533)..(1134): Pfam Name: Myosin tail Pfam Description: Myosin tail
  misc_feature (1318)..(1493): Homolog of NCBI NO: 24637279 NR Description: pathogen-induced calmodulin-binding protein
  misc_feature (1095)..(1236): Homolog of NCBI NO: 24637279 NR Description: pathogen-induced calmodulin-binding protein
  misc_feature (1087)..(1423): Homolog of NCBI NO: 17933110 NR Description: PNCBP [Solanum tuberosum]
  misc_feature (1299)..(1490): Homolog of NCBI NO: 17933110 NR Description: PNCBP [Solanum tuberosum]
  misc_feature (825)..(945): Homolog of NCBI NO: 24637279 NR Description: pathogen-induced calmodulin-binding protein
  misc_feature (1320)..(1490): Homolog of NCBI NO: 17933110 NR Description: PNCBP [Solanum tuberosum]
  misc_feature (1255)..(1490): Homolog of NCBI NO: 25956269 NR Description: unnamed protein product [Lotus japonicus]
  misc_feature (383)..(1046): Homolog of NCBI NO: 17933110 NR Description: PNCBP [Solanum tuberosum]
  misc_feature (1255)..(1489): Homolog of NCBI NO: 33945880 NR Description: hypothetical protein [Lotus corniculatus var.
  misc_feature (1073)..(1236): Homolog of NCBI NO: 17933110 NR Description: PNCBP [Solanum tuberosum]
MSNPMFPEKWEESSTSKSSRRVHKRRERKMWKKPIKLSRFPSFGFSGSDFTLDQIPAIFSGYTAESEDSSSSEMSDDSRTYSKSSDENEELDQASLTICSERPRSVKRRAKSKSISRISSMKVLRRQSTRTLYGAGQRLKKMRSMKRLTSNSRQILRKKNLDRGDFGLLQPHYLRPTSSSASKNVENNQKNLGAARLKRIASLRYNGLLKATCSSAMKGSSSKRSNDVCTYRYCSLHGRRHSHAADNNAGVPSLKRFVSMRRKFMNRQKSVNRRLVLLKRTLSRKRGPLGGRVVTDQESKEVDDNVDGDSDEEVFEEEVSSSVDGGNDNESIGRSSETVMVDVDDNVDRGMDAMETVASKVQESKTETVGATLWRAICEQTVTGHDHDDGKVDGTTSDGTVGDNEEVCREGSSGELREEDGKKTEYVWNETVTLVKQAFDEILAEITDDDSSDDISMTKDEALEVGLGEEDVGADSSDSSCSDMQPVIERDTHLSVIASTFHMRDEFGHQRGPKKWSYLKRVILLKRFLKSLDRKERRKLSDGKESETIMRLRRELVGERKNAEEWMLDHALRQVISTLAPSQKKKVKHLVKAFESLIPMDGGSRGHDDLVSPAREENETVNSQTQTILRDNKDATDILEVSPAKDLEETNLTCEASSFLSIDMKSDEENETVNSPTIWRDNEDTTDLLEVVPAKDLEETNLTSESSSSLCIGMKSDEALESTADASLCNHLAVEEEVDGLALGSFIEEEEKKGESEKQNLSTWRNLIQKHMVMRDNSEGNRNETEQEHKWSYGTDQMTGIDDANAAAVKSIQLAFETILSEIPDSSSDEESVSESSNSLKEEKEHQGETKRSWNSLRKVILLKRFVKSLEKVQVPNPRKMRNLPVESAFEAENVFLRHRSIMEGTRTEGEEMMLDYALRQAISRLAPIQRKKVDLLVQAFDIVLDGHDTPKQTKNSDTPRNNDETKEGKPRVEEGCEVNKDEQKIKNVFARFQVHQKDLKGEEEVHNTPKESRNLPPIRNFKQRIVVEKGKDSRMWKLIYKHMVTEKEGIDSANAESVASVESEYDDEAGGLQIDARRSGTVTLVREALEKILSEIPDNSSDDQSMDSDITTEQELFERNSQVSEEKSEVSSATFKPKFTEKRVKGWNNVKKVILLKRFVSDLGSLTRLSPKTPRVLPWEPDPETEKIRLRHQEIGGKRNSEEWMLDYALRQAISTLAPSQKRKVSLLAQAFDTISLQDMGSGSTPGSAASSRNISRQSSISSMAAHYENEANAEIIRGKLRNLQEDLKESAKLDGVSKDLEEKQQCSSLWRILCKQMEDNEKNQTLPEETRKEEEEEELKEDTSVDGEKMELYQTEAVELLGEVIDGISLEESQDQNLNNEETRQKSETLQVSKVRIDRWSNLKRAILLRRFVKALENVRKFNPREPRFLPPNPEVEAEKVNLRHQETQNKKNGDEWMVDNALQGVVSKLTPARKLKVQLLVQAFESLSATGN

SEQ ID NO: 101109 - protein, 1491 aa, Arabidopsis thaliana
  peptide (1)..(1491): Ceres Seq. ID no. 13606966
  misc_feature (529)..(1130): Pfam Name: Myosin tail Pfam Description: Myosin tail
  misc_feature (1314)..(1489): Homolog of NCBI NO: 24637279 NR Description: pathogen-induced calmodulin-binding protein
  misc_feature (1091)..(1232): Homolog of NCBI NO: 24637279 NR Description: pathogen-induced calmodulin-binding protein
  misc_feature (1083)..(1419): Homolog of NCBI NO: 17933110 NR Description: PNCBP [Solanum tuberosum]
  misc_feature (1295)..(1486): Homolog of NCBI NO: 17933110 NR Description: PNCBP [Solanum tuberosum]
  misc_feature (821)..(941): Homolog of NCBI NO: 24637279 NR Description: pathogen-induced calmodulin-binding protein
  misc_feature (1316)..(1486): Homolog of NCBI NO: 17933110 NR Description: PNCBP [Solanum tuberosum]
  misc_feature (1251)..(1486): Homolog of NCBI NO: 25956269 NR Description: unnamed protein product [Lotus japonicus]
  misc_feature (379)..(1042): Homolog of NCBI NO: 17933110 NR Description: PNCBP [Solanum tuberosum]
  misc_feature (1251)..(1485): Homolog of NCBI NO: 33945880 NR Description: hypothetical protein [Lotus corniculatus var.
  misc_feature (1069)..(1232): Homolog of NCBI NO: 17933110 NR Description: PNCBP [Solanum tuberosum]
MFPEKWEESSTSKSSRRVHKRRERKMWKKPIKLSRFPSFGFSGSDFTLDQIPAIFSGYTAESEDSSSSEMSDDSRTYSKSSDENEELDQASLTICSERPRSVKRRAKSKSISRISSMKVLRRQSTRTLYGAGQRLKKMRSMKRLTSNSRQILRKKNLDRGDFGLLQPHYLRPTSSSASKNVENNQKNLGAARLKRIASLRYNGLLKATCSSAMKGSSSKRSNDVCTYRYCSLHGRRHSHAADNNAGVPSLKRFVSMRRKFMNRQKSVNRRLVLLKRTLSRKRGPLGGRVVTDQESKEVDDNVDGDSDEEVFEEEVSSSVDGGNDNESIGRSSETVMVDVDDNVDRGMDAMETVASKVQESKTETVGATLWRAICEQTVTGHDHDDGKVDGTTSDGTVGDNEEVCREGSSGELREEDGKKTEYVWNETVTLVKQAFDEILAEITDDDSSDDISMTKDEALEVGLGEEDVGADSSDSSCSDMQPVIERDTHLSVIASTFHMRDEFGHQRGPKKWSYLKRVILLKRFLKSLDRKERRKLSDGKESETIMRLRRELVGERKNAEEWMLDHALRQVISTLAPSQKKKVKHLVKAFESLIPMDGGSRGHDDLVSPAREENETVNSQTQTILRDNKDATDILEVSPAKDLEETNLTCEASSFLSIDMKSDEENETVNSPTIWRDNEDTTDLLEVVPAKDLEETNLTSESSSSLCIGMKSDEALESTADASLCNHLAVEEEVDGLALGSFIEEEEKKGESEKQNLSTWRNLIQKHMVMRDNSEGNRNETEQEHKWSYGTDQMTGIDDANAAAVKSIQLAFETILSEIPDSSSDEESVSESSNSLKEEKEHQGETKRSWNSLRKVILLKRFVKSLEKVQVPNPRKMRNLPVESAFEAENVFLRHRSIMEGTRTEGEEMMLDYALRQAISRLAPIQRKKVDLLVQAFDIVLDGHDTPKQTKNSDTPRNNDETKEGKPRVEEGCEVNKDEQKIKNVFARFQVHQKDLKGEEEVHNTPKESRNLPPIRNFKQRIVVEKGKDSRMWKLIYKHMVTEKEGIDSANAESVASVESEYDDEAGGLQIDARRSGTVTLVREALEKILSEIPDNSSDDQSMDSDITTEQELFERNSQVSEEKSEVSSATFKPKFTEKRVKGWNNVKKVILLKRFVSDLGSLTRLSPKTPRVLPWEPDPETEKIRLRHQEIGGKRNSEEWMLDYALRQAISTLAPSQKRKVSLLAQAFDTISLQDMGSGSTPGSAASSRNISRQSSISSMAAHYENEANAEIIRGKLRNLQEDLKESAKLDGVSKDLEEKQQCSSLWRILCKQMEDNEKNQTLPEETRKEEEEEELKEDTSVDGEKMELYQTEAVELLGEVIDGISLEESQDQNLNNEETRQKSETLQVSKVRIDRWSNLKRAILLRRFVKALENVRKFNPREPRFLPPNPEVEAEKVNLRHQETQNKKNGDEWMVDNALQGVVSKLTPARKLKVQLLVQAFESLSATGN

SEQ ID NO: 101110 - protein, 1466 aa, Arabidopsis thaliana
  peptide (1)..(1466): Ceres Seq. ID no. 13606967
  misc_feature (504)..(1105): Pfam Name: Myosin tail Pfam Description: Myosin tail
  misc_feature (1289)..(1464): Homolog of NCBI NO: 24637279 NR Description: pathogen-induced calmodulin-binding protein
  misc_feature (1066)..(1207): Homolog of NCBI NO: 24637279 NR Description: pathogen-induced calmodulin-binding protein
  misc_feature (1058)..(1394): Homolog of NCBI NO: 17933110 NR Description: PNCBP [Solanum tuberosum]
  misc_feature (1270)..(1461): Homolog of NCBI NO: 17933110 NR Description: PNCBP [Solanum tuberosum]
  misc_feature (796)..(916): Homolog of NCBI NO: 24637279 NR Description: pathogen-induced calmodulin-binding protein
  misc_feature (1291)..(1461): Homolog of NCBI NO: 17933110 NR Description: PNCBP [Solanum tuberosum]
  misc_feature (1226)..(1461): Homolog of NCBI NO: 25956269 NR Description: unnamed protein product [Lotus japonicus]
  misc_feature (354)..(1017): Homolog of NCBI NO: 17933110 NR Description: PNCBP [Solanum tuberosum]
  misc_feature (1226)..(1460): Homolog of NCBI NO: 33945880 NR Description: hypothetical protein [Lotus corniculatus var.
  misc_feature (1044)..(1207): Homolog of NCBI NO: 17933110 NR Description: PNCBP [Solanum tuberosum]
MWKKPIKLSRFPSFGFSGSDFTLDQIPAIFSGYTAESEDSSSSEMSDDSRTYSKSSDENEELDQASLTICSERPRSVKRRAKSKSISRISSMKVLRRQSTRTLYGAGQRLKKMRSMKRLTSNSRQILRKKNLDRGDFGLLQPHYLRPTSSSASKNVENNQKNLGAARLKRIASLRYNGLLKATCSSAMKGSSSKRSNDVCTYRYCSLHGRRHSHAADNNAGVPSLKRFVSMRRKFMNRQKSVNRRLVLLKRTLSRKRGPLGGRVVTDQESKEVDDNVDGDSDEEVFEEEVSSSVDGGNDNESIGRSSETVMVDVDDNVDRGMDAMETVASKVQESKTETVGATLWRAICEQTVTGHDHDDGKVDGTTSDGTVGDNEEVCREGSSGELREEDGKKTEYVWNETVTLVKQAFDEILAEITDDDSSDDISMTKDEALEVGLGEEDVGADSSDSSCSDMQPVIERDTHLSVIASTFHMRDEFGHQRGPKKWSYLKRVILLKRFLKSLDRKERRKLSDGKESETIMRLRRELVGERKNAEEWMLDHALRQVISTLAPSQKKKVKHLVKAFESLIPMDGGSRGHDDLVSPAREENETVNSQTQTILRDNKDATDILEVSPAKDLEETNLTCEASSFLSIDMKSDEENETVNSPTIWRDNEDTTDLLEVVPAKDLEETNLTSESSSSLCIGMKSDEALESTADASLCNHLAVEEEVDGLALGSFIEEEEKKGESEKQNLSTWRNLIQKHMVMRDNSEGNRNETEQEHKWSYGTDQMTGIDDANAAAVKSIQLAFETILSEIPDSSSDEESVSESSNSLKEEKEHQGETKRSWNSLRKVILLKRFVKSLEKVQVPNPRKMRNLPVESAFEAENVFLRHRSIMEGTRTEGEEMMLDYALRQAISRLAPIQRKKVDLLVQAFDIVLDGHDTPKQTKNSDTPRNNDETKEGKPRVEEGCEVNKDEQKIKNVFARFQVHQKDLKGEEEVHNTPKESRNLPPIRNFKQRIVVEKGKDSRMWKLIYKHMVTEKEGIDSANAESVASVESEYDDEAGGLQIDARRSGTVTLVREALEKILSEIPDNSSDDQSMDSDITTEQELFERNSQVSEEKSEVSSATFKPKFTEKRVKGWNNVKKVILLKRFVSDLGSLTRLSPKTPRVLPWEPDPETEKIRLRHQEIGGKRNSEEWMLDYALRQAISTLAPSQKRKVSLLAQAFDTISLQDMGSGSTPGSAASSRNISRQSSISSMAAHYENEANAEIIRGKLRNLQEDLKESAKLDGVSKDLEEKQQCSSLWRILCKQMEDNEKNQTLPEETRKEEEEEELKEDTSVDGEKMELYQTEAVELLGEVIDGISLEESQDQNLNNEETRQKSETLQVSKVRIDRWSNLKRAILLRRFVKALENVRKFNPREPRFLPPNPEVEAEKVNLRHQETQNKKNGDEWMVDNALQGVVSKLTPARKLKVQLLVQAFESLSATGN

SEQ ID NO: 101111 - DNA, 2325 bp, Arabidopsis thaliana
  misc_feature (1)..(2325): Ceres Seq. ID no. 13606983
  misc_feature: MA Experiment ID: 20000307 Result: Up-regulated in Transcription
  misc_feature: MA Experiment 20000307 PARAMETER Experiment Name: At_Germinating_Seeds_Sub_P Parameter: Age (hr) Value: 24 vs. 0
  misc_feature: MA Experiment 20000307 PARAMETER Experiment Name: At_Germinating_Seeds_Sub_P Parameter: Organism Value: A. thaliana
  misc_feature: MA Experiment 20000307 PARAMETER Experiment Name: At_Germinating_Seeds_Sub_P Parameter: Plant Line Value: WS
  misc_feature: MA Experiment 20000307 PARAMETER Experiment Name: At_Germinating_Seeds_Sub_P Parameter: Tissue Value: Germinating Seeds
aatcgcctctctaaccacaaatcctaaaagtctaaacgaaaacagaacacatgaatctctccttcctctgcatctcaattccacttcgccatttttaaagctttttacgtaaataataagaaaccatggagaagaacgacaaggaccctgatcatgatgacaaatccaagggagatgagaaaggcgacgtcgtttcggatgctcatccctcagatgatgcgcatcatcaggatggtatcagtaacgaaaatgtagatgttgttggtaatgcggagacagatcatcaagatccaggagataacaatgtcgacaaggtttcacaaggagaagaagcaccagagattcgtcaaaccttggagtctttgtctgaagaactcgatcagtttctcccgactctttcccttcacatggaggagcacaaagatagcaccgaggagaaaggagaggatggttactttcagatcccacagtttgttgggaaattcttggatctttttgaggaaaaactctccaaatatgactctggtgagcctaagactgtgtggtaccaagatcctgaagaggtgtcttcgcttttggaggcagtggatcgtgtctcaaagcttatggggctattgctcaacaccaagtcctgtttggaccatcatgagtccttgatcaaccatgcgggatctattcagcagcgtgcaatggctttcttggaagacgaattccgcatcattttagaagaatctgtgaccaaagagtctgtggttgtcaccgatgacagcaacagccagaggaggagcactgccgatcagcaagaccaccagaacgatgtggtggtctcacaagaccacgaccagatgctcgttccggaatgcggtgatcaggagattgaataccctggttaccctgaggatgtggttgtggtgctgaggaaaatagcggaaaagatgaaagcaggagggtatggatgggaatgtagagaggtttatttggttgggaggaggaacatcttgatgcgcactttgaaacaagattgtgagtttgagaaagttagcatcgacgaggtgcagaaaatgagctgggacacgctcgagagagagatccctatttggaacaagactttcaaggactgctcttctctcttcttccctggtgagctaaaacttgcagagaggatattcccaggggacgaggggaacttattctgtattgtcacacacggtctggccatccagttcttaggtttcgcagaggccgtagccatgacaaggcgctccactgaaaagctcttcaagatcctcgacatctatgagactctgcgggatagttttccggccatggaggagctgtttccggaggaactccggagcgagctgaggaacgaggtgaccagtgctcgctcccgacttggagagactgcgattcacattttctgtgatctggagcactccatcaaatcagattcaagcaagacccctgtgccaggaggggcagtgcatccattgacgaggtacaccatgaactacctcaagtactcgtgcgaatacaaggacacattggaacaagtgttcaagagtcactcgaagatggagcgagaggaggaggaacctgtggagagcggaaactcggccttcgcaagccagctgatgaggataatggagctactcgacggaaacctggagacaaagtcaaaacagtacaaagacataccattgagctgcatcttcatgatgaacaacgggagatacatagtgcagaagatcaaaggatcggcggagatacacgaggtgatgggtgacacatggtgcaggaggaggtcgtcagagctaaggaactatcacaaaaactatcagagggagacgtgggggaagctactggggttcttagggcacgaggggctcatgcacaacggcaagatagtcaagcccaatctcaaggagaggttcaagagcttcaacgcaacatttgacgagatacacaagacacagaccacatgggtagtcaacgacgagcagctgcagagtgagctaagggtctccataactgcagtcatgatacctgcctacagggccttcatggccaggtttggacagtacttggatcctggtcgccagaccgagaagtatgtcaagtatcagcctgaagatatcgaggatctcatcgaccagctctttgaaggcaacacctcctcctcttctactgccaccgccaggcgaagaacatagcttctttcttttcttcttttttcttttgcaacaacactttttcctgattttctcaaaatttttcatgtcttcttcaactgtttttgtctgaatgccacaacttggatgaccc

SEQ ID NO: 101112 - protein, 695 aa, Arabidopsis thaliana
  peptide (1)..(695): Ceres Seq. ID no. 13606984
  misc_feature (33)..(694): Homolog of NCBI NO: 15240035 NR Description: exocyst subunit EXO70 family [Arabidopsis >gi|9955559|emb|CAC05443.1| putative protein [Arabidopsis
  misc_feature (121)..(685): Homolog of NCBI NO: 100226 NR Description: tomato leucine zipper-containing protein - tomato protein of unknown function [Lycopersicon esculentum]
  misc_feature (70)..(684): Homolog of NCBI NO: 15237198 NR Description: leucine zipper-containing protein [Arabidopsis >gi|10177020|dbj|BAB10258.1| leucine zipper protein [Arabidopsis >gi|20453216|gb|AAM19847.1| AT5g58430/mqj2_20 [Arabidopsis
  misc_feature (257)..(684): Homolog of NCBI NO: 23270388 NR Description: unknown protein [Arabidopsis thaliana]
  misc_feature (257)..(684): Homolog of NCBI NO: 30682979 NR Description: exocyst subunit EXO70 family [Arabidopsis >gi|9294634|dbj|BAB02973.1| gb|AAD25781.1~gene_id:MAG2.5~strong
  misc_feature (257)..(685): Homolog of NCBI NO: 15221040 NR Description: exocyst subunit EXO70 family [Arabidopsis
  misc_feature (117)..(683): Homolog of NCBI NO: 22326587 NR Description: exocyst subunit EXO70 family [Arabidopsis
  misc_feature (249)..(695): Homolog of NCBI NO: 15218495 NR Description: exocyst subunit EXO70 family [Arabidopsis
  misc_feature (121)..(684): Homolog of NCBI NO: 15222266 NR Description: exocyst subunit EXO70 family [Arabidopsis
  misc_feature (264)..(694): Homolog of NCBI NO: 38346639 NR Description: OSJNBa0072D21.9 [Oryza sativa (japonica
MEKNDKDPDHDDKSKGDEKGDVVSDAHPSDDAHHQDGISNENVDVVGNAETDHQDPGDNNVDKVSQGEEAPEIRQTLESLSEELDQFLPTLSLHMEEHKDSTEEKGEDGYFQIPQFVGKFLDLFEEKLSKYDSGEPKTVWYQDPEEVSSLLEAVDRVSKLMGLLLNTKSCLDHHESLINHAGSIQQRAMAFLEDEFRIILEESVTKESVVVTDDSNSQRRSTADQQDHQNDVVVSQDHDQMLVPECGDQEIEYPGYPEDVVVVLRKIAEKMKAGGYGWECREVYLVGRRNILMRTLKQDCEFEKVSIDEVQKMSWDTLEREIPIWNKTFKDCSSLFFPGELKLAERIFPGDEGNLFCIVTHGLAIQFLGFAEAVAMTRRSTEKLFKILDIYETLRDSFPAMEELFPEELRSELRNEVTSARSRLGETAIHIFCDLEHSIKSDSSKTPVPGGAVHPLTRYTMNYLKYSCEYKDTLEQVFKSHSKMEREEEEPVESGNSAFASQLMRIMELLDGNLETKSKQYKDIPLSCIFMMNNGRYIVQKIKGSAEIHEVMGDTWCRRRSSELRNYHKNYQRETWGKLLGFLGHEGLMHNGKIVKPNLKERFKSFNATFDEIHKTQTTWVVNDEQLQSELRVSITAVMIPAYRAFMARFGQYLDPGRQTEKYVKYQPEDIEDLIDQLFEGNTSSSSTATARRRT

SEQ ID NO: 101113 - protein, 601 aa, Arabidopsis thaliana
  peptide (1)..(601): Ceres Seq. ID no. 13606985
  misc_feature (1)..(600): Homolog of NCBI NO: 15240035 NR Description: exocyst subunit EXO70 family [Arabidopsis >gi|9955559|emb|CAC05443.1| putative protein [Arabidopsis
  misc_feature (27)..(591): Homolog of NCBI NO: 100226 NR Description: tomato leucine zipper-containing protein - tomato protein of unknown function [Lycopersicon esculentum]
  misc_feature (1)..(590): Homolog of NCBI NO: 15237198 NR Description: leucine zipper-containing protein [Arabidopsis >gi|10177020|dbj|BAB10258.1| leucine zipper protein [Arabidopsis >gi|20453216|gb|AAM19847.1| AT5g58430/mqj2_20 [Arabidopsis
  misc_feature (163)..(590): Homolog of NCBI NO: 23270388 NR Description: unknown protein [Arabidopsis thaliana]
  misc_feature (163)..(590): Homolog of NCBI NO: 30682979 NR Description: exocyst subunit EXO70 family [Arabidopsis >gi|9294634|dbj|BAB02973.1| gb|AAD25781.1~gene_id:MAG2.5~strong
  misc_feature (163)..(591): Homolog of NCBI NO: 15221040 NR Description: exocyst subunit EXO70 family [Arabidopsis
  misc_feature (23)..(589): Homolog of NCBI NO: 22326587 NR Description: exocyst subunit EXO70 family [Arabidopsis
  misc_feature (155)..(601): Homolog of NCBI NO: 15218495 NR Description: exocyst subunit EXO70 family [Arabidopsis
  misc_feature (27)..(590): Homolog of NCBI NO: 15222266 NR Description: exocyst subunit EXO70 family [Arabidopsis
  misc_feature (170)..(600): Homolog of NCBI NO: 38346639 NR Description: OSJNBa0072D21.9 [Oryza sativa (japonica
MEEHKDSTEEKGEDGYFQIPQFVGKFLDLFEEKLSKYDSGEPKTVWYQDPEEVSSLLEAVDRVSKLMGLLLNTKSCLDHHESLINHAGSIQQRAMAFLEDEFRIILEESVTKESVVVTDDSNSQRRSTADQQDHQNDVVVSQDHDQMLVPECGDQEIEYPGYPEDVVVVLRKIAEKMKAGGYGWECREVYLVGRRNILMRTLKQDCEFEKVSIDEVQKMSWDTLEREIPIWNKTFKDCSSLFFPGELKLAERIFPGDEGNLFCIVTHGLAIQFLGFAEAVAMTRRSTEKLFKILDIYETLRDSFPAMEELFPEELRSELRNEVTSARSRLGETAIHIFCDLEHSIKSDSSKTPVPGGAVHPLTRYTMNYLKYSCEYKDTLEQVFKSHSKMEREEEEPVESGNSAFASQLMRIMELLDGNLETKSKQYKDIPLSCIFMMNNGRYIVQKIKGSAEIHEVMGDTWCRRRSSELRNYHKNYQRETWGKLLGFLGHEGLMHNGKIVKPNLKERFKSFNATFDEIHKTQTTWVVNDEQLQSELRVSITAVMIPAYRAFMARFGQYLDPGRQTEKYVKYQPEDIEDLIDQLFEGNTSSSSTATARRRT

SEQ ID NO: 101114 - protein, 535 aa, Arabidopsis thaliana
  peptide (1)..(535): Ceres Seq. ID no. 13606986
  misc_feature (1)..(534): Homolog of NCBI NO: 15240035 NR Description: exocyst subunit EXO70 family [Arabidopsis >gi|9955559|emb|CAC05443.1| putative protein [Arabidopsis
  misc_feature (1)..(525): Homolog of NCBI NO: 100226 NR Description: tomato leucine zipper-containing protein - tomato protein of unknown function [Lycopersicon esculentum]
  misc_feature (1)..(524): Homolog of NCBI NO: 15237198 NR Description: leucine zipper-containing protein [Arabidopsis >gi|10177020|dbj|BAB10258.1| leucine zipper protein [Arabidopsis >gi|20453216|gb|AAM19847.1| AT5g58430/mqj2_20 [Arabidopsis
  misc_feature (97)..(524): Homolog of NCBI NO: 23270388 NR Description: unknown protein [Arabidopsis thaliana]
  misc_feature (97)..(524): Homolog of NCBI NO: 30682979 NR Description: exocyst subunit EXO70 family [Arabidopsis >gi|9294634|dbj|BAB02973.1| gb|AAD25781.1~gene_id:MAG2.5~strong
  misc_feature (97)..(525): Homolog of NCBI NO: 15221040 NR Description: exocyst subunit EXO70 family [Arabidopsis
  misc_feature (1)..(523): Homolog of NCBI NO: 22326587 NR Description: exocyst subunit EXO70 family [Arabidopsis
  misc_feature (89)..(535): Homolog of NCBI NO: 15218495 NR Description: exocyst subunit EXO70 family [Arabidopsis
  misc_feature (1)..(524): Homolog of NCBI NO: 15222266 NR Description: exocyst subunit EXO70 family [Arabidopsis
  misc_feature (104)..(534): Homolog of NCBI NO: 38346639 NR Description: OSJNBa0072D21.9 [Oryza sativa (japonica
MGLLLNTKSCLDHHESLINHAGSIQQRAMAFLEDEFRIILEESVTKESVVVTDDSNSQRRSTADQQDHQNDVVVSQDHDQMLVPECGDQEIEYPGYPEDVVVVLRKIAEKMKAGGYGWECREVYLVGRRNILMRTLKQDCEFEKVSIDEVQKMSWDTLEREIPIWNKTFKDCSSLFFPGELKLAERIFPGDEGNLFCIVTHGLAIQFLGFAEAVAMTRRSTEKLFKILDIYETLRDSFPAMEELFPEELRSELRNEVTSARSRLGETAIHIFCDLEHSIKSDSSKTPVPGGAVHPLTRYTMNYLKYSCEYKDTLEQVFKSHSKMEREEEEPVESGNSAFASQLMRIMELLDGNLETKSKQYKDIPLSCIFMMNNGRYIVQKIKGSAEIHEVMGDTWCRRRSSELRNYHKNYQRETWGKLLGFLGHEGLMHNGKIVKPNLKERFKSFNATFDEIHKTQTTWVVNDEQLQSELRVSITAVMIPAYRAFMARFGQYLDPGRQTEKYVKYQPEDIEDLIDQLFEGNTSSSSTATARRRT

SEQ ID NO: 101115 - DNA, 1793 bp, Arabidopsis thaliana
  misc_feature (1)..(1793): Ceres Seq. ID no. 13606995
  misc_feature: MA Experiment ID: 20000264 Result: Up-regulated in Transcription
  misc_feature: MA Experiment 20000264 PARAMETER Experiment Name: At_Open_Flower_P Parameter: Age (day) Value: 21
  misc_feature: MA Experiment 20000264 PARAMETER Experiment Name: At_Open_Flower_P Parameter: Plant Line Value: WS
  misc_feature: MA Experiment 20000264 PARAMETER Experiment Name: At_Open_Flower_P Parameter: Tissue Value: Open Flower vs. Whole Plant
  misc_feature: MA Experiment ID: 20000286 Result: Up-regulated in Transcription
  misc_feature: MA Experiment 20000286 PARAMETER Experiment Name: At_Open_Flower_P Parameter: Age (day) Value: 21
  misc_feature: MA Experiment 20000286 PARAMETER Experiment Name: At_Open_Flower_P Parameter: Plant Line Value: WS
  misc_feature: MA Experiment 20000286 PARAMETER Experiment Name: At_Open_Flower_P Parameter: Tissue Value: Half Open vs. Whole Plant
  misc_feature: MA Experiment ID: 20000443 Result: Down-regulated in Transcription
  misc_feature: MA Experiment 20000443 PARAMETER Experiment Name: At_1uM_BR-BRZ__P Parameter: Tissue Value: Shoot Apices
  misc_feature: MA Experiment 20000443 PARAMETER Experiment Name: At_1uM_BR-BRZ__P Parameter: Treatment Value: 1uM BRZ vs. No Treatment
atggggagtgaagtcaaccgtccactagctgattttccagcaaatatctgggaagatccattaacttctttctcaaagtctgacctcggaactgagacgttcaaagagaagcatagtacgctaaaggaggcggtgaaggaagcttttatgtcttccaaagcgaatccgatagagaacatcaaattcatcgatgctctatgtcgccttggtgtctcctatcactttgagaaagatatcgtagaacaattggataagtcatttgattgtcttgattttcctcagatggtaagacaagagggatgcgatttgtacacggttggaataattttccaagttttcaggcaattcggctttaaactttctgccgatgtgtttgagaagttcaaggacgaaaatgggaagttcaaaggacacttggtgacagatgcatacgggatgttaagtttgtacgaagctgcacaatggggcactcacggagaagacattattgacgaagctctcgctttctcacgttctcatttagaagaaatttcgtctcggtctagccctcatctcgcaattcgcatcaagaatgctctaaaacatccataccataaaggcatctctaggatagaaacaagacaatatatctcatactacgaggaggaagagtcgtgcgacccaacattacttgagttcgcaaagatagattttaatttgctgcaaatattacaccgcgaagagcttgcttgcgtcacaaggtggcaccatgaaatggagtttaaatctaaagtaacatacacaaggcataggataacagaggcatacttgtggtcacttggaacatatttcgagcctcaatattctcaagcacgagttataaccactatggcactaatcttattcacagcgcttgatgatatgtatgatgcatatggcacaatggaggaacttgagcttttcactgatgcaatggatgagtatagcatttgtaacataataccgatacccgatagcatgaagttcatttacaatgtgacggtagaattctatgataaactcgacgaggaacttgagaaagaaggaaggtcagggtgcggtttccatcttaagaaatcattgcaaaaaacagcaaatggatatatgcaagaagcaaaatggttgaaaaaggattacattgctacatttgatgagtataaagagaatgcaatcttgtcttcaggttattatgccttgatagcgatgacattcgtgagaatgacagatgtcgcaaaacttgatgcttttgaatggttaagctcacatcctaaaattagggtagcttctgagataataagtcgattcacagatgacatttcaagctacgaatttgaacacaaacgggagcatgtagcgactggcattgattgttatatgcagcaatttggtgtttccaaggaaagagctgtggaagtgatgggaaacattgtttcagatgcatggaaggacttgaaccaagagctaatgaggcctcacgtgtttcctttccctcttttgatgcgagttcttaacctttcgcgagtcatcgatgtattctataggtaccaagatgcttacaccaaccccaagctcttgaaggagcacattgtttctttgctcattgaaactatacccatttgagaatgactatcccaatccatggaattgattcacttcaatgatggttggatagttattttatttatgttgtatgtttatttgtattctggtagttacttttttttttgtatcattgtttgtgtacttttgttggtgaatccatttgaatttgaatt

SEQ ID NO: 101116 - protein, 545 aa, Arabidopsis thaliana
  peptide (1)..(545): Ceres Seq. ID no. 13606996
  misc_feature (17)..(217): Pfam Name: Terpene synthase, N-terminal domain Pfam Description: Terpene synthase, N-terminal domain
  misc_feature (1)..(545): Homolog of NCBI NO: 15237862 NR Description: terpene synthase/cyclase family [Arabidopsis
  misc_feature (1)..(545): Homolog of NCBI NO: 29468410 NR Description: beta-caryophyllene/alpha-humulene synthase
  misc_feature (1)..(300): Homolog of NCBI NO: 9758220 NR Description: (+)-delta-cadinene synthase (d-cadinene synthase)
  misc_feature (281)..(545): Homolog of NCBI NO: 9758220 NR Description: (+)-delta-cadinene synthase (d-cadinene synthase)
  misc_feature (4)..(300): Homolog of NCBI NO: 25317606 NR Description: hypothetical protein T22H22.10 [imported] -
  misc_feature (329)..(545): Homolog of NCBI NO: 25317606 NR Description: hypothetical protein T22H22.10 [imported] -
  misc_feature (4)..(544): Homolog of NCBI NO: 33316389 NR Description: valencene synthase [Citrus sinensis]
  misc_feature (4)..(545): Homolog of NCBI NO: 5360653 NR Description: vetispiradiene synthase [Solanum tuberosum]
  misc_feature (4)..(545): Homolog of NCBI NO: 5360741 NR Description: vetispiradiene synthase [Solanum tuberosum]
  misc_feature (7)..(545): Homolog of NCBI NO: 28380030 NR Description: Casbene synthase, chloroplast precursor
MGSEVNRPLADFPANIWEDPLTSFSKSDLGTETFKEKHSTLKEAVKEAFMSSKANPIENIKFIDALCRLGVSYHFEKDIVEQLDKSFDCLDFPQMVRQEGCDLYTVGIIFQVFRQFGFKLSADVFEKFKDENGKFKGHLVTDAYGMLSLYEAAQWGTHGEDIIDEALAFSRSHLEEISSRSSPHLAIRIKNALKHPYHKGISRIETRQYISYYEEEESCDPTLLEFAKIDFNLLQILHREELACVTRWHHEMEFKSKVTYTRHRITEAYLWSLGTYFEPQYSQARVITTMALILFTALDDMYDAYGTMEELELFTDAMDEYSICNIIPIPDSMKFIYNVTVEFYDKLDEELEKEGRSGCGFHLKKSLQKTANGYMQEAKWLKKDYIATFDEYKENAILSSGYYALIAMTFVRMTDVAKLDAFEWLSSHPKIRVASEIISRFTDDISSYEFEHKREHVATGIDCYMQQFGVSKERAVEVMGNIVSDAWKDLNQELMRPHVFPFPLLMRVLNLSRVIDVFYRYQDAYTNPKLLKEHIVSLLIETIPI

SEQ ID NO: 101117 - protein, 496 aa, Arabidopsis thaliana
  peptide (1)..(496): Ceres Seq. ID no. 13606997
  misc_feature (1)..(168): Pfam Name: Terpene synthase, N-terminal domain Pfam Description: Terpene synthase, N-terminal domain
  misc_feature (1)..(496): Homolog of NCBI NO: 15237862 NR Description: terpene synthase/cyclase family [Arabidopsis
  misc_feature (1)..(496): Homolog of NCBI NO: 29468410 NR Description: beta-caryophyllene/alpha-humulene synthase
  misc_feature (1)..(251): Homolog of NCBI NO: 9758220 NR Description: (+)-delta-cadinene synthase (d-cadinene synthase)
  misc_feature (232)..(496): Homolog of NCBI NO: 9758220 NR Description: (+)-delta-cadinene synthase (d-cadinene synthase)
  misc_feature (1)..(251): Homolog of NCBI NO: 25317606 NR Description: hypothetical protein T22H22.10 [imported] -
  misc_feature (280)..(496): Homolog of NCBI NO: 25317606 NR Description: hypothetical protein T22H22.10 [imported] -
  misc_feature (1)..(495): Homolog of NCBI NO: 33316389 NR Description: valencene synthase [Citrus sinensis]
  misc_feature (1)..(496): Homolog of NCBI NO: 5360653 NR Description: vetispiradiene synthase [Solanum tuberosum]
  misc_feature (1)..(496): Homolog of NCBI NO: 5360741 NR Description: vetispiradiene synthase [Solanum tuberosum]
  misc_feature (1)..(496): Homolog of NCBI NO: 28380030 NR Description: Casbene synthase, chloroplast precursor
MSSKANPIENIKFIDALCRLGVSYHFEKDIVEQLDKSFDCLDFPQMVRQEGCDLYTVGIIFQVFRQFGFKLSADVFEKFKDENGKFKGHLVTDAYGMLSLYEAAQWGTHGEDIIDEALAFSRSHLEEISSRSSPHLAIRIKNALKHPYHKGISRIETRQYISYYEEEESCDPTLLEFAKIDFNLLQILHREELACVTRWHHEMEFKSKVTYTRHRITEAYLWSLGTYFEPQYSQARVITTMALILFTALDDMYDAYGTMEELELFTDAMDEYSICNIIPIPDSMKFIYNVTVEFYDKLDEELEKEGRSGCGFHLKKSLQKTANGYMQEAKWLKKDYIATFDEYKENAILSSGYYALIAMTFVRMTDVAKLDAFEWLSSHPKIRVASEIISRFTDDISSYEFEHKREHVATGIDCYMQQFGVSKERAVEVMGNIVSDAWKDLNQELMRPHVFPFPLLMRVLNLSRVIDVFYRYQDAYTNPKLLKEHIVSLLIETIPI

SEQ ID NO: 101118 - protein, 451 aa, Arabidopsis thaliana
  peptide (1)..(451): Ceres Seq. ID no. 13606998
  misc_feature (1)..(123): Pfam Name: Terpene synthase, N-terminal domain Pfam Description: Terpene synthase, N-terminal domain
  misc_feature (1)..(451): Homolog of NCBI NO: 15237862 NR Description: terpene synthase/cyclase family [Arabidopsis
  misc_feature (1)..(451): Homolog of NCBI NO: 29468410 NR Description: beta-caryophyllene/alpha-humulene synthase
  misc_feature (1)..(206): Homolog of NCBI NO: 9758220 NR Description: (+)-delta-cadinene synthase (d-cadinene synthase)
  misc_feature (187)..(451): Homolog of NCBI NO: 9758220 NR Description: (+)-delta-cadinene synthase (d-cadinene synthase)
  misc_feature (1)..(206): Homolog of NCBI NO: 25317606 NR Description: hypothetical protein T22H22.10 [imported] -
  misc_feature (235)..(451): Homolog of NCBI NO: 25317606 NR Description: hypothetical protein T22H22.10 [imported] -
  misc_feature (1)..(450): Homolog of NCBI NO: 33316389 NR Description: valencene synthase [Citrus sinensis]
  misc_feature (1)..(451): Homolog of NCBI NO: 5360653 NR Description: vetispiradiene synthase [Solanum tuberosum]
  misc_feature (1)..(451): Homolog of NCBI NO: 5360741 NR Description: vetispiradiene synthase [Solanum tuberosum]
  misc_feature (1)..(451): Homolog of NCBI NO: 28380030 NR Description: Casbene synthase, chloroplast precursor
MVRQEGCDLYTVGIIFQVFRQFGFKLSADVFEKFKDENGKFKGHLVTDAYGMLSLYEAAQWGTHGEDIIDEALAFSRSHLEEISSRSSPHLAIRIKNALKHPYHKGISRIETRQYISYYEEEESCDPTLLEFAKIDFNLLQILHREELACVTRWHHEMEFKSKVTYTRHRITEAYLWSLGTYFEPQYSQARVITTMALILFTALDDMYDAYGTMEELELFTDAMDEYSICNIIPIPDSMKFIYNVTVEFYDKLDEELEKEGRSGCGFHLKKSLQKTANGYMQEAKWLKKDYIATFDEYKENAILSSGYYALIAMTFVRMTDVAKLDAFEWLSSHPKIRVASEIISRFTDDISSYEFEHKREHVATGIDCYMQQFGVSKERAVEVMGNIVSDAWKDLNQELMRPHVFPFPLLMRVLNLSRVIDVFYRYQDAYTNPKLLKEHIVSLLIETIPI

SEQ ID NO: 101119 - DNA, 1223 bp, Arabidopsis thaliana
  misc_feature (1)..(1223): Ceres Seq. ID no. 13606999
  misc_feature: MA Experiment ID: 20000179 Result: Up-regulated in Transcription
  misc_feature: MA Experiment 20000179 PARAMETER Experiment Name: At_Germinating_Seeds_P Parameter: Age (hr) Value: 6 vs. 0
  misc_feature: MA Experiment 20000179 PARAMETER Experiment Name: At_Germinating_Seeds_P Parameter: Tissue Value: Germinating Seeds
agtccctctctaaacgcataatcttacaataaaatggtgaaactcgcgacggcgcgtgagattagaacgtacggccctcggcttgggaggagcagagccgagtacatcaacgcaggtctatacttgtttgcaaccgtggtgctcatcggcggtttcacagcgacaggattctcatgggaaccaagatccggcctcgtccttattctcttagctctcgttcttataaccgccgtgaatgttcatgatcttgtggctcatctagctggaatcgattaccggttaaggttaatggagtatgatttgcaactggggctagtggaatttgcagtccctctggttcagatagcgggttcggtagtgtttttcttgggaatctttttcgtcttccatcaggctgagacaaaacgtggatacagtggaagagagcatcatgcattaaacttgctgatagcgggtccgttactttggttgataggatcgattcacaactcatgccaaatctacgagagagcggatagtcatgttcaaattctacagcagtgtgtttacattcctttcttggttggatcccttctattcttggtttccgcagttctcaatagcctcgacatatccgggtcatctcgtagtggattgaagcttcttggggaaagatggatttggcttgggatttccggggctatatgtttgtttgtgggaggattgctgaacgttgttaaggtttttaacttcgtccagatctctgggctccgcctcgagaaactacggggtggagctcaagaccgacttcttgaagggagagaaggatatctccctcttgttgctgaagaagaaagaataaggaaaatggaagctgatcacgaagcttctagtagagccaaaccccgggcacacacaacctccaaagccggagagggagctacagagaccgtggtggtatcatctccgacaccatacaaggatgttctcgttggacagatctgaggaagattagtcatgtttaaatgttcttttgtactccatatttgtttttagctgcggagaccacatattttgccgttcaacatatgttatgtgattcgtttcctttttggtcagtctttatgaatattgaaataggttacaatacatcaagactttagaagaagatttgtacactagaagaatattgatcttctttatgaataatgaaatagggtctttatacctatttctatttgacc

SEQ ID NO: 101120 - protein, 316 aa, Arabidopsis thaliana
  peptide (1)..(316): Ceres Seq. ID no. 13607000
  misc_feature (1)..(316): Homolog of NCBI NO: 15237898 NR Description: expressed protein [Arabidopsis thaliana] gene_id:MLE8.5~unknown protein [Arabidopsis thaliana] unknown protein [Arabidopsis thaliana]
MVKLATAREIRTYGPRLGRSRAEYINAGLYLFATVVLIGGFTATGFSWEPRSGLVLILLALVLITAVNVHDLVAHLAGIDYRLRLMEYDLQLGLVEFAVPLVQIAGSVVFFLGIFFVFHQAETKRGYSGREHHALNLLIAGPLLWLIGSIHNSCQIYERADSHVQILQQCVYIPFLVGSLLFLVSAVLNSLDISGSSRSGLKLLGERWIWLGISGAICLFVGGLLNVVKVFNFVQISGLRLEKLRGGAQDRLLEGREGYLPLVAEEERIRKMEADHEASSRAKPRAHTTSKAGEGATETVVVSSPTPYKDVLVGQI

SEQ ID NO: 101121 - protein, 231 aa, Arabidopsis thaliana
  peptide (1)..(231): Ceres Seq. ID no. 13607001
  misc_feature (1)..(231): Homolog of NCBI NO: 15237898 NR Description: expressed protein [Arabidopsis thaliana] gene_id:MLE8.5~unknown protein [Arabidopsis thaliana] unknown protein [Arabidopsis thaliana]
MEYDLQLGLVEFAVPLVQIAGSVVFFLGIFFVFHQAETKRGYSGREHHALNLLIAGPLLWLIGSIHNSCQIYERADSHVQILQQCVYIPFLVGSLLFLVSAVLNSLDISGSSRSGLKLLGERWIWLGISGAICLFVGGLLNVVKVFNFVQISGLRLEKLRGGAQDRLLEGREGYLPLVAEEERIRKMEADHEASSRAKPRAHTTSKAGEGATETVVVSSPTPYKDVLVGQI

SEQ ID NO: 101122 - DNA, 1288 bp, Arabidopsis thaliana
  misc_feature (1)..(1288): Ceres Seq. ID no. 13607002
  misc_feature: MA Experiment ID: 20000184 Result: Down-regulated in Transcription
  misc_feature: MA Experiment 20000184 PARAMETER Experiment Name: At_Shoots__P Parameter: Age (day) Value: 7
  misc_feature: MA Experiment 20000184 PARAMETER Experiment Name: At_Shoots__P Parameter: Tissue Value: Shoots vs. Whole Plant
  misc_feature: MA Experiment ID: 20000794 Result: Down-regulated in Transcription
  misc_feature: MA Experiment 20000794 PARAMETER Experiment Name: At_Petals_P Parameter: Age (day) Value: 23-25 days
  misc_feature: MA Experiment 20000794 PARAMETER Experiment Name: At_Petals_P Parameter: Plant Line Value: WS
  misc_feature: MA Experiment 20000794 PARAMETER Experiment Name: At_Petals_P Parameter: Tissue Value: Petals vs. Whole plant
atgggtggtgagagtaatgaaggaggagagatgggctttaagcatggagatgatgagagtggtgggatctctagagttggaattacatcaatgcccttgtatgcaaaggcagatcctttcttctcttctgcagattgggatccagttgtcaatgctgctgctgctggcttctccagctctcattaccatccttccatggcgatggataatccagggatgagttgcttctctcattaccaacccggttctgtttccggttttgcagcagacatgcctgctagtcttcttccgtttggtgattgtggtggtggtcaaattggtcattttcttggttcagacaagaaaggggaaagattgatcagagctggagaatcatctcatgaggatcatcatcaggtttcagatgatgctgttcttggtgcttccccagttgggaaaagaaggctacctgaagccgaatcacaatggaacaagaaagctgtggaggaatttcaagaagaccctcaaaggggaaatgatcagagccagaagaagcataaaaatgatcagagtaaagagacggtgaacaaggagagctcacaaagtgaagaagcaccgaaagaaaactacattcatatgagggcaagaagaggtcaagccactaatagtcacagtcttgcagagcgggttagaagagaaaagatcagtgaaaggatgagattgcttcaagaacttgttcccggatgcaacaagatcaccggaaaagcggttatgctcgatgaaataatcaactatgttcagtcattgcaacagcaagttgagtttttgtctatgaaacttgcgacggtgaatccagagatcaatattgatatagacaggattctcgccaaagatcttctgcagtcaagagacagaaacactcctacactcgggctgaatccttttgccggttttcaagggaacataccaaacctttctgccaccacaaatccacaatacaacccactacctcagacaacactagagagtgaactacaaaacctttaccagatgggattcgtctcaaatccatcgactatgtccagtttctcacctaatggtcgattgaagcctgagctctagtacttcaaggacacggaaaatttgcagggagtttgtatagaagatggctttggttctaagtatcatatgtgttcgttcttccatattatttgttctaagcacaaggatttggattctcagttgttgttgtttttgcttttcctcaacgaagaatacatttattatatatggaaatcagatttatctc

SEQ ID NO: 101123 - protein, 366 aa, Arabidopsis thaliana; identical to SEQ ID NO: 100890
  peptide (1)..(366): Ceres Seq. ID no. 13607003
  misc_feature (213)..(263): Pfam Name: Helix-loop-helix DNA-binding domain Pfam Description: Helix-loop-helix DNA-binding domain
  misc_feature (1)..(366): Homolog of NCBI NO: 30681559 NR Description: expressed protein [Arabidopsis thaliana]
  misc_feature (1)..(257): Homolog of NCBI NO: 7487488 NR Description: hypothetical protein T27I1.15 - Arabidopsis >gi|3540186|gb|AAC34336.1| Hypothetical protein [Arabidopsis
  misc_feature (48)..(360): Homolog of NCBI NO: 7487488 NR Description: hypothetical protein T27I1.15 - Arabidopsis >gi|3540186|gb|AAC34336.1| Hypothetical protein [Arabidopsis
  misc_feature (145)..(341): Homolog of NCBI NO: 20127044 NR Description: putative bHLH transcription factor [Arabidopsis
  misc_feature (146)..(341): Homolog of NCBI NO: 30697769 NR Description: DNA-binding protein -related [Arabidopsis
  misc_feature (145)..(341): Homolog of NCBI NO: 15221563 NR Description: DNA-binding protein -related [Arabidopsis
  misc_feature (113)..(307): Homolog of NCBI NO: 28273388 NR Description: putative Helix-loop-helix DNA-binding domain
  misc_feature (102)..(296): Homolog of NCBI NO: 34898690 NR Description: hypothetical protein [Oryza sativa (japonica group)] >gi|11862964|dbj|BAB19345.1| hypothetical protein [Oryza
  misc_feature (173)..(349): Homolog of NCBI NO: 15222679 NR Description: bHLH protein [Arabidopsis thaliana]
  misc_feature (102)..(295): Homolog of NCBI NO: 34906952 NR Description: DNA-binding protein-like protein [Oryza sativa

SEQ ID NO: 101124 - protein, 356 aa, Arabidopsis thaliana; identical to SEQ ID NO: 100891
  peptide (1)..(356): Ceres Seq. ID no. 13607004
  misc_feature (203)..(253): Pfam Name: Helix-loop-helix DNA-binding domain Pfam Description: Helix-loop-helix DNA-binding domain
  misc_feature (1)..(356): Homolog of NCBI NO: 30681559 NR Description: expressed protein [Arabidopsis thaliana]
  misc_feature (1)..(247): Homolog of NCBI NO: 7487488 NR Description: hypothetical protein T27I1.15 - Arabidopsis >gi|3540186|gb|AAC34336.1| Hypothetical protein [Arabidopsis
  misc_feature (38)..(350): Homolog of NCBI NO: 7487488 NR Description: hypothetical protein T27I1.15 - Arabidopsis >gi|3540186|gb|AAC34336.1| Hypothetical protein [Arabidopsis
  misc_feature (135)..(331): Homolog of NCBI NO: 20127044 NR Description: putative bHLH transcription factor [Arabidopsis
  misc_feature (136)..(331): Homolog of NCBI NO: 30697769 NR Description: DNA-binding protein -related [Arabidopsis
  misc_feature (135)..(331): Homolog of NCBI NO: 15221563 NR Description: DNA-binding protein -related [Arabidopsis
  misc_feature (103)..(297): Homolog of NCBI NO: 28273388 NR Description: putative Helix-loop-helix DNA-binding domain
  misc_feature (92)..(286): Homolog of NCBI NO: 34898690 NR Description: hypothetical protein [Oryza sativa (japonica group)] >gi|11862964|dbj|BAB19345.1| hypothetical protein [Oryza
  misc_feature (163)..(339): Homolog of NCBI NO: 15222679 NR Description: bHLH protein [Arabidopsis thaliana]
  misc_feature (92)..(285): Homolog of NCBI NO: 34906952 NR Description: DNA-binding protein-like protein [Oryza sativa

SEQ ID NO: 101125 - protein, 336 aa, Arabidopsis thaliana; identical to SEQ ID NO: 100892
  peptide (1)..(336): Ceres Seq. ID no. 13607005
  misc_feature (183)..(233): Pfam Name: Helix-loop-helix DNA-binding domain Pfam Description: Helix-loop-helix DNA-binding domain
  misc_feature (1)..(336): Homolog of NCBI NO: 30681559 NR Description: expressed protein [Arabidopsis thaliana]
  misc_feature (1)..(227): Homolog of NCBI NO: 7487488 NR Description: hypothetical protein T27I1.15 - Arabidopsis >gi|3540186|gb|AAC34336.1| Hypothetical protein [Arabidopsis
  misc_feature (18)..(330): Homolog of NCBI NO: 7487488 NR Description: hypothetical protein T27I1.15 - Arabidopsis >gi|3540186|gb|AAC34336.1| Hypothetical protein [Arabidopsis
  misc_feature (115)..(311): Homolog of NCBI NO: 20127044 NR Description: putative bHLH transcription factor [Arabidopsis
  misc_feature (116)..(311): Homolog of NCBI NO: 30697769 NR Description: DNA-binding protein -related [Arabidopsis
  misc_feature (115)..(311): Homolog of NCBI NO: 15221563 NR Description: DNA-binding protein -related [Arabidopsis
  misc_feature (83)..(277): Homolog of NCBI NO: 28273388 NR Description: putative Helix-loop-helix DNA-binding domain
  misc_feature (72)..(266): Homolog of NCBI NO: 34898690 NR Description: hypothetical protein [Oryza sativa (japonica group)] >gi|11862964|dbj|BAB19345.1| hypothetical protein [Oryza
  misc_feature (143)..(319): Homolog of NCBI NO: 15222679 NR Description: bHLH protein [Arabidopsis thaliana]
  misc_feature (72)..(265): Homolog of NCBI NO: 34906952 NR Description: DNA-binding protein-like protein [Oryza sativa

SEQ ID NO: 101126 - DNA, 1060 bp, Arabidopsis thaliana
  misc_feature (1)..(1060): Ceres Seq. ID no. 13607014
  misc_feature: MA Experiment ID: 20000185 Result: Up-regulated in Transcription
  misc_feature: MA Experiment 20000185 PARAMETER Experiment Name: At_Roots__P Parameter: Age (day) Value: 7 vs. 21
  misc_feature: MA Experiment 20000185 PARAMETER Experiment Name: At_Roots__P Parameter: Organism Value: A. thaliana
  misc_feature: MA Experiment 20000185 PARAMETER Experiment Name: At_Roots__P Parameter: Tissue Value: Roots vs. Whole Plant
  misc_feature: MA Experiment ID: 20000234 Result: Up-regulated in Transcription
  misc_feature: MA Experiment 20000234 PARAMETER Experiment Name: At_Siliques_P Parameter: Age (day) Value: 21
  misc_feature: MA Experiment 20000234 PARAMETER Experiment Name: At_Siliques_P Parameter: Organism Value: A. thaliana
  misc_feature: MA Experiment 20000234 PARAMETER Experiment Name: At_Siliques_P Parameter: Plant Line Value: WS
  misc_feature: MA Experiment 20000234 PARAMETER Experiment Name: At_Siliques_P Parameter: Tissue Value: Less Than 5mm Siliques vs. Whole Plant
  misc_feature: MA Experiment ID: 20000235 Result: Up-regulated in Transcription
  misc_feature: MA Experiment 20000235 PARAMETER Experiment Name: At_Siliques_P Parameter: Age (day) Value: 21
  misc_feature: MA Experiment 20000235 PARAMETER Experiment Name: At_Siliques_P Parameter: Organism Value: A. thaliana
  misc_feature: MA Experiment 20000235 PARAMETER Experiment Name: At_Siliques_P Parameter: Plant Line Value: WS
  misc_feature: MA Experiment 20000235 PARAMETER Experiment Name: At_Siliques_P Parameter: Tissue Value: 5-10mm Siliques vs. Whole Plant
  misc_feature: MA Experiment ID: 20000438 Result: Down-regulated in Transcription
  misc_feature: MA Experiment 20000438 PARAMETER Experiment Name: At_Shoots__P Parameter: Age (day) Value: 14
  misc_feature: MA Experiment 20000438 PARAMETER Experiment Name: At_Shoots__P Parameter: Tissue Value: Shoots vs. Whole Plant
  misc_feature: MA Experiment ID: 20000439 Result: Up-regulated in Transcription
  misc_feature: MA Experiment 20000439 PARAMETER Experiment Name: At_Roots__P Parameter: Age (day) Value: 14 vs. 21
  misc_feature: MA Experiment 20000439 PARAMETER Experiment Name: At_Roots__P Parameter: Organism Value: A. thaliana
  misc_feature: MA Experiment 20000439 PARAMETER Experiment Name: At_Roots__P Parameter: Tissue Value: Roots vs. Whole Plant
  misc_feature: MA Experiment ID: 20000453 Result: Up-regulated in Transcription
  misc_feature: MA Experiment 20000453 PARAMETER Experiment Name: At_100uM_ABA_P Parameter: Age (day) Value: 15
  misc_feature: MA Experiment 20000453 PARAMETER Experiment Name: At_100uM_ABA_P Parameter: Organism Value: A. thaliana
  misc_feature: MA Experiment 20000453 PARAMETER Experiment Name: At_100uM_ABA_P Parameter: Plant Line Value: WS
  misc_feature: MA Experiment 20000453 PARAMETER Experiment Name: At_100uM_ABA_P Parameter: Timepoint (hr) Value: 24
  misc_feature: MA Experiment 20000453 PARAMETER Experiment Name: At_100uM_ABA_P Parameter: Tissue Value: Aerial
  misc_feature: MA Experiment 20000453 PARAMETER Experiment Name: At_100uM_ABA_P Parameter: Treatment Value: 100uM ABA vs. No Treatment
  misc_feature: MA Experiment ID: 20001555 Result: Up-regulated in Transcription
  misc_feature: MA Experiment 20001555 PARAMETER Experiment Name: At_Drought_Soil_Dry_P Parameter: Age (day) Value: 24
  misc_feature: MA Experiment 20001555 PARAMETER Experiment Name: At_Drought_Soil_Dry_P Parameter: Organism Value: A. thaliana
  misc_feature: MA Experiment 20001555 PARAMETER Experiment Name: At_Drought_Soil_Dry_P Parameter: Plant Line Value: WS
  misc_feature: MA Experiment 20001555 PARAMETER Experiment Name: At_Drought_Soil_Dry_P Parameter: Post Timepoint (hr) Value: None
  misc_feature: MA Experiment 20001555 PARAMETER Experiment Name: At_Drought_Soil_Dry_P Parameter: Post-Treatment Value: None
  misc_feature: MA Experiment 20001555 PARAMETER Experiment Name: At_Drought_Soil_Dry_P Parameter: Timepoint (day) Value: 10
  misc_feature: MA Experiment 20001555 PARAMETER Experiment Name: At_Drought_Soil_Dry_P Parameter: Treatment Value: Drought vs. No Drought
  misc_feature: MA Experiment ID: 20001757 Result: Down-regulated in Transcription
  misc_feature: MA Experiment 20001757 PARAMETER Experiment Name: At_50mM_NH4NO3_L-to-H_P Parameter: Timepoint (hr) Value: 6
  misc_feature: MA Experiment 20001757 PARAMETER Experiment Name: At_50mM_NH4NO3_L-to-H_P Parameter: Tissue Value: Leaf
  misc_feature: MA Experiment 20001757 PARAMETER Experiment Name: At_50mM_NH4NO3_L-to-H_P Parameter: Treatment Value: 50mM NH4NO3 vs 100mM Mannitol
  misc_feature: MA Experiment ID: 20001905 Result: Up-regulated in Transcription
  misc_feature: MA Experiment 20001905 PARAMETER Experiment Name: At_Drought_Reproduction_P Parameter: Age (day) Value: 40
  misc_feature: MA Experiment 20001905 PARAMETER Experiment Name: At_Drought_Reproduction_P Parameter: Organism Value: A. thaliana
  misc_feature: MA Experiment 20001905 PARAMETER Experiment Name: At_Drought_Reproduction_P Parameter: Plant Line Value: WS
  misc_feature: MA Experiment 20001905 PARAMETER Experiment Name: At_Drought_Reproduction_P Parameter: Timepoint (day) Value: 10
  misc_feature: MA Experiment 20001905 PARAMETER Experiment Name: At_Drought_Reproduction_P Parameter: Tissue Value: Rosettes
  misc_feature: MA Experiment 20001905 PARAMETER Experiment Name: At_Drought_Reproduction_P Parameter: Treatment Value: Drought vs. No Drought
atggattccgaaatcgcattcgactattctccgaggtttcgtatattcaagaacggtggcatcgaacgcctcgtacccgaaacattcgtcccaccgtcactaaatcccgaaaacggcgtcgtatctaaagatgccgtctattcaccggagaaaaacctctctctccgcatttacctccctcaaaattccgtctatgaaaccggcgagaagaaaatcccactactcgtctactttcatggcggaggattcatcatggaaacagctttctctccaatttaccacacttttctcacatcggcagtttcagccaccgattgcatcgctgtctcagtagaataccgtcgtgcacctgagcatccgattccaaccttgtacgaagattcatgggacgcgattcaatggatcttcactcatatcacaagatctggtcctgaagattggctaaacaaacacgccgatttcagtaaagtctttctcgccggagatagcgccggagctaacatcgcgcatcacatggcgattagagtagacaaagagaaactccccccggaaaatttcaaaatatcggggatgattctgtttcatccgtatttcttgtcaaaagctttgattgaggagatggaagtggaagcgatgagatattacgaaaggctttggagaatcgcgagtcctgatagtggaaacggtgtggaggatccgtggattaatgtggtcgggtcggatctaaccggattgggttgtaggcgggttttggtgatggtggcgggaaatgatgtgttggctaggggaggttggagttacgtggcggagctggagaagagtggatggatagggaaagtgaaagtgatggagactaaggaagaaggtcacgtttttcatttgagggatcctgattctgagaatgctcgtcgagttttgcgcaattttgcagagtttcttaaagaagaaacattttaagtgacgtcgttcaaatgaaaaatgcataaaatatcggttaccatgtcaatatatactaattaaggtttgtatgtttcatcaaacactaaatcttttattttgt

SEQ ID NO: 101127 - protein, 318 aa, Arabidopsis thaliana
  peptide (1)..(318): Ceres Seq. ID no. 13607015
  misc_feature (46)..(97): Pfam Name: Carboxylesterase Pfam Description: Carboxylesterase
  misc_feature (1)..(318): Homolog of NCBI NO: 15221975 NR Description: expressed protein [Arabidopsis thaliana]
  misc_feature (1)..(315): Homolog of NCBI NO: 15227669 NR Description: expressed protein [Arabidopsis thaliana]
  misc_feature (5)..(315): Homolog of NCBI NO: 28393060 NR Description: putative esterase [Arabidopsis thaliana]
  misc_feature (1)..(314): Homolog of NCBI NO: 15228426 NR Description: expressed protein [Arabidopsis thaliana]
  misc_feature (124)..(318): Homolog of NCBI NO: 28393391 NR Description: unknown protein [Arabidopsis thaliana]
  misc_feature (1)..(314): Homolog of NCBI NO: 15228425 NR Description: expressed protein [Arabidopsis thaliana]
  misc_feature (1)..(314): Homolog of NCBI NO: 18086341 NR Description: AT3g48690/T8P19_200 [Arabidopsis thaliana]
  misc_feature (3)..(313): Homolog of NCBI NO: 18402731 NR Description: expressed protein [Arabidopsis thaliana]
  misc_feature (3)..(313): Homolog of NCBI NO: 21537287 NR Description: putative esterase [Arabidopsis thaliana]
  misc_feature (1)..(313): Homolog of NCBI NO: 15222795 NR Description: expressed protein [Arabidopsis thaliana]
MDSEIAFDYSPRFRIFKNGGIERLVPETFVPPSLNPENGVVSKDAVYSPEKNLSLRIYLPQNSVYETGEKKIPLLVYFHGGGFIMETAFSPIYHTFLTSAVSATDCIAVSVEYRRAPEHPIPTLYEDSWDAIQWIFTHITRSGPEDWLNKHADFSKVFLAGDSAGANIAHHMAIRVDKEKLPPENFKISGMILFHPYFLSKALIEEMEVEAMRYYERLWRIASPDSGNGVEDPWINVVGSDLTGLGCRRVLVMVAGNDVLARGGWSYVAELEKSGWIGKVKVMETKEEGHVFHLRDPDSENARRVLRNFAEFLKEETF

SEQ ID NO: 101128 - protein, 234 aa, Arabidopsis thaliana
  peptide (1)..(234): Ceres Seq. ID no. 13607016
  misc_feature (1)..(234): Homolog of NCBI NO: 15221975 NR Description: expressed protein [Arabidopsis thaliana]
  misc_feature (1)..(231): Homolog of NCBI NO: 15227669 NR Description: expressed protein [Arabidopsis thaliana]
  misc_feature (1)..(231): Homolog of NCBI NO: 28393060 NR Description: putative esterase [Arabidopsis thaliana]
  misc_feature (1)..(230): Homolog of NCBI NO: 15228426 NR Description: expressed protein [Arabidopsis thaliana]
  misc_feature (40)..(234): Homolog of NCBI NO: 28393391 NR Description: unknown protein [Arabidopsis thaliana]
  misc_feature (1)..(230): Homolog of NCBI NO: 15228425 NR Description: expressed protein [Arabidopsis thaliana]
  misc_feature (1)..(230): Homolog of NCBI NO: 18086341 NR Description: AT3g48690/T8P19_200 [Arabidopsis thaliana]
  misc_feature (1)..(229): Homolog of NCBI NO: 18402731 NR Description: expressed protein [Arabidopsis thaliana]
  misc_feature (1)..(229): Homolog of NCBI NO: 21537287 NR Description: putative esterase [Arabidopsis thaliana]
  misc_feature (1)..(229): Homolog of NCBI NO: 15222795 NR Description: expressed protein [Arabidopsis thaliana]
METAFSPIYHTFLTSAVSATDCIAVSVEYRRAPEHPIPTLYEDSWDAIQWIFTHITRSGPEDWLNKHADFSKVFLAGDSAGANIAHHMAIRVDKEKLPPENFKISGMILFHPYFLSKALIEEMEVEAMRYYERLWRIASPDSGNGVEDPWINVVGSDLTGLGCRRVLVMVAGNDVLARGGWSYVAELEKSGWIGKVKVMETKEEGHVFHLRDPDSENARRVLRNFAEFLKEETF

SEQ ID NO: 101129 - DNA, 1700 bp, Arabidopsis thaliana
  misc_feature (1)..(1700): Ceres Seq. ID no. 13607036
  misc_feature: MA Experiment ID: 20000180 Result: Up-regulated in Transcription
  misc_feature: MA Experiment 20000180 PARAMETER Experiment Name: At_Germinating_Seeds_P Parameter: Age (hr) Value: 24 vs. 0
  misc_feature: MA Experiment 20000180 PARAMETER Experiment Name: At_Germinating_Seeds_P Parameter: Tissue Value: Germinating Seeds
  misc_feature: MA Experiment ID: 20000184 Result: Down-regulated in Transcription
  misc_feature: MA Experiment 20000184 PARAMETER Experiment Name: At_Shoots__P Parameter: Age (day) Value: 7
  misc_feature: MA Experiment 20000184 PARAMETER Experiment Name: At_Shoots__P Parameter: Tissue Value: Shoots vs. Whole Plant
  misc_feature: MA Experiment ID: 20000437 Result: Down-regulated in Transcription
  misc_feature: MA Experiment 20000437 PARAMETER Experiment Name: At_Drought_P Parameter: Age (day) Value: 8
  misc_feature: MA Experiment 20000437 PARAMETER Experiment Name: At_Drought_P Parameter: Organism Value: A. thaliana
  misc_feature: MA Experiment 20000437 PARAMETER Experiment Name: At_Drought_P Parameter: Plant Line Value: WS
  misc_feature: MA Experiment 20000437 PARAMETER Experiment Name: At_Drought_P Parameter: Timepoint (hr) Value: 24
  misc_feature: MA Experiment 20000437 PARAMETER Experiment Name: At_Drought_P Parameter: Tissue Value: Whole Plant
  misc_feature: MA Experiment 20000437 PARAMETER Experiment Name: At_Drought_P Parameter: Treatment Value: Drought vs. No Drought
  misc_feature: MA Experiment ID: 20000438 Result: Down-regulated in Transcription
  misc_feature: MA Experiment 20000438 PARAMETER Experiment Name: At_Shoots__P Parameter: Age (day) Value: 14
  misc_feature: MA Experiment 20000438 PARAMETER Experiment Name: At_Shoots__P Parameter: Tissue Value: Shoots vs. Whole Plant
  misc_feature: MA Experiment ID: 20000453 Result: Down-regulated in Transcription
  misc_feature: MA Experiment 20000453 PARAMETER Experiment Name: At_100uM_ABA_P Parameter: Age (day) Value: 15
  misc_feature: MA Experiment 20000453 PARAMETER Experiment Name: At_100uM_ABA_P Parameter: Organism Value: A. thaliana
  misc_feature: MA Experiment 20000453 PARAMETER Experiment Name: At_100uM_ABA_P Parameter: Plant Line Value: WS
  misc_feature: MA Experiment 20000453 PARAMETER Experiment Name: At_100uM_ABA_P Parameter: Timepoint (hr) Value: 24
  misc_feature: MA Experiment 20000453 PARAMETER Experiment Name: At_100uM_ABA_P Parameter: Tissue Value: Aerial
  misc_feature: MA Experiment 20000453 PARAMETER Experiment Name: At_100uM_ABA_P Parameter: Treatment Value: 100uM ABA vs. No Treatment
  misc_feature: MA Experiment ID: 20000794 Result: Down-regulated in Transcription
  misc_feature: MA Experiment 20000794 PARAMETER Experiment Name: At_Petals_P Parameter: Age (day) Value: 23-25 days
  misc_feature: MA Experiment 20000794 PARAMETER Experiment Name: At_Petals_P Parameter: Plant Line Value: WS
  misc_feature: MA Experiment 20000794 PARAMETER Experiment Name: At_Petals_P Parameter: Tissue Value: Petals vs. Whole plant
  misc_feature: MA Experiment ID: 20001451 Result: Down-regulated in Transcription
  misc_feature: MA Experiment 20001451 PARAMETER Experiment Name: At_Far-red-induction_P Parameter: Age (day) Value: 7
  misc_feature: MA Experiment 20001451 PARAMETER Experiment Name: At_Far-red-induction_P Parameter: Light Value: Far-red vs. White
  misc_feature: MA Experiment 20001451 PARAMETER Experiment Name: At_Far-red-induction_P Parameter: Organism Value: A. thaliana
  misc_feature: MA Experiment 20001451 PARAMETER Experiment Name: At_Far-red-induction_P Parameter: Plant Line Value: Columbia
  misc_feature: MA Experiment 20001451 PARAMETER Experiment Name: At_Far-red-induction_P Parameter: Timepoint (hr) Value: 24
  misc_feature: MA Experiment 20001451 PARAMETER Experiment Name: At_Far-red-induction_P Parameter: Tissue Value: Whole Plant
  misc_feature: MA Experiment ID: 20001556 Result: Down-regulated in Transcription
  misc_feature: MA Experiment 20001556 PARAMETER Experiment Name: At_Drought_Soil_Dry_P Parameter: Age (day) Value: 26
  misc_feature: MA Experiment 20001556 PARAMETER Experiment Name: At_Drought_Soil_Dry_P Parameter: Organism Value: A. thaliana
  misc_feature: MA Experiment 20001556 PARAMETER Experiment Name: At_Drought_Soil_Dry_P Parameter: Plant Line Value: WS
  misc_feature: MA Experiment 20001556 PARAMETER Experiment Name: At_Drought_Soil_Dry_P Parameter: Post Timepoint (hr) Value: None
  misc_feature: MA Experiment 20001556 PARAMETER Experiment Name: At_Drought_Soil_Dry_P Parameter: Post-Treatment Value: None
  misc_feature: MA Experiment 20001556 PARAMETER Experiment Name: At_Drought_Soil_Dry_P Parameter: Timepoint (day) Value: 12
  misc_feature: MA Experiment 20001556 PARAMETER Experiment Name: At_Drought_Soil_Dry_P Parameter: Treatment Value: Drought vs. No Drought
  misc_feature: MA Experiment ID: 20001906 Result: Down-regulated in Transcription
  misc_feature: MA Experiment 20001906 PARAMETER Experiment Name: At_Drought_Reproduction_P Parameter: Age (day) Value: 35
  misc_feature: MA Experiment 20001906 PARAMETER Experiment Name: At_Drought_Reproduction_P Parameter: Organism Value: A. thaliana
  misc_feature: MA Experiment 20001906 PARAMETER Experiment Name: At_Drought_Reproduction_P Parameter: Plant Line Value: WS
  misc_feature: MA Experiment 20001906 PARAMETER Experiment Name: At_Drought_Reproduction_P Parameter: Timepoint (day) Value: 5
  misc_feature: MA Experiment 20001906 PARAMETER Experiment Name: At_Drought_Reproduction_P Parameter: Tissue Value: Siliques
  misc_feature: MA Experiment 20001906 PARAMETER Experiment Name: At_Drought_Reproduction_P Parameter: Treatment Value: Drought vs. No Drought
aaaaaagcatcactagtctcctcttcacttcttctcaaaccaaacaccgagaagtgacatcatgtctcctctccaatggctcacaatctcttttgctctaattatcttccactctctcacggtctcctctagtgttctgtcccactcagatcgagtcacccgtttacccggtcaaccccgggtcggatttcagcaatactccggttatgtcactgtcgacgacaagaaacagagagctctgttttactacttcgccgaggcagaaaccaatccatcctctaaacctctcgtcctctggctcaatggaggacctggatgttcatctttgggcgttggggcattctcagaaaacggaccatttagaccaaaaggaccaatcttggtcaagaatcagcatagctggaaccaagaggctaatatgttgtatctagagacacctgttggagttggattctcttattcaactcaaagctcccattatgagggtgttaatgataagatcactgcaagagacaaccttgtgttcttgcaaagatggtttctcaaattccctcattacctcaatcgaagtctcttcatcactggtgaaagttatgctggccattatgttcctcaactagctgagcttatgattcagtacaacaagaagcaccatttgttcaatctgagaggaattgctattggcaatccagttttggagtttgcgacagatttcaactcgcgagctgagtacttctggtctcatggcttgatatcggattcgacttacaaaatgttcacatcttactgtaattactcgcgctatgtgagtgagtactatagagggtcaatgtctagtatgtgctctaaggtgatgagtcaagttagcactgagacgagtcgatttgttgataaatatgatgtcactctcgatgtttgcattccctctgtgctatctcaatccaaagtagtaagccccaatcaagtgggagaatctgtggatgtttgtgtcgaagatgagacggtcaactatctaaaccgaagagatgtgcaggaagctcttcatgctcggctcataggagtacgtgaatggacagtttgcagcaatgtgcttgattaccaattgcttgatgtggaaataccaacgattaatatcgtagggagccttgttaaagctggagttccagttcttgtctacagtggagatcaagattctgtgatcccgttgacaggaagtagaaccttagtgagtagattggccaaacaattgggactgagaacaagtgtaccttatcgagtctggtttgcaggccaacaggttggaggatggactcaagtctatggaaatgtcttgtcctttgcaacagtgcgaggagcttcacacgaggtcccattctcacagcctgagagatcacttgtcctgttcaaggcgttcttggacggccatcctcttcctgaagaattctgatattgtaccatgatctcttgaccttatgtaagtataaaataatagattttggcaaaccacttatcctaagaatggcttatttaatcggcaaaaagcggaaatatttgtttttgtaaagatgtgaaccttttaggaaggaagctgtatgttcttggaatttgagtgttgtgtttactttgaagggtaaattacaacaggagcttctacttgcattgttaagcatttgaattgaagagctatgattggtttcgat

SEQ ID NO: 101130 - protein, 461 aa, Arabidopsis thaliana
  peptide (1)..(461): Ceres Seq. ID no. 13607037
  misc_feature (36)..(454): Pfam Name: Serine carboxypeptidase Pfam Description: Serine carboxypeptidase
  misc_feature (1)..(461): Homolog of NCBI NO: 18396647 NR Description: serine carboxypeptidase -related [Arabidopsis >gi|16648969|gb|AAL24336.1| serine carboxypeptidase II, putative
  misc_feature (1)..(461): Homolog of NCBI NO: 25289785 NR Description: probable serine carboxypeptidase II [imported] - thaliana >gi|12322985|gb|AAG51475.1|AC069471_6 serine
  misc_feature (1)..(461): Homolog of NCBI NO: 30685740 NR Description: serine carboxypeptidase -related [Arabidopsis >gi|18377727|gb|AAL67013.1| putative serine carboxypeptidase II
  misc_feature (1)..(461): Homolog of NCBI NO: 25289793 NR Description: probable serine carboxypeptidase II [imported] - thaliana >gi|2459435|gb|AAB80670.1| putative serine
  misc_feature (30)..(461): Homolog of NCBI NO: 38347156 NR Description: OSJNBa0039C07.2 [Oryza sativa (japonica
  misc_feature (1)..(458): Homolog of NCBI NO: 15238328 NR Description: serine carboxypeptidase -related [Arabidopsis
  misc_feature (30)..(460): Homolog of NCBI NO: 15218514 NR Description: serine carboxypeptidase -related [Arabidopsis
  misc_feature (30)..(460): Homolog of NCBI NO: 15224454 NR Description: serine carboxypeptidase -related [Arabidopsis
  misc_feature (29)..(460): Homolog of NCBI NO: 15238327 NR Description: serine carboxypeptidase -related [Arabidopsis
  misc_feature (30)..(293): Homolog of NCBI NO: 28393789 NR Description: putative serine carboxypeptidase II [Arabidopsis
MSPLQWLTISFALIIFHSLTVSSSVLSHSDRVTRLPGQPRVGFQQYSGYVTVDDKKQRALFYYFAEAETNPSSKPLVLWLNGGPGCSSLGVGAFSENGPFRPKGPILVKNQHSWNQEANMLYLETPVGVGFSYSTQSSHYEGVNDKITARDNLVFLQRWFLKFPHYLNRSLFITGESYAGHYVPQLAELMIQYNKKHHLFNLRGIAIGNPVLEFATDFNSRAEYFWSHGLISDSTYKMFTSYCNYSRYVSEYYRGSMSSMCSKVMSQVSTETSRFVDKYDVTLDVCIPSVLSQSKVVSPNQVGESVDVCVEDETVNYLNRRDVQEALHARLIGVREWTVCSNVLDYQLLDVEIPTINIVGSLVKAGVPVLVYSGDQDSVIPLTGSRTLVSRLAKQLGLRTSVPYRVWFAGQQVGGWTQVYGNVLSFATVRGASHEVPFSQPERSLVLFKAFLDGHPLPEEF

SEQ ID NO: 101131 - protein, 342 aa, Arabidopsis thaliana
  peptide (1)..(342): Ceres Seq. ID no. 13607038
  misc_feature (1)..(335): Pfam Name: Serine carboxypeptidase Pfam Description: Serine carboxypeptidase
  misc_feature (1)..(342): Homolog of NCBI NO: 18396647 NR Description: serine carboxypeptidase -related [Arabidopsis >gi|16648969|gb|AAL24336.1| serine carboxypeptidase II, putative
  misc_feature (1)..(342): Homolog of NCBI NO: 25289785 NR Description: probable serine carboxypeptidase II [imported] - thaliana >gi|12322985|gb|AAG51475.1|AC069471_6 serine
  misc_feature (1)..(342): Homolog of NCBI NO: 30685740 NR Description: serine carboxypeptidase -related [Arabidopsis >gi|18377727|gb|AAL67013.1| putative serine carboxypeptidase II
  misc_feature (1)..(342): Homolog of NCBI NO: 25289793 NR Description: probable serine carboxypeptidase II [imported] - thaliana >gi|2459435|gb|AAB80670.1| putative serine
  misc_feature (1)..(342): Homolog of NCBI NO: 38347156 NR Description: OSJNBa0039C07.2 [Oryza sativa (japonica
  misc_feature (1)..(339): Homolog of NCBI NO: 15238328 NR Description: serine carboxypeptidase -related [Arabidopsis
  misc_feature (1)..(341): Homolog of NCBI NO: 15218514 NR Description: serine carboxypeptidase -related [Arabidopsis
  misc_feature (1)..(341): Homolog of NCBI NO: 15224454 NR Description: serine carboxypeptidase -related [Arabidopsis
  misc_feature (1)..(341): Homolog of NCBI NO: 15238327 NR Description: serine carboxypeptidase -related [Arabidopsis
  misc_feature (1)..(174): Homolog of NCBI NO: 28393789 NR Description: putative serine carboxypeptidase II [Arabidopsis
MLYLETPVGVGFSYSTQSSHYEGVNDKITARDNLVFLQRWFLKFPHYLNRSLFITGESYAGHYVPQLAELMIQYNKKHHLFNLRGIAIGNPVLEFATDFNSRAEYFWSHGLISDSTYKMFTSYCNYSRYVSEYYRGSMSSMCSKVMSQVSTETSRFVDKYDVTLDVCIPSVLSQSKVVSPNQVGESVDVCVEDETVNYLNRRDVQEALHARLIGVREWTVCSNVLDYQLLDVEIPTINIVGSLVKAGVPVLVYSGDQDSVIPLTGSRTLVSRLAKQLGLRTSVPYRVWFAGQQVGGWTQVYGNVLSFATVRGASHEVPFSQPERSLVLFKAFLDGHPLPEEF

SEQ ID NO: 101132 - protein, 272 aa, Arabidopsis thaliana
  peptide (1)..(272): Ceres Seq. ID no. 13607039
  misc_feature (1)..(265): Pfam Name: Serine carboxypeptidase Pfam Description: Serine carboxypeptidase
  misc_feature (1)..(272): Homolog of NCBI NO: 18396647 NR Description: serine carboxypeptidase -related [Arabidopsis >gi|16648969|gb|AAL24336.1| serine carboxypeptidase II, putative
  misc_feature (1)..(272): Homolog of NCBI NO: 25289785 NR Description: probable serine carboxypeptidase II [imported] - thaliana >gi|12322985|gb|AAG51475.1|AC069471_6 serine
  misc_feature (1)..(272): Homolog of NCBI NO: 30685740 NR Description: serine carboxypeptidase -related [Arabidopsis >gi|18377727|gb|AAL67013.1| putative serine carboxypeptidase II
  misc_feature (1)..(272): Homolog of NCBI NO: 25289793 NR Description: probable serine carboxypeptidase II [imported] - thaliana >gi|2459435|gb|AAB80670.1| putative serine
  misc_feature (1)..(272): Homolog of NCBI NO: 38347156 NR Description: OSJNBa0039C07.2 [Oryza sativa (japonica
  misc_feature (1)..(269): Homolog of NCBI NO: 15238328 NR Description: serine carboxypeptidase -related [Arabidopsis
  misc_feature (1)..(271): Homolog of NCBI NO: 15218514 NR Description: serine carboxypeptidase -related [Arabidopsis
  misc_feature (1)..(271): Homolog of NCBI NO: 15224454 NR Description: serine carboxypeptidase -related [Arabidopsis
  misc_feature (1)..(271): Homolog of NCBI NO: 15238327 NR Description: serine carboxypeptidase -related [Arabidopsis
  misc_feature (1)..(104): Homolog of NCBI NO: 28393789 NR Description: putative serine carboxypeptidase II [Arabidopsis
MIQYNKKHHLFNLRGIAIGNPVLEFATDFNSRAEYFWSHGLISDSTYKMFTSYCNYSRYVSEYYRGSMSSMCSKVMSQVSTETSRFVDKYDVTLDVCIPSVLSQSKVVSPNQVGESVDVCVEDETVNYLNRRDVQEALHARLIGVREWTVCSNVLDYQLLDVEIPTINIVGSLVKAGVPVLVYSGDQDSVIPLTGSRTLVSRLAKQLGLRTSVPYRVWFAGQQVGGWTQVYGNVLSFATVRGASHEVPFSQPERSLVLFKAFLDGHPLPEEF

SEQ ID NO: 101133 - DNA, 2988 bp, Arabidopsis thaliana
  misc_feature (1)..(2988): Ceres Seq. ID no. 13607040
  misc_feature: MA Experiment ID: 20000173 Result: Down-regulated in Transcription
  misc_feature: MA Experiment 20000173 PARAMETER Experiment Name: At_42deg_Heat_P Parameter: Age (day) Value: 14
  misc_feature: MA Experiment 20000173 PARAMETER Experiment Name: At_42deg_Heat_P Parameter: Organism Value: A. thaliana
  misc_feature: MA Experiment 20000173 PARAMETER Experiment Name: At_42deg_Heat_P Parameter: Plant Line Value: WS
  misc_feature: MA Experiment 20000173 PARAMETER Experiment Name: At_42deg_Heat_P Parameter: Temperature (deg C) Value: 42 vs. 22
  misc_feature: MA Experiment 20000173 PARAMETER Experiment Name: At_42deg_Heat_P Parameter: Timepoint (hr) Value: 6
  misc_feature: MA Experiment 20000173 PARAMETER Experiment Name: At_42deg_Heat_P Parameter: Tissue Value: Aerial
  misc_feature: MA Experiment ID: 20001248 Result: Down-regulated in Transcription
  misc_feature: MA Experiment 20001248 PARAMETER Experiment Name: At_Far-red-induction_P Parameter: Age (day) Value: 7
  misc_feature: MA Experiment 20001248 PARAMETER Experiment Name: At_Far-red-induction_P Parameter: Light Value: Far-red vs. White
  misc_feature: MA Experiment 20001248 PARAMETER Experiment Name: At_Far-red-induction_P Parameter: Organism Value: A. thaliana
  misc_feature: MA Experiment 20001248 PARAMETER Experiment Name: At_Far-red-induction_P Parameter: Plant Line Value: Columbia
  misc_feature: MA Experiment 20001248 PARAMETER Experiment Name: At_Far-red-induction_P Parameter: Timepoint (hr) Value: 4
  misc_feature: MA Experiment 20001248 PARAMETER Experiment Name: At_Far-red-induction_P Parameter: Tissue Value: Whole Plant
  misc_feature: MA Experiment ID: 20001450 Result: Down-regulated in Transcription
  misc_feature: MA Experiment 20001450 PARAMETER Experiment Name: At_Far-red-induction_P Parameter: Age (day) Value: 7
  misc_feature: MA Experiment 20001450 PARAMETER Experiment Name: At_Far-red-induction_P Parameter: Light Value: Far-red vs. White
  misc_feature: MA Experiment 20001450 PARAMETER Experiment Name: At_Far-red-induction_P Parameter: Organism Value: A. thaliana
  misc_feature: MA Experiment 20001450 PARAMETER Experiment Name: At_Far-red-induction_P Parameter: Plant Line Value: Columbia
  misc_feature: MA Experiment 20001450 PARAMETER Experiment Name: At_Far-red-induction_P Parameter: Timepoint (hr) Value: 8
  misc_feature: MA Experiment 20001450 PARAMETER Experiment Name: At_Far-red-induction_P Parameter: Tissue Value: Whole Plant
  misc_feature: MA Experiment ID: 20001451 Result: Down-regulated in Transcription
  misc_feature: MA Experiment 20001451 PARAMETER Experiment Name: At_Far-red-induction_P Parameter: Age (day) Value: 7
  misc_feature: MA Experiment 20001451 PARAMETER Experiment Name: At_Far-red-induction_P Parameter: Light Value: Far-red vs. White
  misc_feature: MA Experiment 20001451 PARAMETER Experiment Name: At_Far-red-induction_P Parameter: Organism Value: A. thaliana
  misc_feature: MA Experiment 20001451 PARAMETER Experiment Name: At_Far-red-induction_P Parameter: Plant Line Value: Columbia
  misc_feature: MA Experiment 20001451 PARAMETER Experiment Name: At_Far-red-induction_P Parameter: Timepoint (hr) Value: 24
  misc_feature: MA Experiment 20001451 PARAMETER Experiment Name: At_Far-red-induction_P Parameter: Tissue Value: Whole Plant
  misc_feature: MA Experiment ID: 20001757 Result: Up-regulated in Transcription
  misc_feature: MA Experiment 20001757 PARAMETER Experiment Name: At_50mM_NH4NO3_L-to-H_P Parameter: Timepoint (hr) Value: 6
  misc_feature: MA Experiment 20001757 PARAMETER Experiment Name: At_50mM_NH4NO3_L-to-H_P Parameter: Tissue Value: Leaf
  misc_feature: MA Experiment 20001757 PARAMETER Experiment Name: At_50mM_NH4NO3_L-to-H_P Parameter: Treatment Value: 50mM NH4NO3 vs 100mM Mannitol
  misc_feature: MA Experiment ID: 20001905 Result: Down-regulated in Transcription
  misc_feature: MA Experiment 20001905 PARAMETER Experiment Name: At_Drought_Reproduction_P Parameter: Age (day) Value: 40
  misc_feature: MA Experiment 20001905 PARAMETER Experiment Name: At_Drought_Reproduction_P Parameter: Organism Value: A. thaliana
  misc_feature: MA Experiment 20001905 PARAMETER Experiment Name: At_Drought_Reproduction_P Parameter: Plant Line Value: WS
  misc_feature: MA Experiment 20001905 PARAMETER Experiment Name: At_Drought_Reproduction_P Parameter: Timepoint (day) Value: 10
  misc_feature: MA Experiment 20001905 PARAMETER Experiment Name: At_Drought_Reproduction_P Parameter: Tissue Value: Rosettes
  misc_feature: MA Experiment 20001905 PARAMETER Experiment Name: At_Drought_Reproduction_P Parameter: Treatment Value: Drought vs. No Drought
agtgaaatttactgaaattgccactgttttcgattttgttggttctccgatctcagtggtgtcttcttctccggtagataattctcgtgttgaaaatctccggtagtgtttgactgagttacgaatatgccggtggtttctctggctaaggttgttacttctccggcggtggccggagatttagcggttcgtgttccgttcatttatgggaaacgactagtgtcgaatcgtgtttctttcgggaaattgaggcgccggagttgtataggtcaatgcgtaagaagcgaattgcaaagtcctcgtgtcttaggttccgtcacagatttagcgttggataattctgtggagaatggtcatcttcccaaaggagattcatgggctgtacacaaatttggaggaacttgtgtgggaaattctgagaggataaaggatgttgctgctgttgttgttaaggatgactctgagaggaagttggtggttgtgtcagcaatgtcgaaagtcactgatatgatgtatgatctcattcacagagcagagtctcgtgatgattcatatctgtctgctttgagtggtgttcttgaaaagcaccgagcaactgctgttgacttgcttgatggagatgaactctcaagtttcttggctcggttaaatgatgatataaataatctcaaagcaatgcttcgtgccatttacatagctggtcatgcaaccgaatctttctcagacttcgttgttggccacggagagttgtggtctgctcagatgttagctgctgttgtgagaaagagcggattggactgcacttggatggatgcaagggatgtgcttgttgttattccaacgagctctaatcaagttgaccctgactttgtggaatcagaaaaaagactggaaaaatggtttactcagaactcggcaaagattattatagcaactggtttcatagccagtacaccacagaacattccaacgactcttaaaagggatgggagtgacttctctgcagctataatgagtgctctgtttagatctcaccaactcacaatctggacagatgttgatggtgtgtacagtgcagatcccaggaaagttagtgaagctgttgtgctgaagactctttcttatcaagaggcttgggaaatgtcttactttggggcaaacgttttacatcctcggaccattattccagtgatgaaatatgacattccaattgtaataaggaatattttcaacctctctgcccctggaacaatgatatgccggcagattgatgatgaagatggattcaaattagacgctcctgtgaaaggatttgcgacgattgacaatttggctcttgtcaatgtagaaggaactggaatggctggtgttcctggtactgccagtgccattttttctgctgtcaaggaagttggagccaatgtgattatgatatcgcaggctagtagcgagcattctgtgtgctttgctgtacctgagaaggaagtgaaagctgtttctgaagcattgaactcaagatttcgtcaagctttggctggtggccgcctttcccagattgaaatcatccctaattgtagcatattagcagcagttggccagaaaatggcgagcactcctggtgtttctgccactttttttaatgcattagcaaaggccaatatcaacatccgtgctatagcccaaggttgctccgagttcaatattacagtagtcgtcaagcgtgaagactgcatcagggcattaagagctgtgcactcaagattttacctttcgagaaccactttggcagtgggaatcataggaccgggattaattggtggaaccttacttgatcagattagagatcaggcggcagtgctcaaagaagaatttaaaattgacttgcgtgttatagggatcacgggctcaagtaaaatgttgatgagtgaatcggggattgacttatcaagatggagagagcttatgaaagaagagggagaaaaagctgacatggagaagttcacccaatatgtgaagggaaatcatttcatcccaaactctgttatggttgattgtacagccgatgctgacatcgctagctgttactacgactggttgctacgaggaattcatgtggtcactccgaacaaaaaggctaactctggaccacttgatcagtatctaaagatcagagatcttcaacgaaaatcgtacacacattacttttatgaagccaccgttggagctggtcttccaattattagcaccttacgtggtctcctcgaaacaggggataaaatactgcgaattgagggaattttcagtggtactttaagttacctcttcaacaactttgtcggcaccagaagcttcagtgaagttgtagcagaagcaaagcaagcaggtttcacagaaccagatccacgagatgatctatctggaacagatgttgccagaaaagtaacaatccttgccagagaatcaggcttaaaattggatcttgagggccttccagtccagaatcttgtgccaaagccgttacaagcttgtgcatcagcagaagagttcatggagaagcttcctcagtttgatgaagaattatccaaacaaagagaagaggctgaagcagcaggagaagtcttgagatacgtaggagttgtagatgcagtagagaaaaagggaacagtcgagttgaaacggtacaaaaaagatcatccgtttgctcagctatcgggtgctgataacatcatcgctttcacaaccaaacggtacaaagaacagcctctgattgttcgtggacctggtgctggtgctcaagtcacagccggtggaatcttcagtgacattcttcgccttgctttctatctcggggctccgtcttaaagcacactctacatgctagcatatgtattttggatttcagagattttgatttctatagatgataccaaacttcaaggtagtaaaacattctaggaaaaaattgaataaagactgttggtattatac

SEQ ID NO: 101134 - protein, 911 aa, Arabidopsis thaliana
  peptide (1)..(911): Ceres Seq. ID no. 13607041
  misc_feature (83)..(366): Pfam Name: Amino acid kinase family Pfam Description: Amino acid kinase family
  misc_feature (86)..(902): Homolog of NCBI NO: 32029106 NR Description: hypothetical protein [Haemophilus somnus 2336]
  misc_feature (86)..(905): Homolog of NCBI NO: 33519586 NR Description: aspartokinase I/homoserine dehydrogenase I Blochmannia floridanus] >gi|33517249|emb|CAD83632.1|
  misc_feature (417)..(902): Homolog of NCBI NO: 32035143 NR Description: hypothetical protein [Actinobacillus
  misc_feature (244)..(886): Homolog of NCBI NO: 31194757 NR Description: ENSANGP00000002199 [Anopheles gambiae]
  misc_feature (86)..(903): Homolog of NCBI NO: 32491340 NR Description: thrA [Wigglesworthia glossinidia endosymbiont of brevipalpis] >gi|25166547|dbj|BAC24737.1| thrA [Wigglesworthia
  misc_feature (555)..(903): Homolog of NCBI NO: 32405282 NR Description: probable homoserine dehydrogenase [MIPS]
  misc_feature (639)..(903): Homolog of NCBI NO: 21243765 NR Description: homoserine dehydrogenase [Xanthomonas axonopodis citri str. 306] >gi|21109354|gb|AAM37883.1| homoserine
  misc_feature (639)..(903): Homolog of NCBI NO: 21232286 NR Description: homoserine dehydrogenase [Xanthomonas campestris campestris str. ATCC 33913] >gi|21114051|gb|AAM42127.1| dehydrogenase [Xanthomonas campestris pv. campestris str. ATCC
  misc_feature (42)..(549): Homolog of NCBI NO: 34394347 NR Description: putative precursor monofunctional aspartokinase
  misc_feature (42)..(549): Homolog of NCBI NO: 34394346 NR Description: putative precursor monofunctional aspartokinase
MPVVSLAKVVTSPAVAGDLAVRVPFIYGKRLVSNRVSFGKLRRRSCIGQCVRSELQSPRVLGSVTDLALDNSVENGHLPKGDSWAVHKFGGTCVGNSERIKDVAAVVVKDDSERKLVVVSAMSKVTDMMYDLIHRAESRDDSYLSALSGVLEKHRATAVDLLDGDELSSFLARLNDDINNLKAMLRAIYIAGHATESFSDFVVGHGELWSAQMLAAVVRKSGLDCTWMDARDVLVVIPTSSNQVDPDFVESEKRLEKWFTQNSAKIIIATGFIASTPQNIPTTLKRDGSDFSAAIMSALFRSHQLTIWTDVDGVYSADPRKVSEAVVLKTLSYQEAWEMSYFGANVLHPRTIIPVMKYDIPIVIRNIFNLSAPGTMICRQIDDEDGFKLDAPVKGFATIDNLALVNVEGTGMAGVPGTASAIFSAVKEVGANVIMISQASSEHSVCFAVPEKEVKAVSEALNSRFRQALAGGRLSQIEIIPNCSILAAVGQKMASTPGVSATFFNALAKANINIRAIAQGCSEFNITVVVKREDCIRALRAVHSRFYLSRTTLAVGIIGPGLIGGTLLDQIRDQAAVLKEEFKIDLRVIGITGSSKMLMSESGIDLSRWRELMKEEGEKADMEKFTQYVKGNHFIPNSVMVDCTADADIASCYYDWLLRGIHVVTPNKKANSGPLDQYLKIRDLQRKSYTHYFYEATVGAGLPIISTLRGLLETGDKILRIEGIFSGTLSYLFNNFVGTRSFSEVVAEAKQAGFTEPDPRDDLSGTDVARKVTILARESGLKLDLEGLPVQNLVPKPLQACASAEEFMEKLPQFDEELSKQREEAEAAGEVLRYVGVVDAVEKKGTVELKRYKKDHPFAQLSGADNIIAFTTKRYKEQPLIVRGPGAGAQVTAGGIFSDILRLAFYLGAPS

SEQ ID NO: 101135 - protein, 790 aa, Arabidopsis thaliana
  peptide (1)..(790): Ceres Seq. ID no. 13607042
  misc_feature (1)..(245): Pfam Name: Amino acid kinase family Pfam Description: Amino acid kinase family
  misc_feature (1)..(781): Homolog of NCBI NO: 32029106 NR Description: hypothetical protein [Haemophilus somnus 2336]
  misc_feature (1)..(784): Homolog of NCBI NO: 33519586 NR Description: aspartokinase I/homoserine dehydrogenase I Blochmannia floridanus] >gi|33517249|emb|CAD83632.1|
  misc_feature (296)..(781): Homolog of NCBI NO: 32035143 NR Description: hypothetical protein [Actinobacillus
  misc_feature (123)..(765): Homolog of NCBI NO: 31194757 NR Description: ENSANGP00000002199 [Anopheles gambiae]
  misc_feature (1)..(782): Homolog of NCBI NO: 32491340 NR Description: thrA [Wigglesworthia glossinidia endosymbiont of brevipalpis] >gi|25166547|dbj|BAC24737.1| thrA [Wigglesworthia
  misc_feature (434)..(782): Homolog of NCBI NO: 32405282 NR Description: probable homoserine dehydrogenase [MIPS]
  misc_feature (518)..(782): Homolog of NCBI NO: 21243765 NR Description: homoserine dehydrogenase [Xanthomonas axonopodis citri str. 306] >gi|21109354|gb|AAM37883.1| homoserine
  misc_feature (518)..(782): Homolog of NCBI NO: 21232286 NR Description: homoserine dehydrogenase [Xanthomonas campestris campestris str. ATCC 33913] >gi|21114051|gb|AAM42127.1| dehydrogenase [Xanthomonas campestris pv. campestris str. ATCC
  misc_feature (1)..(428): Homolog of NCBI NO: 34394347 NR Description: putative precursor monofunctional aspartokinase
  misc_feature (1)..(428): Homolog of NCBI NO: 34394346 NR Description: putative precursor monofunctional aspartokinase
MSKVTDMMYDLIHRAESRDDSYLSALSGVLEKHRATAVDLLDGDELSSFLARLNDDINNLKAMLRAIYIAGHATESFSDFVVGHGELWSAQMLAAVVRKSGLDCTWMDARDVLVVIPTSSNQVDPDFVESEKRLEKWFTQNSAKIIIATGFIASTPQNIPTTLKRDGSDFSAAIMSALFRSHQLTIWTDVDGVYSADPRKVSEAVVLKTLSYQEAWEMSYFGANVLHPRTIIPVMKYDIPIVIRNIFNLSAPGTMICRQIDDEDGFKLDAPVKGFATIDNLALVNVEGTGMAGVPGTASAIFSAVKEVGANVIMISQASSEHSVCFAVPEKEVKAVSEALNSRFRQALAGGRLSQIEIIPNCSILAAVGQKMASTPGVSATFFNALAKANINIRAIAQGCSEFNITVVVKREDCIRALRAVHSRFYLSRTTLAVGIIGPGLIGGTLLDQIRDQAAVLKEEFKIDLRVIGITGSSKMLMSESGIDLSRWRELMKEEGEKADMEKFTQYVKGNHFIPNSVMVDCTADADIASCYYDWLLRGIHVVTPNKKANSGPLDQYLKIRDLQRKSYTHYFYEATVGAGLPIISTLRGLLETGDKILRIEGIFSGTLSYLFNNFVGTRSFSEVVAEAKQAGFTEPDPRDDLSGTDVARKVTILARESGLKLDLEGLPVQNLVPKPLQACASAEEFMEKLPQFDEELSKQREEAEAAGEVLRYVGVVDAVEKKGTVELKRYKKDHPFAQLSGADNIIAFTTKRYKEQPLIVRGPGAGAQVTAGGIFSDILRLAFYLGAPS

SEQ ID NO: 101136 - protein, 784 aa, Arabidopsis thaliana
  peptide (1)..(784): Ceres Seq. ID no. 13607043
  misc_feature (1)..(239): Pfam Name: Amino acid kinase family Pfam Description: Amino acid kinase family
  misc_feature (1)..(775): Homolog of NCBI NO: 32029106 NR Description: hypothetical protein [Haemophilus somnus 2336]
  misc_feature (1)..(778): Homolog of NCBI NO: 33519586 NR Description: aspartokinase I/homoserine dehydrogenase I Blochmannia floridanus] >gi|33517249|emb|CAD83632.1|
  misc_feature (290)..(775): Homolog of NCBI NO: 32035143 NR Description: hypothetical protein [Actinobacillus
  misc_feature (117)..(759): Homolog of NCBI NO: 31194757 NR Description: ENSANGP00000002199 [Anopheles gambiae]
  misc_feature (1)..(776): Homolog of NCBI NO: 32491340 NR Description: thrA [Wigglesworthia glossinidia endosymbiont of brevipalpis] >gi|25166547|dbj|BAC24737.1| thrA [Wigglesworthia
  misc_feature (428)..(776): Homolog of NCBI NO: 32405282 NR Description: probable homoserine dehydrogenase [MIPS]
  misc_feature (512)..(776): Homolog of NCBI NO: 21243765 NR Description: homoserine dehydrogenase [Xanthomonas axonopodis citri str. 306] >gi|21109354|gb|AAM37883.1| homoserine
  misc_feature (512)..(776): Homolog of NCBI NO: 21232286 NR Description: homoserine dehydrogenase [Xanthomonas campestris campestris str. ATCC 33913] >gi|21114051|gb|AAM42127.1| dehydrogenase [Xanthomonas campestris pv. campestris str. ATCC
  misc_feature (1)..(422): Homolog of NCBI NO: 34394347 NR Description: putative precursor monofunctional aspartokinase
  misc_feature (1)..(422): Homolog of NCBI NO: 34394346 NR Description: putative precursor monofunctional aspartokinase
MMYDLIHRAESRDDSYLSALSGVLEKHRATAVDLLDGDELSSFLARLNDDINNLKAMLRAIYIAGHATESFSDFVVGHGELWSAQMLAAVVRKSGLDCTWMDARDVLVVIPTSSNQVDPDFVESEKRLEKWFTQNSAKIIIATGFIASTPQNIPTTLKRDGSDFSAAIMSALFRSHQLTIWTDVDGVYSADPRKVSEAVVLKTLSYQEAWEMSYFGANVLHPRTIIPVMKYDIPIVIRNIFNLSAPGTMICRQIDDEDGFKLDAPVKGFATIDNLALVNVEGTGMAGVPGTASAIFSAVKEVGANVIMISQASSEHSVCFAVPEKEVKAVSEALNSRFRQALAGGRLSQIEIIPNCSILAAVGQKMASTPGVSATFFNALAKANINIRAIAQGCSEFNITVVVKREDCIRALRAVHSRFYLSRTTLAVGIIGPGLIGGTLLDQIRDQAAVLKEEFKIDLRVIGITGSSKMLMSESGIDLSRWRELMKEEGEKADMEKFTQYVKGNHFIPNSVMVDCTADADIASCYYDWLLRGIHVVTPNKKANSGPLDQYLKIRDLQRKSYTHYFYEATVGAGLPIISTLRGLLETGDKILRIEGIFSGTLSYLFNNFVGTRSFSEVVAEAKQAGFTEPDPRDDLSGTDVARKVTILARESGLKLDLEGLPVQNLVPKPLQACASAEEFMEKLPQFDEELSKQREEAEAAGEVLRYVGVVDAVEKKGTVELKRYKKDHPFAQLSGADNIIAFTTKRYKEQPLIVRGPGAGAQVTAGGIFSDILRLAFYLGAPS

SEQ ID NO: 101137 - DNA, 1870 bp, Arabidopsis thaliana
  misc_feature (1)..(1870): Ceres Seq. ID no. 13607048
  misc_feature: MA Experiment ID: 20000495 Result: Down-regulated in Transcription
  misc_feature: MA Experiment 20000495 PARAMETER Experiment Name: At_Guard_Cells_P Parameter: Harvest Date Value: 8/2/2002
  misc_feature: MA Experiment 20000495 PARAMETER Experiment Name: At_Guard_Cells_P Parameter: Organism Value: A. thaliana
  misc_feature: MA Experiment 20000495 PARAMETER Experiment Name: At_Guard_Cells_P Parameter: Tissue Value: Guard Cells vs. Leaves
ccacgcgtccgactttctccactaattcattccattgtcgttacctttttgtttctcagactgttaccttacctgtaaagaagagagttaaagatctattgcaaaaaaactcaacctttaatctctctgcttcttctaattaagtaatttcaactacccttttggcgaaacctctcgatctattggtttggtactgaagaaaccgacttgagtctgatttgtttttggtgaaagccatggaagctataagaaagcaagctgcgaagctcagagagcaagtcgcgaggcaacagcaagcggttttgaagcatttagggcatgttaatgctgatgctgttgttgttgatgaagaagagcttcattgtcatcagaaacttcaagatctttatagctctactaaagctgctaagcgtttgcaaaggaacattgttcgtggactcgaaggtttcattgcgactggcacaaaggttgttgagatagggttgaagtttgctgaagatttcaagaaatatggagatgagaatcctgatgctaatactcctctatcaagagtcgcacatcactttgggacctcttacaagtcggtggaaggcgagagggaaactctcctcggagttcttagtgagcaggtttgtgagccaattcgtacaatgatatatagtgcgcctttggaggatgctcggcatttggtgaatcactatgacaggctgagacaagaagtcgaagctcaggcaactgatgtactgaggagaagatcaaagttgaaggaatctgatatttctgaagaagcctacataaaacttaagaattctgaatcgagattggctgagctcaaatcaagtatgaaaactcttggtaaagaagctactaaggccatgttggaagtcgacgatcagcagcagaacgtaacttctcagcgcctccgtgctctggttgaagctgaaagatcatatcatcgtaatgctcttgatatcctcgacaagctacattccgagatgattgctgaggaagaagctataggatcatcaccaaagtcactacctttacatatagaggatagtgcttctcttccccaacaagaaccgaattcaaattcctcaggagagatcaaatcaaatcccttgggaaagatcaaagcaagtcgtcgagaagaaatcaagtctaatccccaagaagtaaccaaacctagtcccaaggacgaaatgaagtccagtccacaagaagaaaccaaatccaatcatcagaaagaaattaagtctagtccacaggaagagatcaagaagtccaatgggtctgatgatcatcacaatcatcaacttctcagccagaatgattcctactttcttgcaaaggttgtgcacccgtttgatgctcaagccccaggggaactcagtctcgctgtcgatgattatgtaattgtgcgacaggtggctggtacaggctggtcagaaggagaatacaaaggcaaagctggatggtttccgtctgcgtacgtagagaaacaagagaaagctccggcaagcaagatcgtggaatcaaactccaagcaacagtgatgccctttctttaacatatacataccaaaaagtatgtgtaagatatgattgtgtttctcttccttcttacctatcatcgtaagtaaagatatgttttcgacgagtaaatatgatcttgtaagagtaatgatttgtgtgttttcttccttttttcttatgtatcaacatgagtctaactctagactcttgaatcatttctttacgcagttgtgagaatcctgttttatcttttgttagatacaatcctctgtttcttctgtaatttactctgataatgataatgatcttttctttttcagtaaaatttgattttt

SEQ ID NO: 101138 - protein, 439 aa, Arabidopsis thaliana
  peptide (1)..(439): Ceres Seq. ID no. 13607049
  misc_feature (369)..(423): Pfam Name: SH3 domain Pfam Description: SH3 domain
  misc_feature (1)..(439): Homolog of NCBI NO: 15221714 NR Description: SH3 domain-containing protein 1 [Arabidopsis
  misc_feature (1)..(267): Homolog of NCBI NO: 18418491 NR Description: SH3 domain-containing protein 2 [Arabidopsis
  misc_feature (322)..(433): Homolog of NCBI NO: 18418491 NR Description: SH3 domain-containing protein 2 [Arabidopsis
  misc_feature (1)..(265): Homolog of NCBI NO: 38344978 NR Description: OSJNBa0011L07.8 [Oryza sativa (japonica
  misc_feature (328)..(431): Homolog of NCBI NO: 38344978 NR Description: OSJNBa0011L07.8 [Oryza sativa (japonica
  misc_feature (1)..(271): Homolog of NCBI NO: 22093679 NR Description: putative SH3(Src homology) domain-containing
  misc_feature (345)..(431): Homolog of NCBI NO: 22093679 NR Description: putative SH3(Src homology) domain-containing
  misc_feature (1)..(269): Homolog of NCBI NO: 21928139 NR Description: AT4g18060/F15J5_30 [Arabidopsis thaliana]
  misc_feature (363)..(429): Homolog of NCBI NO: 21928139 NR Description: AT4g18060/F15J5_30 [Arabidopsis thaliana]
  misc_feature (1)..(269): Homolog of NCBI NO: 22328762 NR Description: SH3 domain-containing protein 3 [Arabidopsis
MEAIRKQAAKLREQVARQQQAVLKHLGHVNADAVVVDEEELHCHQKLQDLYSSTKAAKRLQRNIVRGLEGFIATGTKVVEIGLKFAEDFKKYGDENPDANTPLSRVAHHFGTSYKSVEGERETLLGVLSEQVCEPIRTMIYSAPLEDARHLVNHYDRLRQEVEAQATDVLRRRSKLKESDISEEAYIKLKNSESRLAELKSSMKTLGKEATKAMLEVDDQQQNVTSQRLRALVEAERSYHRNALDILDKLHSEMIAEEEAIGSSPKSLPLHIEDSASLPQQEPNSNSSGEIKSNPLGKIKASRREEIKSNPQEVTKPSPKDEMKSSPQEETKSNHQKEIKSSPQEEIKKSNGSDDHHNHQLLSQNDSYFLAKVVHPFDAQAPGELSLAVDDYVIVRQVAGTGWSEGEYKGKAGWFPSAYVEKQEKAPASKIVESNSKQQ

SEQ ID NO: 101139 - protein, 301 aa, Arabidopsis thaliana
  peptide (1)..(301): Ceres Seq. ID no. 13607050
  misc_feature (231)..(285): Pfam Name: SH3 domain Pfam Description: SH3 domain
  misc_feature (1)..(301): Homolog of NCBI NO: 15221714 NR Description: SH3 domain-containing protein 1 [Arabidopsis
  misc_feature (1)..(129): Homolog of NCBI NO: 18418491 NR Description: SH3 domain-containing protein 2 [Arabidopsis
  misc_feature (184)..(295): Homolog of NCBI NO: 18418491 NR Description: SH3 domain-containing protein 2 [Arabidopsis
  misc_feature (1)..(127): Homolog of NCBI NO: 38344978 NR Description: OSJNBa0011L07.8 [Oryza sativa (japonica
  misc_feature (190)..(293): Homolog of NCBI NO: 38344978 NR Description: OSJNBa0011L07.8 [Oryza sativa (japonica
  misc_feature (1)..(133): Homolog of NCBI NO: 22093679 NR Description: putative SH3(Src homology) domain-containing
  misc_feature (207)..(293): Homolog of NCBI NO: 22093679 NR Description: putative SH3(Src homology) domain-containing
  misc_feature (1)..(131): Homolog of NCBI NO: 21928139 NR Description: AT4g18060/F15J5_30 [Arabidopsis thaliana]
  misc_feature (225)..(291): Homolog of NCBI NO: 21928139 NR Description: AT4g18060/F15J5_30 [Arabidopsis thaliana]
  misc_feature (1)..(131): Homolog of NCBI NO: 22328762 NR Description: SH3 domain-containing protein 3 [Arabidopsis
MIYSAPLEDARHLVNHYDRLRQEVEAQATDVLRRRSKLKESDISEEAYIKLKNSESRLAELKSSMKTLGKEATKAMLEVDDQQQNVTSQRLRALVEAERSYHRNALDILDKLHSEMIAEEEAIGSSPKSLPLHIEDSASLPQQEPNSNSSGEIKSNPLGKIKASRREEIKSNPQEVTKPSPKDEMKSSPQEETKSNHQKEIKSSPQEEIKKSNGSDDHHNHQLLSQNDSYFLAKVVHPFDAQAPGELSLAVDDYVIVRQVAGTGWSEGEYKGKAGWFPSAYVEKQEKAPASKIVESNSKQQ

SEQ ID NO: 101140 - protein, 237 aa, Arabidopsis thaliana
  peptide (1)..(237): Ceres Seq. ID no. 13607051
  misc_feature (167)..(221): Pfam Name: SH3 domain Pfam Description: SH3 domain
  misc_feature (1)..(237): Homolog of NCBI NO: 15221714 NR Description: SH3 domain-containing protein 1 [Arabidopsis
  misc_feature (1)..(65): Homolog of NCBI NO: 18418491 NR Description: SH3 domain-containing protein 2 [Arabidopsis
  misc_feature (120)..(231): Homolog of NCBI NO: 18418491 NR Description: SH3 domain-containing protein 2 [Arabidopsis
  misc_feature (1)..(63): Homolog of NCBI NO: 38344978 NR Description: OSJNBa0011L07.8 [Oryza sativa (japonica
  misc_feature (126)..(229): Homolog of NCBI NO: 38344978 NR Description: OSJNBa0011L07.8 [Oryza sativa (japonica
  misc_feature (1)..(69): Homolog of NCBI NO: 22093679 NR Description: putative SH3(Src homology) domain-containing
  misc_feature (143)..(229): Homolog of NCBI NO: 22093679 NR Description: putative SH3(Src homology) domain-containing
  misc_feature (1)..(67): Homolog of NCBI NO: 21928139 NR Description: AT4g18060/F15J5_30 [Arabidopsis thaliana]
  misc_feature (161)..(227): Homolog of NCBI NO: 21928139 NR Description: AT4g18060/F15J5_30 [Arabidopsis thaliana]
  misc_feature (1)..(67): Homolog of NCBI NO: 22328762 NR Description: SH3 domain-containing protein 3 [Arabidopsis
MKTLGKEATKAMLEVDDQQQNVTSQRLRALVEAERSYHRNALDILDKLHSEMIAEEEAIGSSPKSLPLHIEDSASLPQQEPNSNSSGEIKSNPLGKIKASRREEIKSNPQEVTKPSPKDEMKSSPQEETKSNHQKEIKSSPQEEIKKSNGSDDHHNHQLLSQNDSYFLAKVVHPFDAQAPGELSLAVDDYVIVRQVAGTGWSEGEYKGKAGWFPSAYVEKQEKAPASKIVESNSKQQ

SEQ ID NO: 101141 - DNA, 592 bp, Arabidopsis thaliana
  misc_feature (1)..(592): Ceres Seq. ID no. 13607052
  misc_feature: MA Experiment ID: 108434 Result: Up-regulated in Transcription
  misc_feature: MA Experiment 108434 PARAMETER Experiment Name: At_Root_Tips_cDNA_P Parameter: Tissue Value: Root Tips
  misc_feature: MA Experiment ID: 108462 Result: Up-regulated in Transcription
  misc_feature: MA Experiment 108462 PARAMETER Experiment Name: At_Germinating_Seeds_cDNA_P Parameter: Age (day) Value: 2 vs. 0
  misc_feature: MA Experiment 108462 PARAMETER Experiment Name: At_Germinating_Seeds_cDNA_P Parameter: Tissue Value: Germinating Seeds
  misc_feature: MA Experiment ID: 108573 Result: Down-regulated in Transcription
  misc_feature: MA Experiment 108573 PARAMETER Experiment Name: At_Drought_cDNA_P Parameter: Timepoint (hr) Value: 6
  misc_feature: MA Experiment 108573 PARAMETER Experiment Name: At_Drought_cDNA_P Parameter: Tissue Value: Aerial
  misc_feature: MA Experiment 108573 PARAMETER Experiment Name: At_Drought_cDNA_P Parameter: Treatment Value: Drought vs. No Drought
  misc_feature: MA Experiment ID: 108577 Result: Down-regulated in Transcription
  misc_feature: MA Experiment 108577 PARAMETER Experiment Name: At_42deg_Heat_cDNA_P Parameter: Temperature (deg C) Value: 42 vs. 22
  misc_feature: MA Experiment 108577 PARAMETER Experiment Name: At_42deg_Heat_cDNA_P Parameter: Timepoint (hr) Value: 6
  misc_feature: MA Experiment 108577 PARAMETER Experiment Name: At_42deg_Heat_cDNA_P Parameter: Tissue Value: Aerial
  misc_feature: MA Experiment ID: 108585 Result: Down-regulated in Transcription
  misc_feature: MA Experiment 108585 PARAMETER Experiment Name: At_5mM_NaNP_cDNA_P Parameter: Timepoint (hr) Value: 6
  misc_feature: MA Experiment 108585 PARAMETER Experiment Name: At_5mM_NaNP_cDNA_P Parameter: Tissue Value: Aerial
  misc_feature: MA Experiment 108585 PARAMETER Experiment Name: At_5mM_NaNP_cDNA_P Parameter: Treatment Value: null
  misc_feature: MA Experiment ID: 20000071 Result: Down-regulated in Transcription
  misc_feature: MA Experiment 20000071 PARAMETER Experiment Name: At_100uM_ABA_Mutants_cDNA_P Parameter: Plant Line Value: CS8104
  misc_feature: MA Experiment 20000071 PARAMETER Experiment Name: At_100uM_ABA_Mutants_cDNA_P Parameter: Timepoint (hr) Value: 6
  misc_feature: MA Experiment 20000071 PARAMETER Experiment Name: At_100uM_ABA_Mutants_cDNA_P Parameter: Tissue Value: Aerial
  misc_feature: MA Experiment 20000071 PARAMETER Experiment Name: At_100uM_ABA_Mutants_cDNA_P Parameter: Treatment Value: 100uM ABA vs. No Treatment
  misc_feature: MA Experiment ID: 20000093 Result: Down-regulated in Transcription
  misc_feature: MA Experiment 20000093 PARAMETER Experiment Name: At_42deg_Heat_cDNA_P Parameter: Temperature (deg C) Value: 42 vs. 22
  misc_feature: MA Experiment 20000093 PARAMETER Experiment Name: At_42deg_Heat_cDNA_P Parameter: Timepoint (hr) Value: 0.5
  misc_feature: MA Experiment 20000093 PARAMETER Experiment Name: At_42deg_Heat_cDNA_P Parameter: Tissue Value: Aerial
  misc_feature: MA Experiment ID: 20000117 Result: Down-regulated in Transcription
  misc_feature: MA Experiment 20000117 PARAMETER Experiment Name: At_100uM_ABA_Mutants_cDNA_P Parameter: Plant Line Value: Columbia
  misc_feature: MA Experiment 20000117 PARAMETER Experiment Name: At_100uM_ABA_Mutants_cDNA_P Parameter: Timepoint (hr) Value: 6
  misc_feature: MA Experiment 20000117 PARAMETER Experiment Name: At_100uM_ABA_Mutants_cDNA_P Parameter: Tissue Value: Aerial
  misc_feature: MA Experiment 20000117 PARAMETER Experiment Name: At_100uM_ABA_Mutants_cDNA_P Parameter: Treatment Value: 100uM ABA vs. No Treatment
  misc_feature: MA Experiment ID: 20000179 Result: Up-regulated in Transcription
  misc_feature: MA Experiment 20000179 PARAMETER Experiment Name: At_Germinating_Seeds_P Parameter: Age (hr) Value: 6 vs. 0
  misc_feature: MA Experiment 20000179 PARAMETER Experiment Name: At_Germinating_Seeds_P Parameter: Tissue Value: Germinating Seeds
  misc_feature: MA Experiment ID: 20000180 Result: Up-regulated in Transcription
  misc_feature: MA Experiment 20000180 PARAMETER Experiment Name: At_Germinating_Seeds_P Parameter: Age (hr) Value: 24 vs. 0
  misc_feature: MA Experiment 20000180 PARAMETER Experiment Name: At_Germinating_Seeds_P Parameter: Tissue Value: Germinating Seeds
  misc_feature: MA Experiment ID: 20000224 Result: Down-regulated in Transcription
  misc_feature: MA Experiment ID: 20000451 Result: Down-regulated in Transcription
  misc_feature: MA Experiment 20000451 PARAMETER Experiment Name: At_CS6879_Shoots-Roots_P Parameter: Age (day) Value: 14
  misc_feature: MA Experiment 20000451 PARAMETER Experiment Name: At_CS6879_Shoots-Roots_P Parameter: Organism Value: A. thaliana
  misc_feature: MA Experiment 20000451 PARAMETER Experiment Name: At_CS6879_Shoots-Roots_P Parameter: Plant Line Value: CS6879 vs. WS
  misc_feature: MA Experiment 20000451 PARAMETER Experiment Name: At_CS6879_Shoots-Roots_P Parameter: Tissue Value: Roots
  misc_feature: MA Experiment ID: 20000794 Result: Down-regulated in Transcription
  misc_feature: MA Experiment 20000794 PARAMETER Experiment Name: At_Petals_P Parameter: Age (day) Value: 23-25 days
  misc_feature: MA Experiment 20000794 PARAMETER Experiment Name: At_Petals_P Parameter: Plant Line Value: WS
  misc_feature: MA Experiment 20000794 PARAMETER Experiment Name: At_Petals_P Parameter: Tissue Value: Petals vs. Whole plant
aatttcacatctttctcacccaaatctactcttaaccgttcttcttcttctacagacatcaatttctctcgagataaactaaatcttcgctgaaaaaatgtcgggtcgtggaaagggaggaaaaggtttgggtaagggaggagccaagcgtcacaggaaggttctgagagacaacatccaaggaatcaccaagcctgcgattcgaagattggctcgtagaggtggagtcaagcgtatcagtggtctcatctacgaggagactcgtggcgtcctcaagatctttctcgagaacgtgattcgtgatgctgtcacttacaccgagcacgctaggaggaagactgtgaccgccatggatgttgtctacgctctcaagaggcaaggaaggactctttacggattcggtggttaattagagtttttcagatccgcgtttgtgttttctgggtttctcacttaagcgtctgcgttttacttttgtattgggtttggcgtttagtagtttgcggtagcgttcttgttatgtgtaattacgctttttcttcttgcttcagcagtttcggttgaaatataaatcgaatcaagtttcacttta

SEQ ID NO: 101142 - protein, 103 aa, Arabidopsis thaliana; identical to SEQ ID NO: 7737
  peptide (1)..(103): Ceres Seq. ID no. 13607053
  misc_feature (1)..(103): Homolog of NCBI NO: 34876368 NR Description: similar to germinal histone H4 gene [Rattus
  misc_feature (1)..(103): Homolog of NCBI NO: 15226944 NR Description: histone H4 [Arabidopsis thaliana] histone H4 [Arabidopsis thaliana] >gi|15232318|ref|NP_190941.1|
  misc_feature (1)..(103): Homolog of NCBI NO: 462243 NR Description: Histone H4 >gi|421921|pir||S32769 histone H4 - >gi|297150|emb|CAA48923.1| histone H4 [Lycopersicon esculentum] histone H4 [Lycopersicon esculentum] >gi|2746721|gb|AAB94924.1|
  misc_feature (1)..(103): Homolog of NCBI NO: 1806283 NR Description: Histone H4 homologue [Sesbania rostrata]
  misc_feature (1)..(103): Homolog of NCBI NO: 4504301 NR Description: H4 histone family, member A [Homo sapiens] H4 histone family, member B [Homo sapiens] H4 histone family, member C [Homo sapiens]
  misc_feature (1)..(103): Homolog of NCBI NO: 27692935 NR Description: Hist1h4i protein [Mus musculus]
  misc_feature (1)..(103): Homolog of NCBI NO: 27692960 NR Description: Similar to germinal histone H4 gene [Mus musculus]
  misc_feature (1)..(103): Homolog of NCBI NO: 34858262 NR Description: similar to germinal histone H4 gene [Rattus
  misc_feature (1)..(103): Homolog of NCBI NO: 37590121 NR Description: Hist1h4h protein [Mus musculus]
  misc_feature (1)..(103): Homolog of NCBI NO: 462242 NR Description: Histone H4 >gi|166311|gb|AAC37355.1| histone H4 formosa] >gi|455652|gb|AAB28739.1| histone H4; H4 [Acropora

SEQ ID NO: 101143 - DNA, 769 bp, Arabidopsis thaliana
  misc_feature (1)..(769): Ceres Seq. ID no. 13607058
  misc_feature: MA Experiment ID: 108461 Result: Up-regulated in Transcription
  misc_feature: MA Experiment 108461 PARAMETER Experiment Name: At_Germinating_Seeds_cDNA_P Parameter: Age (day) Value: 1 vs. 0
  misc_feature: MA Experiment 108461 PARAMETER Experiment Name: At_Germinating_Seeds_cDNA_P Parameter: Tissue Value: Germinating Seeds
  misc_feature: MA Experiment ID: 108462 Result: Up-regulated in Transcription
  misc_feature: MA Experiment 108462 PARAMETER Experiment Name: At_Germinating_Seeds_cDNA_P Parameter: Age (day) Value: 2 vs. 0
  misc_feature: MA Experiment 108462 PARAMETER Experiment Name: At_Germinating_Seeds_cDNA_P Parameter: Tissue Value: Germinating Seeds
  misc_feature: MA Experiment ID: 108463 Result: Up-regulated in Transcription
  misc_feature: MA Experiment 108463 PARAMETER Experiment Name: At_Germinating_Seeds_cDNA_P Parameter: Age (day) Value: 3 vs. 0
  misc_feature: MA Experiment 108463 PARAMETER Experiment Name: At_Germinating_Seeds_cDNA_P Parameter: Tissue Value: Germinating Seeds
  misc_feature: MA Experiment ID: 108464 Result: Up-regulated in Transcription
  misc_feature: MA Experiment 108464 PARAMETER Experiment Name: At_Germinating_Seeds_cDNA_P Parameter: Age (day) Value: 4 vs. 0
  misc_feature: MA Experiment 108464 PARAMETER Experiment Name: At_Germinating_Seeds_cDNA_P Parameter: Tissue Value: Germinating Seeds
  misc_feature: MA Experiment ID: 108595 Result: Up-regulated in Transcription
  misc_feature: MA Experiment 108595 PARAMETER Experiment Name: At_Ler-pi_Ovule_cDNA_P Parameter: Plant Line Value: null
  misc_feature: MA Experiment ID: 20000112 Result: Up-regulated in Transcription
  misc_feature: MA Experiment 20000112 PARAMETER Experiment Name: At_42deg_Heat_cDNA_P Parameter: Temperature (deg C) Value: 42 vs. 22
  misc_feature: MA Experiment 20000112 PARAMETER Experiment Name: At_42deg_Heat_cDNA_P Parameter: Timepoint (hr) Value: 2
  misc_feature: MA Experiment 20000112 PARAMETER Experiment Name: At_42deg_Heat_cDNA_P Parameter: Tissue Value: Aerial
  misc_feature: MA Experiment ID: 20000113 Result: Up-regulated in Transcription
  misc_feature: MA Experiment 20000113 PARAMETER Experiment Name: At_42deg_Heat_cDNA_P Parameter: Temperature (deg C) Value: 42 vs. 22
  misc_feature: MA Experiment 20000113 PARAMETER Experiment Name: At_42deg_Heat_cDNA_P Parameter: Timepoint (hr) Value: 8
  misc_feature: MA Experiment 20000113 PARAMETER Experiment Name: At_42deg_Heat_cDNA_P Parameter: Tissue Value: Aerial
  misc_feature: MA Experiment ID: 20000180 Result: Up-regulated in Transcription
  misc_feature: MA Experiment 20000180 PARAMETER Experiment Name: At_Germinating_Seeds_P Parameter: Age (hr) Value: 24 vs. 0
  misc_feature: MA Experiment 20000180 PARAMETER Experiment Name: At_Germinating_Seeds_P Parameter: Tissue Value: Germinating Seeds
  misc_feature: MA Experiment ID: 20000185 Result: Up-regulated in Transcription
  misc_feature: MA Experiment 20000185 PARAMETER Experiment Name: At_Roots__P Parameter: Age (day) Value: 7 vs. 21
  misc_feature: MA Experiment 20000185 PARAMETER Experiment Name: At_Roots__P Parameter: Organism Value: A. thaliana
  misc_feature: MA Experiment 20000185 PARAMETER Experiment Name: At_Roots__P Parameter: Tissue Value: Roots vs. Whole Plant
  misc_feature: MA Experiment ID: 20000227 Result: Up-regulated in Transcription
  misc_feature: MA Experiment 20000227 PARAMETER Experiment Name: At_Root-Tips-vs-Tops_P Parameter: Tissue Value: Root Tips vs. Root Tops
  misc_feature: MA Experiment ID: 20000307 Result: Up-regulated in Transcription
  misc_feature: MA Experiment 20000307 PARAMETER Experiment Name: At_Germinating_Seeds_Sub_P Parameter: Age (hr) Value: 24 vs. 0
  misc_feature: MA Experiment 20000307 PARAMETER Experiment Name: At_Germinating_Seeds_Sub_P Parameter: Organism Value: A. thaliana
  misc_feature: MA Experiment 20000307 PARAMETER Experiment Name: At_Germinating_Seeds_Sub_P Parameter: Plant Line Value: WS
  misc_feature: MA Experiment 20000307 PARAMETER Experiment Name: At_Germinating_Seeds_Sub_P Parameter: Tissue Value: Germinating Seeds
  misc_feature: MA Experiment ID: 20000314 Result: Up-regulated in Transcription
  misc_feature: MA Experiment 20000314 PARAMETER Experiment Name: At_14day_Shoots-Roots_Sub_P Parameter: Age (day) Value: 14
  misc_feature: MA Experiment 20000314 PARAMETER Experiment Name: At_14day_Shoots-Roots_Sub_P Parameter: Organism Value: A. thaliana
  misc_feature: MA Experiment 20000314 PARAMETER Experiment Name: At_14day_Shoots-Roots_Sub_P Parameter: Plant Line Value: WS
  misc_feature: MA Experiment 20000314 PARAMETER Experiment Name: At_14day_Shoots-Roots_Sub_P Parameter: Tissue Value: Roots vs. Whole Plant
  misc_feature: MA Experiment ID: 20000439 Result: Up-regulated in Transcription
  misc_feature: MA Experiment 20000439 PARAMETER Experiment Name: At_Roots__P Parameter: Age (day) Value: 14 vs. 21
  misc_feature: MA Experiment 20000439 PARAMETER Experiment Name: At_Roots__P Parameter: Organism Value: A. thaliana
  misc_feature: MA Experiment 20000439 PARAMETER Experiment Name: At_Roots__P Parameter: Tissue Value: Roots vs. Whole Plant
  misc_feature: MA Experiment ID: 20000527 Result: Down-regulated in Transcription
  misc_feature: MA Experiment 20000527 PARAMETER Experiment Name: At_10percent_PEG_P Parameter: Age (day) Value: 20
  misc_feature: MA Experiment 20000527 PARAMETER Experiment Name: At_10percent_PEG_P Parameter: Organism Value: A. thaliana
  misc_feature: MA Experiment 20000527 PARAMETER Experiment Name: At_10percent_PEG_P Parameter: Plant Line Value: WS
  misc_feature: MA Experiment 20000527 PARAMETER Experiment Name: At_10percent_PEG_P Parameter: Timepoint (day) Value: 20
  misc_feature: MA Experiment 20000527 PARAMETER Experiment Name: At_10percent_PEG_P Parameter: Tissue Value: Whole Plant
  misc_feature: MA Experiment 20000527 PARAMETER Experiment Name: At_10percent_PEG_P Parameter: Treatment Value: 10percent PEG vs. No Treatment
aaatatggcaacaacgtgacagcatctaagtcttcttggttttaagacgtgaccagcctaacgacccaaccaaactacttgtctattcttcctcccaccctctaaaacccccctaccttctctactttcagatcatcaagccccaatttcaagcagagaacaatggctaattcagcgtctgggatgcacgttagcgatgagtgcaagctcaagttcttggagttaaaagcaaagaggaactataggttcattgtgttcaaaattgatgagaaggctcagcaagttatgatagacaagcttgggaatccagaagaaacttacgaagatttcaccagatctattcccgaggatgagtgccgatatgctgtctatgactatgatttcaccacccctgagaactgccagaagagcaaaatctttttcatcgcatggtcacctgatacatcaagagtgaggagtaagatgttgtatgcaagctcaaaggacaggttcaagagggaattggatgggattcaagttgaattgcaagcaacagatcctagcgagatgagcctcgacatcatcaagggacgagtcaatctctgaatggaacttaccgcatcttaattcgtttcagtcaaaattcatattttctgctttcgttttcttgggtatttttcatttaacttctttactatttgtatcttctgtgattcaagatctcacctctttcttttttccttttcggtacgcaataatcatcccaatagataattactttgcttccctg

SEQ ID NO: 101144 - protein, 140 aa, Arabidopsis thaliana; identical to SEQ ID NO: 25767
  peptide (1)..(140): Ceres Seq. ID no. 13607059
  misc_feature (12)..(139): Pfam Name: Cofilin/tropomyosin-type actin-binding protein Pfam Description: Cofilin/tropomyosin-type actin-binding protein
  misc_feature (1)..(140): Homolog of NCBI NO: 15223471 NR Description: actin depolymerizing factor -related [Arabidopsis
  misc_feature (1)..(140): Homolog of NCBI NO: 18411410 NR Description: actin-depolymerizing factor -related [Arabidopsis
  misc_feature (8)..(140): Homolog of NCBI NO: 7441448 NR Description: actin-depolymerizing factor F6N23.12 - thaliana >gi|3047107|gb|AAC13618.1| Similar to actin binding
  misc_feature (1)..(137): Homolog of NCBI NO: 231509 NR Description: Actin-depolymerizing factor (ADF)
  misc_feature (1)..(137): Homolog of NCBI NO: 22857914 NR Description: pollen specific actin-depolymerizing factor 2
  misc_feature (1)..(137): Homolog of NCBI NO: 38345587 NR Description: OSJNBb0012E24.5 [Oryza sativa (japonica
  misc_feature (1)..(137): Homolog of NCBI NO: 18423381 NR Description: actin depolymerizing factor-related [Arabidopsis
  misc_feature (1)..(137): Homolog of NCBI NO: 21537061 NR Description: actin depolymerizing factor-like [Arabidopsis
  misc_feature (1)..(137): Homolog of NCBI NO: 22857912 NR Description: pollen specific actin-depolymerizing factor 1
  misc_feature (1)..(139): Homolog of NCBI NO: 17366768 NR Description: Actin-depolymerizing factor 1 (ADF 1)

SEQ ID NO: 101145 - protein, 133 aa, Arabidopsis thaliana; identical to SEQ ID NO: 25768
  peptide (1)..(133): Ceres Seq. ID no. 13607060
  misc_feature (5)..(132): Pfam Name: Cofilin/tropomyosin-type actin-binding protein Pfam Description: Cofilin/tropomyosin-type actin-binding protein
  misc_feature (1)..(133): Homolog of NCBI NO: 15223471 NR Description: actin depolymerizing factor -related [Arabidopsis
  misc_feature (1)..(133): Homolog of NCBI NO: 18411410 NR Description: actin-depolymerizing factor -related [Arabidopsis
  misc_feature (1)..(133): Homolog of NCBI NO: 7441448 NR Description: actin-depolymerizing factor F6N23.12 - thaliana >gi|3047107|gb|AAC13618.1| Similar to actin binding
  misc_feature (1)..(130): Homolog of NCBI NO: 231509 NR Description: Actin-depolymerizing factor (ADF)
  misc_feature (1)..(130): Homolog of NCBI NO: 22857914 NR Description: pollen specific actin-depolymerizing factor 2
  misc_feature (1)..(130): Homolog of NCBI NO: 38345587 NR Description: OSJNBb0012E24.5 [Oryza sativa (japonica
  misc_feature (1)..(130): Homolog of NCBI NO: 18423381 NR Description: actin depolymerizing factor-related [Arabidopsis
  misc_feature (1)..(130): Homolog of NCBI NO: 21537061 NR Description: actin depolymerizing factor-like [Arabidopsis
  misc_feature (1)..(130): Homolog of NCBI NO: 22857912 NR Description: pollen specific actin-depolymerizing factor 1
  misc_feature (1)..(132): Homolog of NCBI NO: 17366768 NR Description: Actin-depolymerizing factor 1 (ADF 1)

SEQ ID NO: 101146 - protein, 99 aa, Arabidopsis thaliana; identical to SEQ ID NO: 25769
  peptide (1)..(99): Ceres Seq. ID no. 13607061
  misc_feature (1)..(98): Pfam Name: Cofilin/tropomyosin-type actin-binding protein Pfam Description: Cofilin/tropomyosin-type actin-binding protein
  misc_feature (1)..(99): Homolog of NCBI NO: 15223471 NR Description: actin depolymerizing factor -related [Arabidopsis
  misc_feature (1)..(99): Homolog of NCBI NO: 18411410 NR Description: actin-depolymerizing factor -related [Arabidopsis
  misc_feature (1)..(99): Homolog of NCBI NO: 7441448 NR Description: actin-depolymerizing factor F6N23.12 - thaliana >gi|3047107|gb|AAC13618.1| Similar to actin binding
  misc_feature (1)..(96): Homolog of NCBI NO: 231509 NR Description: Actin-depolymerizing factor (ADF)
  misc_feature (1)..(96): Homolog of NCBI NO: 22857914 NR Description: pollen specific actin-depolymerizing factor 2
  misc_feature (1)..(96): Homolog of NCBI NO: 38345587 NR Description: OSJNBb0012E24.5 [Oryza sativa (japonica
  misc_feature (1)..(96): Homolog of NCBI NO: 18423381 NR Description: actin depolymerizing factor-related [Arabidopsis
  misc_feature (1)..(96): Homolog of NCBI NO: 21537061 NR Description: actin depolymerizing factor-like [Arabidopsis
  misc_feature (1)..(96): Homolog of NCBI NO: 22857912 NR Description: pollen specific actin-depolymerizing factor 1
  misc_feature (1)..(98): Homolog of NCBI NO: 17366768 NR Description: Actin-depolymerizing factor 1 (ADF 1)

SEQ ID NO: 101147 - DNA, 1289 bp, Arabidopsis thaliana
  misc_feature (1)..(1289): Ceres Seq. ID no. 13607082
  misc_feature: MA Experiment ID: 20000265 Result: Up-regulated in Transcription
  misc_feature: MA Experiment 20000265 PARAMETER Experiment Name: At_Open_Flower_P Parameter: Age (day) Value: 21
  misc_feature: MA Experiment 20000265 PARAMETER Experiment Name: At_Open_Flower_P Parameter: Plant Line Value: WS
  misc_feature: MA Experiment 20000265 PARAMETER Experiment Name: At_Open_Flower_P Parameter: Tissue Value: Closed Flower vs. Whole Plant
gaacaatcttctgtttctttggaagcaactaactacaaaggacatcttcacgactacaaagacacatacccttctgtcttaaggacgagaccagaagcttcttctatcggctttgtaatggtctacaaaggataagaaaaaaccaaatccaaactaaagctatgcattttccacttgtttcggcttggaacaagagaaggagaagcaaatcatatgatacggatccatgtacgttccttttctccatcatcttcgccagatggcataaaagggtctacagaacagcagaatgctggcaaatcgaagatcaggcttctcagccaaggaagcgaagattcgggacatcagtttataccctcaaggagatggaggaggccacaagttctttcagtgatgagaatctcctcggtaaaggaggctttggccgagtttaccaaggcactttaaaaacaggagaggttgttgcaatcaagaagatggatttacctacgtttaaaaaggctgacggagaaagagaatttcgtgtggaggtggatatcttgagcagactcgaccacccaaatctggtctctttgatcggctattgtgcagatgggaaacaccggttcctagtatatgaatatatgcaaaatggaaacctgcaagatcatttgaatggaatcaaagaagcaaaaataagctggccaataaggctcagaattgcactaggagcagcaaaaggactcgcgtatctccattcaagttcttctgttgggattccaattgttcacagagacttcaaatccaccaacgttctactagactccaattataatgcaaagatatccgactttggactagcaaagttgatgccagaaggaaaggatacttgtgtcacagcaagagttctaggaacattcggctatttcgacccagaatatacatcgacaggtaaacttactctacaaagcgacatttatgcatttggggttgtgctgctagaactacttactggacgcagagcagttgacttaactcagggcccaaatgaacagaacctggtgctacaggttaggaatatactgaatgatagaaagaaattgcgtaaggttatagatgtcgagctgcctcggaattcatacagcatggaagctataaccatgtttgctgatctagcatcacggtgcatccgtatagagagtaaagagcgaccttcagtgatggattgtgttaaggaactgcaactaattatctacacaaactcgaagggtggtttgggtgggacgattcctacattcagaaggctctag

SEQ ID NO: 101148 - protein, 375 aa, Arabidopsis thaliana
  peptide (1)..(375): Ceres Seq. ID no. 13607083
  misc_feature (1)..(375): Homolog of NCBI NO: 30102706 NR Description: At1g24030 [Arabidopsis thaliana]
  misc_feature (69)..(375): Homolog of NCBI NO: 25287587 NR Description: protein T23E23.18 [imported] - Arabidopsis >gi|9369396|gb|AAF87144.1|AC002423_9 T23E23.18 [Arabidopsis
  misc_feature (69)..(375): Homolog of NCBI NO: 15221649 NR Description: protein kinase family [Arabidopsis thaliana]
  misc_feature (47)..(362): Homolog of NCBI NO: 11994140 NR Description: receptor protein kinase-like protein [Arabidopsis
  misc_feature (47)..(362): Homolog of NCBI NO: 15232294 NR Description: protein kinase family [Arabidopsis thaliana]
  misc_feature (47)..(362): Homolog of NCBI NO: 28392990 NR Description: putative protein kinase [Arabidopsis thaliana]
  misc_feature (60)..(356): Homolog of NCBI NO: 8778594 NR Description: F5M15.3 [Arabidopsis thaliana]
  misc_feature (60)..(356): Homolog of NCBI NO: 15217992 NR Description: protein kinase -related [Arabidopsis thaliana]
  misc_feature (64)..(353): Homolog of NCBI NO: 15238886 NR Description: protein kinase family [Arabidopsis thaliana]
  misc_feature (63)..(356): Homolog of NCBI NO: 34395193 NR Description: putative protein serine/threonine kinase [Oryza
MHFPLVSAWNKRRRSKSYDTDPCTFLFSIIFARWHKRVYRTAECWQIEDQASQPRKRRFGTSVYTLKEMEEATSSFSDENLLGKGGFGRVYQGTLKTGEVVAIKKMDLPTFKKADGEREFRVEVDILSRLDHPNLVSLIGYCADGKHRFLVYEYMQNGNLQDHLNGIKEAKISWPIRLRIALGAAKGLAYLHSSSSVGIPIVHRDFKSTNVLLDSNYNAKISDFGLAKLMPEGKDTCVTARVLGTFGYFDPEYTSTGKLTLQSDIYAFGVVLLELLTGRRAVDLTQGPNEQNLVLQVRNILNDRKKLRKVIDVELPRNSYSMEAITMFADLASRCIRIESKERPSVMDCVKELQLIIYTNSKGGLGGTIPTFRRL

SEQ ID NO: 101149 - protein, 307 aa, Arabidopsis thaliana; identical to SEQ ID NO: 49872
  peptide (1)..(307): Ceres Seq. ID no. 13607084
  misc_feature (1)..(307): Homolog of NCBI NO: 30102706 NR Description: At1g24030 [Arabidopsis thaliana]
  misc_feature (1)..(307): Homolog of NCBI NO: 25287587 NR Description: protein T23E23.18 [imported] - Arabidopsis >gi|9369396|gb|AAF87144.1|AC002423_9 T23E23.18 [Arabidopsis
  misc_feature (1)..(307): Homolog of NCBI NO: 15221649 NR Description: protein kinase family [Arabidopsis thaliana]
  misc_feature (1)..(294): Homolog of NCBI NO: 11994140 NR Description: receptor protein kinase-like protein [Arabidopsis
  misc_feature (1)..(294): Homolog of NCBI NO: 15232294 NR Description: protein kinase family [Arabidopsis thaliana]
  misc_feature (1)..(294): Homolog of NCBI NO: 28392990 NR Description: putative protein kinase [Arabidopsis thaliana]
  misc_feature (1)..(288): Homolog of NCBI NO: 8778594 NR Description: F5M15.3 [Arabidopsis thaliana]
  misc_feature (1)..(288): Homolog of NCBI NO: 15217992 NR Description: protein kinase -related [Arabidopsis thaliana]
  misc_feature (1)..(285): Homolog of NCBI NO: 15238886 NR Description: protein kinase family [Arabidopsis thaliana]
  misc_feature (1)..(288): Homolog of NCBI NO: 34395193 NR Description: putative protein serine/threonine kinase [Oryza

SEQ ID NO: 101150 - protein, 270 aa, Arabidopsis thaliana; identical to SEQ ID NO: 49873
  peptide (1)..(270): Ceres Seq. ID no. 13607085
  misc_feature (1)..(270): Homolog of NCBI NO: 30102706 NR Description: At1g24030 [Arabidopsis thaliana]
  misc_feature (1)..(270): Homolog of NCBI NO: 25287587 NR Description: protein T23E23.18 [imported] - Arabidopsis >gi|9369396|gb|AAF87144.1|AC002423_9 T23E23.18 [Arabidopsis
  misc_feature (1)..(270): Homolog of NCBI NO: 15221649 NR Description: protein kinase family [Arabidopsis thaliana]
  misc_feature (1)..(257): Homolog of NCBI NO: 11994140 NR Description: receptor protein kinase-like protein [Arabidopsis
  misc_feature (1)..(257): Homolog of NCBI NO: 15232294 NR Description: protein kinase family [Arabidopsis thaliana]
  misc_feature (1)..(257): Homolog of NCBI NO: 28392990 NR Description: putative protein kinase [Arabidopsis thaliana]
  misc_feature (1)..(251): Homolog of NCBI NO: 8778594 NR Description: F5M15.3 [Arabidopsis thaliana]
  misc_feature (1)..(251): Homolog of NCBI NO: 15217992 NR Description: protein kinase -related [Arabidopsis thaliana]
  misc_feature (1)..(248): Homolog of NCBI NO: 15238886 NR Description: protein kinase family [Arabidopsis thaliana]
  misc_feature (1)..(251): Homolog of NCBI NO: 34395193 NR Description: putative protein serine/threonine kinase [Oryza

SEQ ID NO: 101151 - DNA, 1667 bp, Arabidopsis thaliana
  misc_feature (1)..(1667): Ceres Seq. ID no. 13607130
  misc_feature: MA Experiment ID: 20000265 Result: Up-regulated in Transcription
  misc_feature: MA Experiment 20000265 PARAMETER Experiment Name: At_Open_Flower_P Parameter: Age (day) Value: 21
  misc_feature: MA Experiment 20000265 PARAMETER Experiment Name: At_Open_Flower_P Parameter: Plant Line Value: WS
  misc_feature: MA Experiment 20000265 PARAMETER Experiment Name: At_Open_Flower_P Parameter: Tissue Value: Closed Flower vs. Whole Plant
  misc_feature: MA Experiment ID: 20000286 Result: Up-regulated in Transcription
  misc_feature: MA Experiment 20000286 PARAMETER Experiment Name: At_Open_Flower_P Parameter: Age (day) Value: 21
  misc_feature: MA Experiment 20000286 PARAMETER Experiment Name: At_Open_Flower_P Parameter: Plant Line Value: WS
  misc_feature: MA Experiment 20000286 PARAMETER Experiment Name: At_Open_Flower_P Parameter: Tissue Value: Half Open vs. Whole Plant
  misc_feature: MA Experiment ID: 20000794 Result: Up-regulated in Transcription
  misc_feature: MA Experiment 20000794 PARAMETER Experiment Name: At_Petals_P Parameter: Age (day) Value: 23-25 days
  misc_feature: MA Experiment 20000794 PARAMETER Experiment Name: At_Petals_P Parameter: Plant Line Value: WS
  misc_feature: MA Experiment 20000794 PARAMETER Experiment Name: At_Petals_P Parameter: Tissue Value: Petals vs. Whole plant
gttgtaattctcttcttcaaaaatcaaatcagagagagagagaaacataaacaaatggctaatcttcgtttaatgatcactttaatcacggttttaatgatcaccaaatcatcaaacggtattaaaattgatttacctaaatcccttaacctcaccctctctaccgatccttccatcatctccgcagcctctcatgacttcggaaacataaccaccgtgacccccggcggcgtaatctgcccctcctccaccgctgatatctctcgtctcctccaatacgccgcaaacggaaaaagtacattccaagtagcggctcgtggccaaggccactccttaaacggccaagcctcggtctccggcggagtaatcgtcaacatgacgtgtatcactgacgtggtggtttcaaaagacaagaagtacgctgacgtggcggccgggacgttatgggtggatgtgcttaagaagacggcggagaaaggggtgtcgccggtttcttggacggattatttgcatataaccgtcggaggaacgttgtcgaatggtggaattggtggtcaagtgtttcgaaacggtcctcttgttagtaacgtccttgaattggacgttattactgggaaaggtgaaatgttgacatgctcgcgacagctaaacccagaattgttctatggagtgttaggaggtttgggtcaatttggaattataacgagagccagaattgttttggaccatgcacctaaacgggccaaatggtttcggatgctctacagtgatttcacaacttttacaaaggaccaagaacgtttgatatcaatggcaaacgatattggagtcgactatttagaaggtcaaatatttctatcaaacggtgtcgttgacacctcttttttcccaccttcagatcaatctaaagtcgctgatctagtcaagcaacacggtatcatctatgttcttgaagtagccaagtattatgatgatcccaatctccccatcatcagcaaggttattgacacattaacgaaaacattaagttacttgcccgggttcatatcaatgcacgacgtggcctacttcgatttcttgaaccgtgtacatgtcgaagaaaataaactcagatctttgggattatgggaacttcctcatccttggcttaacctctacgttcctaaatctcggattctcgattttcataacggtgttgtcaaagacattcttcttaagcaaaaatcagcttcgggactcgctcttctctatccaacaaaccggaataaatgggacaatcgtatgtcggcgatgataccagagatcgatgaagatgttatatatattatcggactactacaatccgctaccccaaaggatcttccagaagtggagagcgttaacgagaagataattaggttttgcaaggattcaggtattaagattaagcaatatctaatgcattatactagtaaagaagattggattgagcattttggatcaaaatgggatgatttttcgaagaggaaagatctatttgatcccaagaaactgttatctccagggcaagacatcttttgattaacttaatgtgatatgtcatttgtgaggtctaatatctaaaactataatatagttactatataataatagcattttggtggaagtaaaattgatcaataacattt

SEQ ID NO: 101152 - protein, 519 aa, Arabidopsis thaliana
  peptide (1)..(519): Ceres Seq. ID no. 13607131
  misc_feature (75)..(230): Pfam Name: FAD binding domain Pfam Description: FAD binding domain
  misc_feature (19)..(519): Homolog of NCBI NO: 18399056 NR Description: cytokinin oxidase family [Arabidopsis thaliana] Cytokinin oxidase 2 precursor (CKO 2) >gi|20197481|gb|AAD10149.2| cytokinin oxidase [Arabidopsis thaliana]
  misc_feature (19)..(519): Homolog of NCBI NO: 11120508 NR Description: cytokinin oxidase [Arabidopsis thaliana]
  misc_feature (19)..(519): Homolog of NCBI NO: 25345685 NR Description: probable cytokinin oxidase [imported] -
  misc_feature (22)..(519): Homolog of NCBI NO: 15233677 NR Description: cytokinin oxidase family [Arabidopsis thaliana]
  misc_feature (22)..(519): Homolog of NCBI NO: 11120512 NR Description: cytokinin oxidase [Arabidopsis thaliana]
  misc_feature (22)..(423): Homolog of NCBI NO: 30688430 NR Description: cytokinin oxidase family [Arabidopsis thaliana]
  misc_feature (21)..(519): Homolog of NCBI NO: 15241997 NR Description: cytokinin oxidase family [Arabidopsis thaliana] Cytokinin oxidase 3 precursor (CKO 3) >gi|8777437|dbj|BAA97027.1|
  misc_feature (21)..(519): Homolog of NCBI NO: 11558277 NR Description: cytokinin oxidase [Dendrobium cv. 'Sonia']
  misc_feature (57)..(519): Homolog of NCBI NO: 22330649 NR Description: cytokinin oxidase family [Arabidopsis thaliana]
  misc_feature (57)..(519): Homolog of NCBI NO: 11120516 NR Description: cytokinin oxidase [Arabidopsis thaliana]
VVILFFKNQIREREKHKQMANLRLMITLITVLMITKSSNGIKIDLPKSLNLTLSTDPSIISAASHDFGNITTVTPGGVICPSSTADISRLLQYAANGKSTFQVAARGQGHSLNGQASVSGGVIVNMTCITDVVVSKDKKYADVAAGTLWVDVLKKTAEKGVSPVSWTDYLHITVGGTLSNGGIGGQVFRNGPLVSNVLELDVITGKGEMLTCSRQLNPELFYGVLGGLGQFGIITRARIVLDHAPKRAKWFRMLYSDFTTFTKDQERLISMANDIGVDYLEGQIFLSNGVVDTSFFPPSDQSKVADLVKQHGIIYVLEVAKYYDDPNLPIISKVIDTLTKTLSYLPGFISMHDVAYFDFLNRVHVEENKLRSLGLWELPHPWLNLYVPKSRILDFHNGVVKDILLKQKSASGLALLYPTNRNKWDNRMSAMIPEIDEDVIYIIGLLQSATPKDLPEVESVNEKIIRFCKDSGIKIKQYLMHYTSKEDWIEHFGSKWDDFSKRKDLFDPKKLLSPGQDIF

SEQ ID NO: 101153 - protein, 501 aa, Arabidopsis thaliana
  peptide (1)..(501): Ceres Seq. ID no. 13607132
  misc_feature (57)..(212): Pfam Name: FAD binding domain Pfam Description: FAD binding domain
  misc_feature (1)..(501): Homolog of NCBI NO: 18399056 NR Description: cytokinin oxidase family [Arabidopsis thaliana] Cytokinin oxidase 2 precursor (CKO 2) >gi|20197481|gb|AAD10149.2| cytokinin oxidase [Arabidopsis thaliana]
  misc_feature (1)..(501): Homolog of NCBI NO: 11120508 NR Description: cytokinin oxidase [Arabidopsis thaliana]
  misc_feature (1)..(501): Homolog of NCBI NO: 25345685 NR Description: probable cytokinin oxidase [imported] -
  misc_feature (4)..(501): Homolog of NCBI NO: 15233677 NR Description: cytokinin oxidase family [Arabidopsis thaliana]
  misc_feature (4)..(501): Homolog of NCBI NO: 11120512 NR Description: cytokinin oxidase [Arabidopsis thaliana]
  misc_feature (4)..(405): Homolog of NCBI NO: 30688430 NR Description: cytokinin oxidase family [Arabidopsis thaliana]
  misc_feature (3)..(501): Homolog of NCBI NO: 15241997 NR Description: cytokinin oxidase family [Arabidopsis thaliana] Cytokinin oxidase 3 precursor (CKO 3) >gi|8777437|dbj|BAA97027.1|
  misc_feature (3)..(501): Homolog of NCBI NO: 11558277 NR Description: cytokinin oxidase [Dendrobium cv. 'Sonia']
  misc_feature (39)..(501): Homolog of NCBI NO: 22330649 NR Description: cytokinin oxidase family [Arabidopsis thaliana]
  misc_feature (39)..(501): Homolog of NCBI NO: 11120516 NR Description: cytokinin oxidase [Arabidopsis thaliana]
MANLRLMITLITVLMITKSSNGIKIDLPKSLNLTLSTDPSIISAASHDFGNITTVTPGGVICPSSTADISRLLQYAANGKSTFQVAARGQGHSLNGQASVSGGVIVNMTCITDVVVSKDKKYADVAAGTLWVDVLKKTAEKGVSPVSWTDYLHITVGGTLSNGGIGGQVFRNGPLVSNVLELDVITGKGEMLTCSRQLNPELFYGVLGGLGQFGIITRARIVLDHAPKRAKWFRMLYSDFTTFTKDQERLISMANDIGVDYLEGQIFLSNGVVDTSFFPPSDQSKVADLVKQHGIIYVLEVAKYYDDPNLPIISKVIDTLTKTLSYLPGFISMHDVAYFDFLNRVHVEENKLRSLGLWELPHPWLNLYVPKSRILDFHNGVVKDILLKQKSASGLALLYPTNRNKWDNRMSAMIPEIDEDVIYIIGLLQSATPKDLPEVESVNEKIIRFCKDSGIKIKQYLMHYTSKEDWIEHFGSKWDDFSKRKDLFDPKKLLSPGQDIF

SEQ ID NO: 101154 - protein, 495 aa, Arabidopsis thaliana
  peptide (1)..(495): Ceres Seq. ID no. 13607133
  misc_feature (51)..(206): Pfam Name: FAD binding domain Pfam Description: FAD binding domain
  misc_feature (1)..(495): Homolog of NCBI NO: 18399056 NR Description: cytokinin oxidase family [Arabidopsis thaliana] Cytokinin oxidase 2 precursor (CKO 2) >gi|20197481|gb|AAD10149.2| cytokinin oxidase [Arabidopsis thaliana]
  misc_feature (1)..(495): Homolog of NCBI NO: 11120508 NR Description: cytokinin oxidase [Arabidopsis thaliana]
  misc_feature (1)..(495): Homolog of NCBI NO: 25345685 NR Description: probable cytokinin oxidase [imported] -
  misc_feature (1)..(495): Homolog of NCBI NO: 15233677 NR Description: cytokinin oxidase family [Arabidopsis thaliana]
  misc_feature (1)..(495): Homolog of NCBI NO: 11120512 NR Description: cytokinin oxidase [Arabidopsis thaliana]
  misc_feature (1)..(399): Homolog of NCBI NO: 30688430 NR Description: cytokinin oxidase family [Arabidopsis thaliana]
  misc_feature (1)..(495): Homolog of NCBI NO: 15241997 NR Description: cytokinin oxidase family [Arabidopsis thaliana] Cytokinin oxidase 3 precursor (CKO 3) >gi|8777437|dbj|BAA97027.1|
  misc_feature (1)..(495): Homolog of NCBI NO: 11558277 NR Description: cytokinin oxidase [Dendrobium cv. 'Sonia']
  misc_feature (33)..(495): Homolog of NCBI NO: 22330649 NR Description: cytokinin oxidase family [Arabidopsis thaliana]
  misc_feature (33)..(495): Homolog of NCBI NO: 11120516 NR Description: cytokinin oxidase [Arabidopsis thaliana]
MITLITVLMITKSSNGIKIDLPKSLNLTLSTDPSIISAASHDFGNITTVTPGGVICPSSTADISRLLQYAANGKSTFQVAARGQGHSLNGQASVSGGVIVNMTCITDVVVSKDKKYADVAAGTLWVDVLKKTAEKGVSPVSWTDYLHITVGGTLSNGGIGGQVFRNGPLVSNVLELDVITGKGEMLTCSRQLNPELFYGVLGGLGQFGIITRARIVLDHAPKRAKWFRMLYSDFTTFTKDQERLISMANDIGVDYLEGQIFLSNGVVDTSFFPPSDQSKVADLVKQHGIIYVLEVAKYYDDPNLPIISKVIDTLTKTLSYLPGFISMHDVAYFDFLNRVHVEENKLRSLGLWELPHPWLNLYVPKSRILDFHNGVVKDILLKQKSASGLALLYPTNRNKWDNRMSAMIPEIDEDVIYIIGLLQSATPKDLPEVESVNEKIIRFCKDSGIKIKQYLMHYTSKEDWIEHFGSKWDDFSKRKDLFDPKKLLSPGQDIF

SEQ ID NO: 101155 - DNA, 1916 bp, Arabidopsis thaliana
  misc_feature (1)..(1916): Ceres Seq. ID no. 13607150
  misc_feature: MA Experiment ID: 20000440 Result: Up-regulated in Transcription
  misc_feature: MA Experiment 20000440 PARAMETER Experiment Name: At_Closed-Flower__Sub_P Parameter: Tissue Value: Closed Flower vs. Whole Plant
tgtggactcaaagctattttaagtacaacacacgtggagaaagcagatacattgtctcgtaacagaaaacaaactcaagaatggacccaatcttagagttctaacaatcttaatctcatgtctcttgatgatccccaaagcaaatccagatcaatgtgtgttccagagtttaacagcaacaacaacacgacgaccttcgcacagattttagtaatctcatccattggcttactcttagcccttgcactgcacttccgtctaaggaagctacgtcactccaagaacatccctcgtctcagatcgtctcaaaaacacaaaggccatgagaagcttgagagattctctcactatgttgtgcggcagatgggattcaaggacaggagagaatgtcctcatctctgcaaattagctaatgagtacataagaaaatcaggcagctgtgaggaagacatatacagcttcttctctgaagagcctggtgctgattctctcttcattaagctcgttgaagagtttgagagatgtattcttagttactttgcttaccactggagccatgcggatctcatgatcagtcagatactcagtgccgatgtagagcctaagaagaagctaaagcacattgtcatggcggctacaagggaacagaggtttgagagggtgactaaaaatctaaaagtggcaagagtgtttaacacattggtagaggaaatgaaagcaatggggatcgcatctgttgatgactcagagtgtacagaagttatggctccagttgcacacaaggaccgaagcccggttctacttcttatgggaggtggtatgggtgcaggaaagagcactgtgcttaaagacattctcaaagaaccgttttgggcaggagctgatgctgtggtgattgaagccgatgcttttaaagaatctgatgtgatatacagagctttaagcgccagaggtcatgttgatatgatcaagactgctgaattcgttcaccaatcatcaacagacgcagcatcatcgctgctcgttacagctctcaacgaagggcgagacgtgataatggatggaacactctcttgggtaccatttgtggttcagaccataacaatggcgaggaatgtgcatcgccatcgttacagaatgggagctggctacaaggttggtgagaatggagatgttatagagaactattgggaacgcataggcgaaaggcaacagcttcaagaagatggaagggagagaaagccatacaggatagagttagttggagttgtatgtgatgcatatttagcagtgattcgaggaattaggagagctataatgtgtagaagagcagttagagtgaggtctcagctgagatctcacaagaggtttgcgaatgcgtttcttacctattgcaacttagttgacaatgctagactttactgcaccaatgctcttgaaggttctccaaagctgatagggtggaaagagaaggaaaagacattgctagtggatccagaggagatagactgtttgaagaatgtagggaggttaaacgagaatgcagattctatttacgagctatacagaaatccaaatcctgcttgtgaagctggatcaatatggaaagacattgttctttctccttctaggttcaacattcaacaagagctcaaatactcaattcagaaagtggaaagattcaaacagtatctccaagaaacaccaagatgagagatgaagatagataaacgcagaagatctcttagctttttttttcccggtatgtcattcatttatgtaactcctaaaacatcaaacaaaattgaatctctctagtaaagagagaattggcaacacctaacctaagagatagttacattgtcaagcttggtcttaagagatgtttaaggaagcaaatgtatgacatgattcag

SEQ ID NO: 101156 - protein, 531 aa, Arabidopsis thaliana
  peptide (1)..(531): Ceres Seq. ID no. 13607151
  misc_feature (1)..(531): Homolog of NCBI NO: 15224537 NR Description: hypothetical protein [Arabidopsis thaliana]
  misc_feature (13)..(531): Homolog of NCBI NO: 28207050 NR Description: hypothetical protein [Arabidopsis thaliana]
  misc_feature (101)..(531): Homolog of NCBI NO: 28207052 NR Description: hypothetical protein [Arabidopsis thaliana]
  misc_feature (13)..(155): Homolog of NCBI NO: 28207052 NR Description: hypothetical protein [Arabidopsis thaliana]
  misc_feature (39)..(526): Homolog of NCBI NO: 15222183 NR Description: hypothetical protein [Arabidopsis thaliana]
  misc_feature (64)..(521): Homolog of NCBI NO: 99733 NR Description: hypothetical protein H1flk - Arabidopsis thaliana
  misc_feature (64)..(521): Homolog of NCBI NO: 15219698 NR Description: expressed protein [Arabidopsis thaliana]
  misc_feature (39)..(249): Homolog of NCBI NO: 25406934 NR Description: hypothetical protein [imported] - Arabidopsis >gi|7523704|gb|AAF63143.1|AC011001_13 Hypothetical protein
  misc_feature (377)..(526): Homolog of NCBI NO: 25406934 NR Description: hypothetical protein [imported] - Arabidopsis >gi|7523704|gb|AAF63143.1|AC011001_13 Hypothetical protein
  misc_feature (256)..(526): Homolog of NCBI NO: 1076336 NR Description: hypothetical protein H1.1flk - Arabidopsis
MSLDDPQSKSRSMCVPEFNSNNNTTTFAQILVISSIGLLLALALHFRLRKLRHSKNIPRLRSSQKHKGHEKLERFSHYVVRQMGFKDRRECPHLCKLANEYIRKSGSCEEDIYSFFSEEPGADSLFIKLVEEFERCILSYFAYHWSHADLMISQILSADVEPKKKLKHIVMAATREQRFERVTKNLKVARVFNTLVEEMKAMGIASVDDSECTEVMAPVAHKDRSPVLLLMGGGMGAGKSTVLKDILKEPFWAGADAVVIEADAFKESDVIYRALSARGHVDMIKTAEFVHQSSTDAASSLLVTALNEGRDVIMDGTLSWVPFVVQTITMARNVHRHRYRMGAGYKVGENGDVIENYWERIGERQQLQEDGRERKPYRIELVGVVCDAYLAVIRGIRRAIMCRRAVRVRSQLRSHKRFANAFLTYCNLVDNARLYCTNALEGSPKLIGWKEKEKTLLVDPEEIDCLKNVGRLNENADSIYELYRNPNPACEAGSIWKDIVLSPSRFNIQQELKYSIQKVERFKQYLQETPR

SEQ ID NO: 101157 - protein, 519 aa, Arabidopsis thaliana
  peptide (1)..(519): Ceres Seq. ID no. 13607152
  misc_feature (1)..(519): Homolog of NCBI NO: 15224537 NR Description: hypothetical protein [Arabidopsis thaliana]
  misc_feature (1)..(519): Homolog of NCBI NO: 28207050 NR Description: hypothetical protein [Arabidopsis thaliana]
  misc_feature (89)..(519): Homolog of NCBI NO: 28207052 NR Description: hypothetical protein [Arabidopsis thaliana]
  misc_feature (1)..(143): Homolog of NCBI NO: 28207052 NR Description: hypothetical protein [Arabidopsis thaliana]
  misc_feature (27)..(514): Homolog of NCBI NO: 15222183 NR Description: hypothetical protein [Arabidopsis thaliana]
  misc_feature (52)..(509): Homolog of NCBI NO: 99733 NR Description: hypothetical protein H1flk - Arabidopsis thaliana
  misc_feature (52)..(509): Homolog of NCBI NO: 15219698 NR Description: expressed protein [Arabidopsis thaliana]
  misc_feature (27)..(237): Homolog of NCBI NO: 25406934 NR Description: hypothetical protein [imported] - Arabidopsis >gi|7523704|gb|AAF63143.1|AC011001_13 Hypothetical protein
  misc_feature (365)..(514): Homolog of NCBI NO: 25406934 NR Description: hypothetical protein [imported] - Arabidopsis >gi|7523704|gb|AAF63143.1|AC011001_13 Hypothetical protein
  misc_feature (244)..(514): Homolog of NCBI NO: 1076336 NR Description: hypothetical protein H1.1flk - Arabidopsis
MCVPEFNSNNNTTTFAQILVISSIGLLLALALHFRLRKLRHSKNIPRLRSSQKHKGHEKLERFSHYVVRQMGFKDRRECPHLCKLANEYIRKSGSCEEDIYSFFSEEPGADSLFIKLVEEFERCILSYFAYHWSHADLMISQILSADVEPKKKLKHIVMAATREQRFERVTKNLKVARVFNTLVEEMKAMGIASVDDSECTEVMAPVAHKDRSPVLLLMGGGMGAGKSTVLKDILKEPFWAGADAVVIEADAFKESDVIYRALSARGHVDMIKTAEFVHQSSTDAASSLLVTALNEGRDVIMDGTLSWVPFVVQTITMARNVHRHRYRMGAGYKVGENGDVIENYWERIGERQQLQEDGRERKPYRIELVGVVCDAYLAVIRGIRRAIMCRRAVRVRSQLRSHKRFANAFLTYCNLVDNARLYCTNALEGSPKLIGWKEKEKTLLVDPEEIDCLKNVGRLNENADSIYELYRNPNPACEAGSIWKDIVLSPSRFNIQQELKYSIQKVERFKQYLQETPR

SEQ ID NO: 101158 - protein, 449 aa, Arabidopsis thaliana
  peptide (1)..(449): Ceres Seq. ID no. 13607153
  misc_feature (1)..(449): Homolog of NCBI NO: 15224537 NR Description: hypothetical protein [Arabidopsis thaliana]
  misc_feature (1)..(449): Homolog of NCBI NO: 28207050 NR Description: hypothetical protein [Arabidopsis thaliana]
  misc_feature (19)..(449): Homolog of NCBI NO: 28207052 NR Description: hypothetical protein [Arabidopsis thaliana]
  misc_feature (1)..(73): Homolog of NCBI NO: 28207052 NR Description: hypothetical protein [Arabidopsis thaliana]
  misc_feature (1)..(444): Homolog of NCBI NO: 15222183 NR Description: hypothetical protein [Arabidopsis thaliana]
  misc_feature (1)..(439): Homolog of NCBI NO: 99733 NR Description: hypothetical protein H1flk - Arabidopsis thaliana
  misc_feature (1)..(439): Homolog of NCBI NO: 15219698 NR Description: expressed protein [Arabidopsis thaliana]
  misc_feature (1)..(167): Homolog of NCBI NO: 25406934 NR Description: hypothetical protein [imported] - Arabidopsis >gi|7523704|gb|AAF63143.1|AC011001_13 Hypothetical protein
  misc_feature (295)..(444): Homolog of NCBI NO: 25406934 NR Description: hypothetical protein [imported] - Arabidopsis >gi|7523704|gb|AAF63143.1|AC011001_13 Hypothetical protein
  misc_feature (174)..(444): Homolog of NCBI NO: 1076336 NR Description: hypothetical protein H1.1flk - Arabidopsis
MGFKDRRECPHLCKLANEYIRKSGSCEEDIYSFFSEEPGADSLFIKLVEEFERCILSYFAYHWSHADLMISQILSADVEPKKKLKHIVMAATREQRFERVTKNLKVARVFNTLVEEMKAMGIASVDDSECTEVMAPVAHKDRSPVLLLMGGGMGAGKSTVLKDILKEPFWAGADAVVIEADAFKESDVIYRALSARGHVDMIKTAEFVHQSSTDAASSLLVTALNEGRDVIMDGTLSWVPFVVQTITMARNVHRHRYRMGAGYKVGENGDVIENYWERIGERQQLQEDGRERKPYRIELVGVVCDAYLAVIRGIRRAIMCRRAVRVRSQLRSHKRFANAFLTYCNLVDNARLYCTNALEGSPKLIGWKEKEKTLLVDPEEIDCLKNVGRLNENADSIYELYRNPNPACEAGSIWKDIVLSPSRFNIQQELKYSIQKVERFKQYLQETPR

SEQ ID NO: 101159 - DNA, 994 bp, Arabidopsis thaliana
  misc_feature (1)..(994): Ceres Seq. ID no. 13607158
  misc_feature: MA Experiment ID: 20000166 Result: Up-regulated in Transcription
  misc_feature: MA Experiment 20000166 PARAMETER Experiment Name: At_100uM_ABA_P Parameter: Age (day) Value: 14
  misc_feature: MA Experiment 20000166 PARAMETER Experiment Name: At_100uM_ABA_P Parameter: Organism Value: A. thaliana
  misc_feature: MA Experiment 20000166 PARAMETER Experiment Name: At_100uM_ABA_P Parameter: Plant Line Value: WS
  misc_feature: MA Experiment 20000166 PARAMETER Experiment Name: At_100uM_ABA_P Parameter: Timepoint (hr) Value: 1
  misc_feature: MA Experiment 20000166 PARAMETER Experiment Name: At_100uM_ABA_P Parameter: Tissue Value: Aerial
  misc_feature: MA Experiment 20000166 PARAMETER Experiment Name: At_100uM_ABA_P Parameter: Treatment Value: 100uM ABA vs. No Treatment
  misc_feature: MA Experiment ID: 20000169 Result: Up-regulated in Transcription
  misc_feature: MA Experiment 20000169 PARAMETER Experiment Name: At_100uM_ABA_P Parameter: Age (day) Value: 14
  misc_feature: MA Experiment 20000169 PARAMETER Experiment Name: At_100uM_ABA_P Parameter: Organism Value: A. thaliana
  misc_feature: MA Experiment 20000169 PARAMETER Experiment Name: At_100uM_ABA_P Parameter: Plant Line Value: WS
  misc_feature: MA Experiment 20000169 PARAMETER Experiment Name: At_100uM_ABA_P Parameter: Timepoint (hr) Value: 6
  misc_feature: MA Experiment 20000169 PARAMETER Experiment Name: At_100uM_ABA_P Parameter: Tissue Value: Aerial
  misc_feature: MA Experiment 20000169 PARAMETER Experiment Name: At_100uM_ABA_P Parameter: Treatment Value: 100uM ABA vs. No Treatment
  misc_feature: MA Experiment ID: 20000171 Result: Down-regulated in Transcription
  misc_feature: MA Experiment 20000171 PARAMETER Experiment Name: At_42deg_Heat_P Parameter: Age (day) Value: 14
  misc_feature: MA Experiment 20000171 PARAMETER Experiment Name: At_42deg_Heat_P Parameter: Organism Value: A. thaliana
  misc_feature: MA Experiment 20000171 PARAMETER Experiment Name: At_42deg_Heat_P Parameter: Plant Line Value: WS
  misc_feature: MA Experiment 20000171 PARAMETER Experiment Name: At_42deg_Heat_P Parameter: Temperature (deg C) Value: 42 vs. 22
  misc_feature: MA Experiment 20000171 PARAMETER Experiment Name: At_42deg_Heat_P Parameter: Timepoint (hr) Value: 1
  misc_feature: MA Experiment 20000171 PARAMETER Experiment Name: At_42deg_Heat_P Parameter: Tissue Value: Aerial
  misc_feature: MA Experiment ID: 20000173 Result: Down-regulated in Transcription
  misc_feature: MA Experiment 20000173 PARAMETER Experiment Name: At_42deg_Heat_P Parameter: Age (day) Value: 14
  misc_feature: MA Experiment 20000173 PARAMETER Experiment Name: At_42deg_Heat_P Parameter: Organism Value: A. thaliana
  misc_feature: MA Experiment 20000173 PARAMETER Experiment Name: At_42deg_Heat_P Parameter: Plant Line Value: WS
  misc_feature: MA Experiment 20000173 PARAMETER Experiment Name: At_42deg_Heat_P Parameter: Temperature (deg C) Value: 42 vs. 22
  misc_feature: MA Experiment 20000173 PARAMETER Experiment Name: At_42deg_Heat_P Parameter: Timepoint (hr) Value: 6
  misc_feature: MA Experiment 20000173 PARAMETER Experiment Name: At_42deg_Heat_P Parameter: Tissue Value: Aerial
  misc_feature: MA Experiment ID: 20000182 Result: Up-regulated in Transcription
  misc_feature: MA Experiment 20000182 PARAMETER Experiment Name: At_2mM_SA_P Parameter: Age (day) Value: 14
  misc_feature: MA Experiment 20000182 PARAMETER Experiment Name: At_2mM_SA_P Parameter: Organism Value: A. thaliana
  misc_feature: MA Experiment 20000182 PARAMETER Experiment Name: At_2mM_SA_P Parameter: Plant Line Value: WS
  misc_feature: MA Experiment 20000182 PARAMETER Experiment Name: At_2mM_SA_P Parameter: Timepoint (hr) Value: 6
  misc_feature: MA Experiment 20000182 PARAMETER Experiment Name: At_2mM_SA_P Parameter: Tissue Value: Aerial
  misc_feature: MA Experiment 20000182 PARAMETER Experiment Name: At_2mM_SA_P Parameter: Treatment Value: 2mM SA vs. No Treatment
  misc_feature: MA Experiment ID: 20000184 Result: Down-regulated in Transcription
  misc_feature: MA Experiment 20000184 PARAMETER Experiment Name: At_Shoots__P Parameter: Age (day) Value: 7
  misc_feature: MA Experiment 20000184 PARAMETER Experiment Name: At_Shoots__P Parameter: Tissue Value: Shoots vs. Whole Plant
  misc_feature: MA Experiment ID: 20000227 Result: Down-regulated in Transcription
  misc_feature: MA Experiment 20000227 PARAMETER Experiment Name: At_Root-Tips-vs-Tops_P Parameter: Tissue Value: Root Tips vs. Root Tops
  misc_feature: MA Experiment ID: 20000234 Result: Down-regulated in Transcription
  misc_feature: MA Experiment 20000234 PARAMETER Experiment Name: At_Siliques_P Parameter: Age (day) Value: 21
  misc_feature: MA Experiment 20000234 PARAMETER Experiment Name: At_Siliques_P Parameter: Organism Value: A. thaliana
  misc_feature: MA Experiment 20000234 PARAMETER Experiment Name: At_Siliques_P Parameter: Plant Line Value: WS
  misc_feature: MA Experiment 20000234 PARAMETER Experiment Name: At_Siliques_P Parameter: Tissue Value: Less Than 5mm Siliques vs. Whole Plant
  misc_feature: MA Experiment ID: 20000235 Result: Down-regulated in Transcription
  misc_feature: MA Experiment 20000235 PARAMETER Experiment Name: At_Siliques_P Parameter: Age (day) Value: 21
  misc_feature: MA Experiment 20000235 PARAMETER Experiment Name: At_Siliques_P Parameter: Organism Value: A. thaliana
  misc_feature: MA Experiment 20000235 PARAMETER Experiment Name: At_Siliques_P Parameter: Plant Line Value: WS
  misc_feature: MA Experiment 20000235 PARAMETER Experiment Name: At_Siliques_P Parameter: Tissue Value: 5-10mm Siliques vs. Whole Plant
  misc_feature: MA Experiment ID: 20000264 Result: Down-regulated in Transcription
  misc_feature: MA Experiment 20000264 PARAMETER Experiment Name: At_Open_Flower_P Parameter: Age (day) Value: 21
  misc_feature: MA Experiment 20000264 PARAMETER Experiment Name: At_Open_Flower_P Parameter: Plant Line Value: WS
  misc_feature: MA Experiment 20000264 PARAMETER Experiment Name: At_Open_Flower_P Parameter: Tissue Value: Open Flower vs. Whole Plant
  misc_feature: MA Experiment ID: 20000265 Result: Down-regulated in Transcription
  misc_feature: MA Experiment 20000265 PARAMETER Experiment Name: At_Open_Flower_P Parameter: Age (day) Value: 21
  misc_feature: MA Experiment 20000265 PARAMETER Experiment Name: At_Open_Flower_P Parameter: Plant Line Value: WS
  misc_feature: MA Experiment 20000265 PARAMETER Experiment Name: At_Open_Flower_P Parameter: Tissue Value: Closed Flower vs. Whole Plant
  misc_feature: MA Experiment ID: 20000267 Result: Up-regulated in Transcription
  misc_feature: MA Experiment 20000267 PARAMETER Experiment Name: At_Drought_P Parameter: Age (day) Value: 7
  misc_feature: MA Experiment 20000267 PARAMETER Experiment Name: At_Drought_P Parameter: Organism Value: A. thaliana
  misc_feature: MA Experiment 20000267 PARAMETER Experiment Name: At_Drought_P Parameter: Plant Line Value: WS
  misc_feature: MA Experiment 20000267 PARAMETER Experiment Name: At_Drought_P Parameter: Timepoint (hr) Value: 6
  misc_feature: MA Experiment 20000267 PARAMETER Experiment Name: At_Drought_P Parameter: Tissue Value: Whole Plant
  misc_feature: MA Experiment 20000267 PARAMETER Experiment Name: At_Drought_P Parameter: Treatment Value: Drought vs. No Drought
  misc_feature: MA Experiment ID: 20000286 Result: Down-regulated in Transcription
  misc_feature: MA Experiment 20000286 PARAMETER Experiment Name: At_Open_Flower_P Parameter: Age (day) Value: 21
  misc_feature: MA Experiment 20000286 PARAMETER Experiment Name: At_Open_Flower_P Parameter: Plant Line Value: WS
  misc_feature: MA Experiment 20000286 PARAMETER Experiment Name: At_Open_Flower_P Parameter: Tissue Value: Half Open vs. Whole Plant
  misc_feature: MA Experiment ID: 20000436 Result: Up-regulated in Transcription
  misc_feature: MA Experiment 20000436 PARAMETER Experiment Name: At_Drought_P Parameter: Age (day) Value: 7
  misc_feature: MA Experiment 20000436 PARAMETER Experiment Name: At_Drought_P Parameter: Organism Value: A. thaliana
  misc_feature: MA Experiment 20000436 PARAMETER Experiment Name: At_Drought_P Parameter: Plant Line Value: WS
  misc_feature: MA Experiment 20000436 PARAMETER Experiment Name: At_Drought_P Parameter: Timepoint (hr) Value: 12
  misc_feature: MA Experiment 20000436 PARAMETER Experiment Name: At_Drought_P Parameter: Tissue Value: Whole Plant
  misc_feature: MA Experiment 20000436 PARAMETER Experiment Name: At_Drought_P Parameter: Treatment Value: Drought vs. No Drought
  misc_feature: MA Experiment ID: 20000437 Result: Up-regulated in Transcription
  misc_feature: MA Experiment 20000437 PARAMETER Experiment Name: At_Drought_P Parameter: Age (day) Value: 8
  misc_feature: MA Experiment 20000437 PARAMETER Experiment Name: At_Drought_P Parameter: Organism Value: A. thaliana
  misc_feature: MA Experiment 20000437 PARAMETER Experiment Name: At_Drought_P Parameter: Plant Line Value: WS
  misc_feature: MA Experiment 20000437 PARAMETER Experiment Name: At_Drought_P Parameter: Timepoint (hr) Value: 24
  misc_feature: MA Experiment 20000437 PARAMETER Experiment Name: At_Drought_P Parameter: Tissue Value: Whole Plant
  misc_feature: MA Experiment 20000437 PARAMETER Experiment Name: At_Drought_P Parameter: Treatment Value: Drought vs. No Drought
  misc_feature: MA Experiment ID: 20000438 Result: Down-regulated in Transcription
  misc_feature: MA Experiment 20000438 PARAMETER Experiment Name: At_Shoots__P Parameter: Age (day) Value: 14
  misc_feature: MA Experiment 20000438 PARAMETER Experiment Name: At_Shoots__P Parameter: Tissue Value: Shoots vs. Whole Plant
  misc_feature: MA Experiment ID: 20000445 Result: Up-regulated in Transcription
  misc_feature: MA Experiment 20000445 PARAMETER Experiment Name: At_100uM_NAA__P Parameter: Age (day) Value: 14
  misc_feature: MA Experiment 20000445 PARAMETER Experiment Name: At_100uM_NAA__P Parameter: Organism Value: A. thaliana
  misc_feature: MA Experiment 20000445 PARAMETER Experiment Name: At_100uM_NAA__P Parameter: Plant Line Value: WS
  misc_feature: MA Experiment 20000445 PARAMETER Experiment Name: At_100uM_NAA__P Parameter: Timepoint (hr) Value: 6
  misc_feature: MA Experiment 20000445 PARAMETER Experiment Name: At_100uM_NAA__P Parameter: Tissue Value: Aerial
  misc_feature: MA Experiment 20000445 PARAMETER Experiment Name: At_100uM_NAA__P Parameter: Treatment Value: 100uM NAA vs. No Treatment
  misc_feature: MA Experiment ID: 20000453 Result: Up-regulated in Transcription
  misc_feature: MA Experiment 20000453 PARAMETER Experiment Name: At_100uM_ABA_P Parameter: Age (day) Value: 15
  misc_feature: MA Experiment 20000453 PARAMETER Experiment Name: At_100uM_ABA_P Parameter: Organism Value: A. thaliana
  misc_feature: MA Experiment 20000453 PARAMETER Experiment Name: At_100uM_ABA_P Parameter: Plant Line Value: WS
  misc_feature: MA Experiment 20000453 PARAMETER Experiment Name: At_100uM_ABA_P Parameter: Timepoint (hr) Value: 24
  misc_feature: MA Experiment 20000453 PARAMETER Experiment Name: At_100uM_ABA_P Parameter: Tissue Value: Aerial
  misc_feature: MA Experiment 20000453 PARAMETER Experiment Name: At_100uM_ABA_P Parameter: Treatment Value: 100uM ABA vs. No Treatment
  misc_feature: MA Experiment ID: 20000527 Result: Down-regulated in Transcription
  misc_feature: MA Experiment 20000527 PARAMETER Experiment Name: At_10percent_PEG_P Parameter: Age (day) Value: 20
  misc_feature: MA Experiment 20000527 PARAMETER Experiment Name: At_10percent_PEG_P Parameter: Organism Value: A. thaliana
  misc_feature: MA Experiment 20000527 PARAMETER Experiment Name: At_10percent_PEG_P Parameter: Plant Line Value: WS
  misc_feature: MA Experiment 20000527 PARAMETER Experiment Name: At_10percent_PEG_P Parameter: Timepoint (day) Value: 20
  misc_feature: MA Experiment 20000527 PARAMETER Experiment Name: At_10percent_PEG_P Parameter: Tissue Value: Whole Plant
  misc_feature: MA Experiment 20000527 PARAMETER Experiment Name: At_10percent_PEG_P Parameter: Treatment Value: 10percent PEG vs. No Treatment
  misc_feature: MA Experiment ID: 20000709 Result: Down-regulated in Transcription
  misc_feature: MA Experiment 20000709 PARAMETER Experiment Name: At_15mM_NH4NO3_L-to-H_P Parameter: Age (hr) Value: 14
  misc_feature: MA Experiment 20000709 PARAMETER Experiment Name: At_15mM_NH4NO3_L-to-H_P Parameter: Organism Value: A. thaliana
  misc_feature: MA Experiment 20000709 PARAMETER Experiment Name: At_15mM_NH4NO3_L-to-H_P Parameter: Plant Line Value: WS
  misc_feature: MA Experiment 20000709 PARAMETER Experiment Name: At_15mM_NH4NO3_L-to-H_P Parameter: Timepoint (hr) Value: 4
  misc_feature: MA Experiment 20000709 PARAMETER Experiment Name: At_15mM_NH4NO3_L-to-H_P Parameter: Tissue Value: Aerial
  misc_feature: MA Experiment 20000709 PARAMETER Experiment Name: At_15mM_NH4NO3_L-to-H_P Parameter: Treatment Value: 15mM NH4NO3 vs. 30mM Mannitol
  misc_feature: MA Experiment ID: 20000794 Result: Down-regulated in Transcription
  misc_feature: MA Experiment 20000794 PARAMETER Experiment Name: At_Petals_P Parameter: Age (day) Value: 23-25 days
  misc_feature: MA Experiment 20000794 PARAMETER Experiment Name: At_Petals_P Parameter: Plant Line Value: WS
  misc_feature: MA Experiment 20000794 PARAMETER Experiment Name: At_Petals_P Parameter: Tissue Value: Petals vs. Whole plant
  misc_feature: MA Experiment ID: 20001558 Result: Down-regulated in Transcription
  misc_feature: MA Experiment 20001558 PARAMETER Experiment Name: At_Drought_Soil_Dry_P Parameter: Age (day) Value: 27
  misc_feature: MA Experiment 20001558 PARAMETER Experiment Name: At_Drought_Soil_Dry_P Parameter: Organism Value: A. thaliana
  misc_feature: MA Experiment 20001558 PARAMETER Experiment Name: At_Drought_Soil_Dry_P Parameter: Plant Line Value: WS
  misc_feature: MA Experiment 20001558 PARAMETER Experiment Name: At_Drought_Soil_Dry_P Parameter: Post Timepoint (hr) Value: 6
  misc_feature: MA Experiment 20001558 PARAMETER Experiment Name: At_Drought_Soil_Dry_P Parameter: Post-Treatment Value: Re-Water vs. No Drought
  misc_feature: MA Experiment 20001558 PARAMETER Experiment Name: At_Drought_Soil_Dry_P Parameter: Timepoint (day) Value: 13
  misc_feature: MA Experiment 20001558 PARAMETER Experiment Name: At_Drought_Soil_Dry_P Parameter: Treatment Value: Drought vs. No Drought
  misc_feature: MA Experiment ID: 20001560 Result: Down-regulated in Transcription
  misc_feature: MA Experiment 20001560 PARAMETER Experiment Name: At_Drought_Soil_Dry_P Parameter: Age (day) Value: 28
  misc_feature: MA Experiment 20001560 PARAMETER Experiment Name: At_Drought_Soil_Dry_P Parameter: Organism Value: A. thaliana
  misc_feature: MA Experiment 20001560 PARAMETER Experiment Name: At_Drought_Soil_Dry_P Parameter: Plant Line Value: WS
  misc_feature: MA Experiment 20001560 PARAMETER Experiment Name: At_Drought_Soil_Dry_P Parameter: Post Timepoint (hr) Value: None
  misc_feature: MA Experiment 20001560 PARAMETER Experiment Name: At_Drought_Soil_Dry_P Parameter: Post-Treatment Value: None
  misc_feature: MA Experiment 20001560 PARAMETER Experiment Name: At_Drought_Soil_Dry_P Parameter: Timepoint (day) Value: 14
  misc_feature: MA Experiment 20001560 PARAMETER Experiment Name: At_Drought_Soil_Dry_P Parameter: Treatment Value: Drought vs. No Drought
  misc_feature: MA Experiment ID: 20001768 Result: Up-regulated in Transcription
  misc_feature: MA Experiment 20001768 PARAMETER Experiment Name: At_Far-red-enriched-adult_P Parameter: Age (day) Value: 28
  misc_feature: MA Experiment 20001768 PARAMETER Experiment Name: At_Far-red-enriched-adult_P Parameter: Light Value: Far-red enriched vs. White
  misc_feature: MA Experiment 20001768 PARAMETER Experiment Name: At_Far-red-enriched-adult_P Parameter: Organism Value: A. thaliana
  misc_feature: MA Experiment 20001768 PARAMETER Experiment Name: At_Far-red-enriched-adult_P Parameter: Plant Line Value: Columbia
  misc_feature: MA Experiment 20001768 PARAMETER Experiment Name: At_Far-red-enriched-adult_P Parameter: Timepoint (hr) Value: 1
  misc_feature: MA Experiment 20001768 PARAMETER Experiment Name: At_Far-red-enriched-adult_P Parameter: Tissue Value: Aerial
  misc_feature: MA Experiment ID: 20001773 Result: Down-regulated in Transcription
  misc_feature: MA Experiment 20001773 PARAMETER Experiment Name: At_Far-red-enriched-adult_P Parameter: Age (day) Value: 30
  misc_feature: MA Experiment 20001773 PARAMETER Experiment Name: At_Far-red-enriched-adult_P Parameter: Light Value: Far-red enriched vs. White
  misc_feature: MA Experiment 20001773 PARAMETER Experiment Name: At_Far-red-enriched-adult_P Parameter: Organism Value: A. thaliana
  misc_feature: MA Experiment 20001773 PARAMETER Experiment Name: At_Far-red-enriched-adult_P Parameter: Plant Line Value: Columbia
  misc_feature: MA Experiment 20001773 PARAMETER Experiment Name: At_Far-red-enriched-adult_P Parameter: Timepoint (hr) Value: 48
  misc_feature: MA Experiment 20001773 PARAMETER Experiment Name: At_Far-red-enriched-adult_P Parameter: Tissue Value: Aerial
  misc_feature: MA Experiment ID: 20001911 Result: Up-regulated in Transcription
  misc_feature: MA Experiment 20001911 PARAMETER Experiment Name: At_Drought_Reproduction_P Parameter: Age (day) Value: 40
  misc_feature: MA Experiment 20001911 PARAMETER Experiment Name: At_Drought_Reproduction_P Parameter: Organism Value: A. thaliana
  misc_feature: MA Experiment 20001911 PARAMETER Experiment Name: At_Drought_Reproduction_P Parameter: Plant Line Value: WS
  misc_feature: MA Experiment 20001911 PARAMETER Experiment Name: At_Drought_Reproduction_P Parameter: Timepoint (day) Value: 10
  misc_feature: MA Experiment 20001911 PARAMETER Experiment Name: At_Drought_Reproduction_P Parameter: Tissue Value: Flowers
  misc_feature: MA Experiment 20001911 PARAMETER Experiment Name: At_Drought_Reproduction_P Parameter: Treatment Value: Drought vs. No Drought
tggcggtctgcatcacagacacaaaaacaatggctaaacccacatcacgaaatgaccgatttgcccttttcttcataaccctaattttcctgatcctaaccgtttccaaaccggtcgcctctcaaaactgtggctgcgcctctgacttctgttgcagcaaatatggctactgtggtacgaccgatgagttctgcggcgagggctgccaggcaggaccttgccggagcagtggaggcggtggagatcctgctgtttcactagaaggaacggtgacacctgacttctttaactctatactaaaccaaagaggtgattgtcctggcaaaggattctacactcacgacaccttcatggccgcagctaattcttaccctagcttcggtgcttccatctccaaacgcgaaatcgcggcgtttttcgctcacgtagcccaagaaacagggttcatgtgttacattgaggaaattgatggaccagccaaggccgcatccggagagtactgcgacacagagaaaccagagttcccatgtgcacaaggaaagggctactatggccgtggtgcaatccagctctcttggaactacaactacggtctctgtggcaaagccttggacgagaacttattggcttcaccagagaaagttgctcaagaccaggttcttgccttcaagaccgctttctggttctggaccactaatgttcgcacgagttttaaatcgggctttggcgcaacaatcagggcagtgaatagtagggagtgtagcggaggagattctacagccaaagccgccaacaggattaagtatttccaagactattgtggcaagcttggagttgcacctggagataacctcacttgttaaagtttccttgctatccatccgaaacacaactagtgtttgaaaaacttagagatcacataagagaaagtatcatattagtataataatgttgtaatacttcacattttaccaaaaataataataataatgtt

SEQ ID NO: 101160 - protein, 286 aa, Arabidopsis thaliana
  peptide (1)..(286): Ceres Seq. ID no. 13607159
  misc_feature (89)..(286): Pfam Name: Chitinase class I Pfam Description: Chitinase class I
  misc_feature (10)..(286): Homolog of NCBI NO: 15224308 NR Description: glycosyl hydrolase family 19 (chitinase)
  misc_feature (11)..(286): Homolog of NCBI NO: 14486393 NR Description: chitinase class 4-like protein [Brassica napus]
  misc_feature (26)..(286): Homolog of NCBI NO: 2129790 NR Description: chitinase class IV precursor - rape (fragment)
  misc_feature (27)..(286): Homolog of NCBI NO: 584929 NR Description: Basic endochitinase CHB4 precursor
  misc_feature (30)..(286): Homolog of NCBI NO: 15213850 NR Description: chitinase-B [Sorghum arundinaceum]
  misc_feature (30)..(286): Homolog of NCBI NO: 15529117 NR Description: chitinase-B [Sorghum bicolor]
  misc_feature (25)..(286): Homolog of NCBI NO: 15224312 NR Description: glycosyl hydrolase family 19 (chitinase)
  misc_feature (30)..(286): Homolog of NCBI NO: 15529121 NR Description: chitinase-B [Sorghum bicolor]
  misc_feature (30)..(286): Homolog of NCBI NO: 15529119 NR Description: chitinase-B1 [Sorghum bicolor]
  misc_feature (25)..(286): Homolog of NCBI NO: 15213848 NR Description: chitinase-B [Saccharum officinarum]
AVCITDTKTMAKPTSRNDRFALFFITLIFLILTVSKPVASQNCGCASDFCCSKYGYCGTTDEFCGEGCQAGPCRSSGGGGDPAVSLEGTVTPDFFNSILNQRGDCPGKGFYTHDTFMAAANSYPSFGASISKREIAAFFAHVAQETGFMCYIEEIDGPAKAASGEYCDTEKPEFPCAQGKGYYGRGAIQLSWNYNYGLCGKALDENLLASPEKVAQDQVLAFKTAFWFWTTNVRTSFKSGFGATIRAVNSRECSGGDSTAKAANRIKYFQDYCGKLGVAPGDNLTC

SEQ ID NO: 101161 - protein, 277 aa, Arabidopsis thaliana
  peptide (1)..(277): Ceres Seq. ID no. 13607160
  misc_feature (80)..(277): Pfam Name: Chitinase class I Pfam Description: Chitinase class I
  misc_feature (1)..(277): Homolog of NCBI NO: 15224308 NR Description: glycosyl hydrolase family 19 (chitinase)
  misc_feature (2)..(277): Homolog of NCBI NO: 14486393 NR Description: chitinase class 4-like protein [Brassica napus]
  misc_feature (17)..(277): Homolog of NCBI NO: 2129790 NR Description: chitinase class IV precursor - rape (fragment)
  misc_feature (18)..(277): Homolog of NCBI NO: 584929 NR Description: Basic endochitinase CHB4 precursor
  misc_feature (21)..(277): Homolog of NCBI NO: 15213850 NR Description: chitinase-B [Sorghum arundinaceum]
  misc_feature (21)..(277): Homolog of NCBI NO: 15529117 NR Description: chitinase-B [Sorghum bicolor]
  misc_feature (16)..(277): Homolog of NCBI NO: 15224312 NR Description: glycosyl hydrolase family 19 (chitinase)
  misc_feature (21)..(277): Homolog of NCBI NO: 15529121 NR Description: chitinase-B [Sorghum bicolor]
  misc_feature (21)..(277): Homolog of NCBI NO: 15529119 NR Description: chitinase-B1 [Sorghum bicolor]
  misc_feature (16)..(277): Homolog of NCBI NO: 15213848 NR Description: chitinase-B [Saccharum officinarum]
MAKPTSRNDRFALFFITLIFLILTVSKPVASQNCGCASDFCCSKYGYCGTTDEFCGEGCQAGPCRSSGGGGDPAVSLEGTVTPDFFNSILNQRGDCPGKGFYTHDTFMAAANSYPSFGASISKREIAAFFAHVAQETGFMCYIEEIDGPAKAASGEYCDTEKPEFPCAQGKGYYGRGAIQLSWNYNYGLCGKALDENLLASPEKVAQDQVLAFKTAFWFWTTNVRTSFKSGFGATIRAVNSRECSGGDSTAKAANRIKYFQDYCGKLGVAPGDNLTC

SEQ ID NO: 101162 - protein, 170 aa, Arabidopsis thaliana
  peptide (1)..(170): Ceres Seq. ID no. 13607161
  misc_feature (1)..(170): Pfam Name: Chitinase class I Pfam Description: Chitinase class I
  misc_feature (1)..(170): Homolog of NCBI NO: 15224308 NR Description: glycosyl hydrolase family 19 (chitinase)
  misc_feature (1)..(170): Homolog of NCBI NO: 14486393 NR Description: chitinase class 4-like protein [Brassica napus]
  misc_feature (1)..(170): Homolog of NCBI NO: 2129790 NR Description: chitinase class IV precursor - rape (fragment)
  misc_feature (1)..(170): Homolog of NCBI NO: 584929 NR Description: Basic endochitinase CHB4 precursor
  misc_feature (1)..(170): Homolog of NCBI NO: 15213850 NR Description: chitinase-B [Sorghum arundinaceum]
  misc_feature (1)..(170): Homolog of NCBI NO: 15529117 NR Description: chitinase-B [Sorghum bicolor]
  misc_feature (1)..(170): Homolog of NCBI NO: 15224312 NR Description: glycosyl hydrolase family 19 (chitinase)
  misc_feature (1)..(170): Homolog of NCBI NO: 15529121 NR Description: chitinase-B [Sorghum bicolor]
  misc_feature (1)..(170): Homolog of NCBI NO: 15529119 NR Description: chitinase-B1 [Sorghum bicolor]
  misc_feature (1)..(170): Homolog of NCBI NO: 15213848 NR Description: chitinase-B [Saccharum officinarum]
MAAANSYPSFGASISKREIAAFFAHVAQETGFMCYIEEIDGPAKAASGEYCDTEKPEFPCAQGKGYYGRGAIQLSWNYNYGLCGKALDENLLASPEKVAQDQVLAFKTAFWFWTTNVRTSFKSGFGATIRAVNSRECSGGDSTAKAANRIKYFQDYCGKLGVAPGDNLTC

SEQ ID NO: 101163 - DNA, 803 bp, Arabidopsis thaliana
  misc_feature (1)..(803): Ceres Seq. ID no. 13607162
  misc_feature: MA Experiment ID: 20000171 Result: Down-regulated in Transcription
  misc_feature: MA Experiment 20000171 PARAMETER Experiment Name: At_42deg_Heat_P Parameter: Age (day) Value: 14
  misc_feature: MA Experiment 20000171 PARAMETER Experiment Name: At_42deg_Heat_P Parameter: Organism Value: A. thaliana
  misc_feature: MA Experiment 20000171 PARAMETER Experiment Name: At_42deg_Heat_P Parameter: Plant Line Value: WS
  misc_feature: MA Experiment 20000171 PARAMETER Experiment Name: At_42deg_Heat_P Parameter: Temperature (deg C) Value: 42 vs. 22
  misc_feature: MA Experiment 20000171 PARAMETER Experiment Name: At_42deg_Heat_P Parameter: Timepoint (hr) Value: 1
  misc_feature: MA Experiment 20000171 PARAMETER Experiment Name: At_42deg_Heat_P Parameter: Tissue Value: Aerial
  misc_feature: MA Experiment ID: 20001560 Result: Up-regulated in Transcription
  misc_feature: MA Experiment 20001560 PARAMETER Experiment Name: At_Drought_Soil_Dry_P Parameter: Age (day) Value: 28
  misc_feature: MA Experiment 20001560 PARAMETER Experiment Name: At_Drought_Soil_Dry_P Parameter: Organism Value: A. thaliana
  misc_feature: MA Experiment 20001560 PARAMETER Experiment Name: At_Drought_Soil_Dry_P Parameter: Plant Line Value: WS
  misc_feature: MA Experiment 20001560 PARAMETER Experiment Name: At_Drought_Soil_Dry_P Parameter: Post Timepoint (hr) Value: None
  misc_feature: MA Experiment 20001560 PARAMETER Experiment Name: At_Drought_Soil_Dry_P Parameter: Post-Treatment Value: None
  misc_feature: MA Experiment 20001560 PARAMETER Experiment Name: At_Drought_Soil_Dry_P Parameter: Timepoint (day) Value: 14
  misc_feature: MA Experiment 20001560 PARAMETER Experiment Name: At_Drought_Soil_Dry_P Parameter: Treatment Value: Drought vs. No Drought
agccctaccaaactctcaaaggttagaatttgctatcggatcatctgctaagcttggtttactcttcctagaacatcgattgtatcgaggtttactattggatcaaagatgtctgcagaggagaagaaccttatagagatcttggaggaaggtcacaaagtcgatgttgttaagtacattgattatgtcagtgcccctcaagctggtgctattgcgacattctcaggcactacaagagacatgttcgagggcaagacagtgttggagttaaggtatgaagcatatgtgccaatggccacacgatgcctcagctcgatctgtacaactgctagatcaacttgggatatccacaagattgctgttgctcaccgtcttggaccagttcctgttggagaaactagcgtgctcattgcggtctcatctgttcaccgtgcagatggtttagatgcttgcaagttcttgatcgacgagttgaaggcatcggttccgatatggaagaaagaggtttacactaatggagagatttggaaggagaattctgagtttatggagaaaagattggagcttgcagagaaaagagacagcattgtaaaaaaaactgtggttgaagaacatagaagaagaggttgctgtggaagcaaagttagagtagaagaagatgaagagcataaagatattacaggagataacaaatcttcttcttgatcacttgtagcagtaacactgtttcgctttttactttcaatagacaaactttcttaagcacattgttgaatctaaagacttatatgcgttagttggtt

SEQ ID NO: 101164 - protein, 198 aa, Arabidopsis thaliana
  peptide (1)..(198): Ceres Seq. ID no. 13607163
  misc_feature (10)..(126): Pfam Name: MoaE protein Pfam Description: MoaE protein
  misc_feature (1)..(198): Homolog of NCBI NO: 15224353 NR Description: molybdopterin synthase large subunit -related thaliana] >gi|25408901|pir||B84870 probable molybdopterin
  misc_feature (28)..(144): Homolog of NCBI NO: 29243132 NR Description: putative molybdopterin synthase large subunit
  misc_feature (1)..(145): Homolog of NCBI NO: 4758732 NR Description: molybdenum cofactor synthesis 2 large subunit [Homo sapiens] >gi|20138899|sp|O96007|MS2L_HUMAN Molybdenum synthesis protein 2 large subunit (Molybdopterin synthase large
  misc_feature (6)..(145): Homolog of NCBI NO: 12832907 NR Description: unnamed protein product [Mus musculus]
  misc_feature (6)..(145): Homolog of NCBI NO: 19353410 NR Description: Mocs2 protein [Mus musculus]
  misc_feature (6)..(145): Homolog of NCBI NO: 27687539 NR Description: similar to Molybdenum cofactor synthesis protein large subunit (Molybdopterin synthase large subunit) (MPT
  misc_feature (1)..(145): Homolog of NCBI NO: 28830195 NR Description: hypothetical protein [Dictyostelium discoideum]
  misc_feature (18)..(145): Homolog of NCBI NO: 21356259 NR Description: CG10238-PA [Drosophila melanogaster]
  misc_feature (6)..(131): Homolog of NCBI NO: 7305279 NR Description: molybdenum cofactor synthesis 2 [Mus musculus] Molybdenum cofactor synthesis protein 2 large subunit synthase large subunit) (MPT synthase large subunit) (MOCS2B)
  misc_feature (1)..(145): Homolog of NCBI NO: 17509279 NR Description: MoaE protein [Caenorhabditis elegans]
MSAEEKNLIEILEEGHKVDVVKYIDYVSAPQAGAIATFSGTTRDMFEGKTVLELRYEAYVPMATRCLSSICTTARSTWDIHKIAVAHRLGPVPVGETSVLIAVSSVHRADGLDACKFLIDELKASVPIWKKEVYTNGEIWKENSEFMEKRLELAEKRDSIVKKTVVEEHRRRGCCGSKVRVEEDEEHKDITGDNKSSS

SEQ ID NO: 101165 - protein, 154 aa, Arabidopsis thaliana
  peptide (1)..(154): Ceres Seq. ID no. 13607164
  misc_feature (1)..(82): Pfam Name: MoaE protein Pfam Description: MoaE protein
  misc_feature (1)..(154): Homolog of NCBI NO: 15224353 NR Description: molybdopterin synthase large subunit -related thaliana] >gi|25408901|pir||B84870 probable molybdopterin
  misc_feature (1)..(100): Homolog of NCBI NO: 29243132 NR Description: putative molybdopterin synthase large subunit
  misc_feature (1)..(101): Homolog of NCBI NO: 4758732 NR Description: molybdenum cofactor synthesis 2 large subunit [Homo sapiens] >gi|20138899|sp|O96007|MS2L_HUMAN Molybdenum synthesis protein 2 large subunit (Molybdopterin synthase large
  misc_feature (1)..(101): Homolog of NCBI NO: 12832907 NR Description: unnamed protein product [Mus musculus]
  misc_feature (1)..(101): Homolog of NCBI NO: 19353410 NR Description: Mocs2 protein [Mus musculus]
  misc_feature (1)..(101): Homolog of NCBI NO: 27687539 NR Description: similar to Molybdenum cofactor synthesis protein large subunit (Molybdopterin synthase large subunit) (MPT
  misc_feature (1)..(101): Homolog of NCBI NO: 28830195 NR Description: hypothetical protein [Dictyostelium discoideum]
  misc_feature (1)..(101): Homolog of NCBI NO: 21356259 NR Description: CG10238-PA [Drosophila melanogaster]
  misc_feature (1)..(87): Homolog of NCBI NO: 7305279 NR Description: molybdenum cofactor synthesis 2 [Mus musculus] Molybdenum cofactor synthesis protein 2 large subunit synthase large subunit) (MPT synthase large subunit) (MOCS2B)
  misc_feature (1)..(101): Homolog of NCBI NO: 17509279 NR Description: MoaE protein [Caenorhabditis elegans]
MFEGKTVLELRYEAYVPMATRCLSSICTTARSTWDIHKIAVAHRLGPVPVGETSVLIAVSSVHRADGLDACKFLIDELKASVPIWKKEVYTNGEIWKENSEFMEKRLELAEKRDSIVKKTVVEEHRRRGCCGSKVRVEEDEEHKDITGDNKSSS

SEQ ID NO: 101166 - protein, 137 aa, Arabidopsis thaliana
  peptide (1)..(137): Ceres Seq. ID no. 13607165
  misc_feature (1)..(65): Pfam Name: MoaE protein Pfam Description: MoaE protein
  misc_feature (1)..(137): Homolog of NCBI NO: 15224353 NR Description: molybdopterin synthase large subunit -related thaliana] >gi|25408901|pir||B84870 probable molybdopterin
  misc_feature (1)..(83): Homolog of NCBI NO: 29243132 NR Description: putative molybdopterin synthase large subunit
  misc_feature (1)..(84): Homolog of NCBI NO: 4758732 NR Description: molybdenum cofactor synthesis 2 large subunit [Homo sapiens] >gi|20138899|sp|O96007|MS2L_HUMAN Molybdenum synthesis protein 2 large subunit (Molybdopterin synthase large
  misc_feature (1)..(84): Homolog of NCBI NO: 12832907 NR Description: unnamed protein product [Mus musculus]
  misc_feature (1)..(84): Homolog of NCBI NO: 19353410 NR Description: Mocs2 protein [Mus musculus]
  misc_feature (1)..(84): Homolog of NCBI NO: 27687539 NR Description: similar to Molybdenum cofactor synthesis protein large subunit (Molybdopterin synthase large subunit) (MPT
  misc_feature (1)..(84): Homolog of NCBI NO: 28830195 NR Description: hypothetical protein [Dictyostelium discoideum]
  misc_feature (1)..(84): Homolog of NCBI NO: 21356259 NR Description: CG10238-PA [Drosophila melanogaster]
  misc_feature (1)..(70): Homolog of NCBI NO: 7305279 NR Description: molybdenum cofactor synthesis 2 [Mus musculus] Molybdenum cofactor synthesis protein 2 large subunit synthase large subunit) (MPT synthase large subunit) (MOCS2B)
  misc_feature (1)..(84): Homolog of NCBI NO: 17509279 NR Description: MoaE protein [Caenorhabditis elegans]
MATRCLSSICTTARSTWDIHKIAVAHRLGPVPVGETSVLIAVSSVHRADGLDACKFLIDELKASVPIWKKEVYTNGEIWKENSEFMEKRLELAEKRDSIVKKTVVEEHRRRGCCGSKVRVEEDEEHKDITGDNKSSS

SEQ ID NO: 101167 - DNA, 1585 bp, Arabidopsis thaliana
  misc_feature (1)..(1585): Ceres Seq. ID no. 13607170
  misc_feature: MA Experiment ID: 20000171 Result: Up-regulated in Transcription
  misc_feature: MA Experiment 20000171 PARAMETER Experiment Name: At_42deg_Heat_P Parameter: Age (day) Value: 14
  misc_feature: MA Experiment 20000171 PARAMETER Experiment Name: At_42deg_Heat_P Parameter: Organism Value: A. thaliana
  misc_feature: MA Experiment 20000171 PARAMETER Experiment Name: At_42deg_Heat_P Parameter: Plant Line Value: WS
  misc_feature: MA Experiment 20000171 PARAMETER Experiment Name: At_42deg_Heat_P Parameter: Temperature (deg C) Value: 42 vs. 22
  misc_feature: MA Experiment 20000171 PARAMETER Experiment Name: At_42deg_Heat_P Parameter: Timepoint (hr) Value: 1
  misc_feature: MA Experiment 20000171 PARAMETER Experiment Name: At_42deg_Heat_P Parameter: Tissue Value: Aerial
  misc_feature: MA Experiment ID: 20000173 Result: Up-regulated in Transcription
  misc_feature: MA Experiment 20000173 PARAMETER Experiment Name: At_42deg_Heat_P Parameter: Age (day) Value: 14
  misc_feature: MA Experiment 20000173 PARAMETER Experiment Name: At_42deg_Heat_P Parameter: Organism Value: A. thaliana
  misc_feature: MA Experiment 20000173 PARAMETER Experiment Name: At_42deg_Heat_P Parameter: Plant Line Value: WS
  misc_feature: MA Experiment 20000173 PARAMETER Experiment Name: At_42deg_Heat_P Parameter: Temperature (deg C) Value: 42 vs. 22
  misc_feature: MA Experiment 20000173 PARAMETER Experiment Name: At_42deg_Heat_P Parameter: Timepoint (hr) Value: 6
  misc_feature: MA Experiment 20000173 PARAMETER Experiment Name: At_42deg_Heat_P Parameter: Tissue Value: Aerial
aatttatgttttctctcacttttctccgatcgtagctcagctattttccggcgatcttcttccgattcttcaacccggagcttttgctcaactattttccggcgatcttcttccgattcttgctgtcgcacttcaacccgaagcttttgacgatcaacaatgtcagatccaaaactgaagccagtggaggatgcactagttactgttgccaagagctcacaaattcaattagccaaggatgatacttcaggtggaaccatagttggaaggttactgcagtgccagtattcaaagacccataagttctgggagactcaacctgttgagcagtttaaagatatccaggacacgagtttgcctgaaggcccaattgagcccgcaactttggtgtctgaggtcaagcaagagccgtacaaccttcttggtcaattcgaatggaccatatgcgatatgaactctgacgatatgtgtttagagatgtacaactttctcaaggaaaacagtcctgatgacaacagatcaagtatgagtactccaaagagtatctaaggtgggcactgtgtccacctggttattaccagagctggcatattggagtccgcgtcaagacctccaagaaactcattgctttcatctgtggcaggccaacaagaatcagggtgcgtgatgaggttgttaaaatggcgaaggtcaattccttgtgtgttcacaagaagctcaggtctaagggacttgctcctctcatgatcaaggagttgactagaagggttaagttgcagaatatatggcaagcggcttatacctcaagtcatatactttctagaccagttaccaccagtcgagactgggtcagaatgttgaacccgaagaagctaatcgatgttgggttaacaaggcttcgtgacagaatgacaatgagcaggaccgtcaaactctacaagttaccagatgcaccgatcactcctggatttagggaaatggagcgacgtgatgtccctgctgttacagcgttgctcaggaactaccttagccagtttgcagttgcgactgactttgatgacaacgatgtcaagcactggcttctcccaagggaaaatattgtctacagttacgtagtagtaagccctgaaactcatgatgtcactgacttctgcagcttctgcaattcctctataactatccccggtaaccggaaatacacgaccctggaatgtgcttatgcttgctgcaatgtagcgacactgacctcgttatcccagctggtgaatgatgccctaatagtctctaagcaaaaaggtttcgatgtgttttatgcctcggatgtgatgcagaatgagagtttcttgaaagagttgaggttttatccactatgtcgacagtcgcactactatctctacaattaccgtttgagaaatgcattgaagccatcagaacttgggcttattctttagttttgttaaaaccactgttcccgctccccaatgtgaacaaactatgatcattaaaccaatgtgtagcctaagattcctcttcctggatatcatttgcaagtattataaacaaaagtttaaagcctttttatctt

SEQ ID NO: 101168 - protein, 256 aa, Arabidopsis thaliana
  peptide (1)..(256): Ceres Seq. ID no. 13607171
  misc_feature (67)..(256): Pfam Name: Myristoyl-CoA:protein N-myristoyltransferase, Pfam Description: Myristoyl-CoA:protein N-myristoyltransferase,
  misc_feature (1)..(256): Homolog of NCBI NO: 13924516 NR Description: N-myristoyltransferase-like protein 2
  misc_feature (1)..(256): Homolog of NCBI NO: 7484992 NR Description: glycylpeptide N-tetradecanoyltransferase homolog
  misc_feature (1)..(256): Homolog of NCBI NO: 18423927 NR Description: N-myristoyl transferase [Arabidopsis thaliana]
  misc_feature (1)..(256): Homolog of NCBI NO: 18406470 NR Description: N-myristoyltransferase -related [Arabidopsis
  misc_feature (1)..(256): Homolog of NCBI NO: 8777442 NR Description: N-myristoyl transferase [Arabidopsis thaliana]
  misc_feature (1)..(256): Homolog of NCBI NO: 34910442 NR Description: putative N-myristoyl transferase [Oryza sativa
  misc_feature (33)..(256): Homolog of NCBI NO: 6635379 NR Description: N-myristoyl transferase [Brassica oleracea]
  misc_feature (1)..(256): Homolog of NCBI NO: 6679082 NR Description: N-myristoyltransferase 1; N-myristoyltransferase
  misc_feature (1)..(256): Homolog of NCBI NO: 13623535 NR Description: N-myristoyltransferase 2 [Homo sapiens]
  misc_feature (1)..(256): Homolog of NCBI NO: 30584349 NR Description: Homo sapiens N-myristoyltransferase 2 [synthetic
MAKVNSLCVHKKLRSKGLAPLMIKELTRRVKLQNIWQAAYTSSHILSRPVTTSRDWVRMLNPKKLIDVGLTRLRDRMTMSRTVKLYKLPDAPITPGFREMERRDVPAVTALLRNYLSQFAVATDFDDNDVKHWLLPRENIVYSYVVVSPETHDVTDFCSFCNSSITIPGNRKYTTLECAYACCNVATLTSLSQLVNDALIVSKQKGFDVFYASDVMQNESFLKELRFYPLCRQSHYYLYNYRLRNALKPSELGLIL

SEQ ID NO: 101169 - protein, 235 aa, Arabidopsis thaliana
  peptide (1)..(235): Ceres Seq. ID no. 13607172
  misc_feature (46)..(235): Pfam Name: Myristoyl-CoA:protein N-myristoyltransferase, Pfam Description: Myristoyl-CoA:protein N-myristoyltransferase,
  misc_feature (1)..(235): Homolog of NCBI NO: 13924516 NR Description: N-myristoyltransferase-like protein 2
  misc_feature (1)..(235): Homolog of NCBI NO: 7484992 NR Description: glycylpeptide N-tetradecanoyltransferase homolog
  misc_feature (1)..(235): Homolog of NCBI NO: 18423927 NR Description: N-myristoyl transferase [Arabidopsis thaliana]
  misc_feature (1)..(235): Homolog of NCBI NO: 18406470 NR Description: N-myristoyltransferase -related [Arabidopsis
  misc_feature (1)..(235): Homolog of NCBI NO: 8777442 NR Description: N-myristoyl transferase [Arabidopsis thaliana]
  misc_feature (1)..(235): Homolog of NCBI NO: 34910442 NR Description: putative N-myristoyl transferase [Oryza sativa
  misc_feature (12)..(235): Homolog of NCBI NO: 6635379 NR Description: N-myristoyl transferase [Brassica oleracea]
  misc_feature (1)..(235): Homolog of NCBI NO: 6679082 NR Description: N-myristoyltransferase 1; N-myristoyltransferase
  misc_feature (1)..(235): Homolog of NCBI NO: 13623535 NR Description: N-myristoyltransferase 2 [Homo sapiens]
  misc_feature (1)..(235): Homolog of NCBI NO: 30584349 NR Description: Homo sapiens N-myristoyltransferase 2 [synthetic
MIKELTRRVKLQNIWQAAYTSSHILSRPVTTSRDWVRMLNPKKLIDVGLTRLRDRMTMSRTVKLYKLPDAPITPGFREMERRDVPAVTALLRNYLSQFAVATDFDDNDVKHWLLPRENIVYSYVVVSPETHDVTDFCSFCNSSITIPGNRKYTTLECAYACCNVATLTSLSQLVNDALIVSKQKGFDVFYASDVMQNESFLKELRFYPLCRQSHYYLYNYRLRNALKPSELGLIL

SEQ ID NO: 101170 - protein, 198 aa, Arabidopsis thaliana
  peptide (1)..(198): Ceres Seq. ID no. 13607173
  misc_feature (9)..(198): Pfam Name: Myristoyl-CoA:protein N-myristoyltransferase, Pfam Description: Myristoyl-CoA:protein N-myristoyltransferase,
  misc_feature (1)..(198): Homolog of NCBI NO: 13924516 NR Description: N-myristoyltransferase-like protein 2
  misc_feature (1)..(198): Homolog of NCBI NO: 7484992 NR Description: glycylpeptide N-tetradecanoyltransferase homolog
  misc_feature (1)..(198): Homolog of NCBI NO: 18423927 NR Description: N-myristoyl transferase [Arabidopsis thaliana]
  misc_feature (1)..(198): Homolog of NCBI NO: 18406470 NR Description: N-myristoyltransferase -related [Arabidopsis
  misc_feature (1)..(198): Homolog of NCBI NO: 8777442 NR Description: N-myristoyl transferase [Arabidopsis thaliana]
  misc_feature (1)..(198): Homolog of NCBI NO: 34910442 NR Description: putative N-myristoyl transferase [Oryza sativa
  misc_feature (1)..(198): Homolog of NCBI NO: 6635379 NR Description: N-myristoyl transferase [Brassica oleracea]
  misc_feature (1)..(198): Homolog of NCBI NO: 6679082 NR Description: N-myristoyltransferase 1; N-myristoyltransferase
  misc_feature (1)..(198): Homolog of NCBI NO: 13623535 NR Description: N-myristoyltransferase 2 [Homo sapiens]
  misc_feature (1)..(198): Homolog of NCBI NO: 30584349 NR Description: Homo sapiens N-myristoyltransferase 2 [synthetic
MLNPKKLIDVGLTRLRDRMTMSRTVKLYKLPDAPITPGFREMERRDVPAVTALLRNYLSQFAVATDFDDNDVKHWLLPRENIVYSYVVVSPETHDVTDFCSFCNSSITIPGNRKYTTLECAYACCNVATLTSLSQLVNDALIVSKQKGFDVFYASDVMQNESFLKELRFYPLCRQSHYYLYNYRLRNALKPSELGLIL

SEQ ID NO: 101171 - DNA, 742 bp, Arabidopsis thaliana
  misc_feature (1)..(742): Ceres Seq. ID no. 13607200
tacacacacacacaaaacaacaatcgctctctacaatggcggaaaggttctctagcggcgaggcccaatattggcccaattatggtagcaccgccaccaccaccgttagcaacagccccatctcgtcgtttttccatcagctccgatcccattcaccaacatcctcgcagctctttggtttcctcgctctctttatctccactggcatcctcctcttcctccttggtgtaagcgtcaccgctgccgtgctcggcttcattgtctttcttccattgatcatcatctcgagtccgatatggattcccgtttttgtcgtcgttggcgggttcttaacggtctccggatttcttgtcggaacggtggctttagtgtcgtggacgtaccgctatttccggggaatgcacccggttggatcgaatcagatggattatgcacgtagtaggatctatgacacggcatctcacgtcaaagattacgctagagaatacggtggttacttccatggcagggctaaagatgcggcccctggtgcttgacctgaaccggttggtatagtctggttcagggtagtattaaccgatcacggttcgatttatggaggaggaacacggttcatggtaatattacattttcttattttgtttccgtttatactttataagatgaagaagaatatctatctagttatgtgtaatgtaagctttgtgtccgtcgcttgaaatgtaatatttcattttgtttt

SEQ ID NO: 101172 - protein, 177 aa, Arabidopsis thaliana
  peptide (1)..(177): Ceres Seq. ID no. 13607201
  misc_feature (53)..(166): Pfam Name: Oleosin Pfam Description: Oleosin
  misc_feature (12)..(177): Homolog of NCBI NO: 15229674 NR Description: oleosin [Arabidopsis thaliana] gene_id:K24M9.6~unknown protein [Arabidopsis thaliana]
  misc_feature (12)..(177): Homolog of NCBI NO: 15222021 NR Description: oleosin [Arabidopsis thaliana]
  misc_feature (35)..(177): Homolog of NCBI NO: 21311555 NR Description: 15.8 kDa oleosin [Theobroma cacao]
  misc_feature (46)..(163): Homolog of NCBI NO: 7442009 NR Description: oleosin-like protein, salt stress-induced - sweet
  misc_feature (49)..(163): Homolog of NCBI NO: 29170509 NR Description: oleosin [Corylus avellana]
  misc_feature (47)..(158): Homolog of NCBI NO: 15225211 NR Description: oleosin [Arabidopsis thaliana]
  misc_feature (47)..(158): Homolog of NCBI NO: 27754701 NR Description: putative oleosin protein [Arabidopsis thaliana]
  misc_feature (39)..(161): Homolog of NCBI NO: 12003279 NR Description: 15kD oleosin-like protein 1 [Perilla frutescens]
  misc_feature (39)..(161): Homolog of NCBI NO: 12003281 NR Description: 15kD oleosin-like protein 2 [Perilla frutescens]
  misc_feature (52)..(163): Homolog of NCBI NO: 3914199 NR Description: OLEOSIN 1 >gi|460803|emb|CAA55008.1| oleosin
HTHTKQQSLSTMAERFSSGEAQYWPNYGSTATTTVSNSPISSFFHQLRSHSPTSSQLFGFLALFISTGILLFLLGVSVTAAVLGFIVFLPLIIISSPIWIPVFVVVGGFLTVSGFLVGTVALVSWTYRYFRGMHPVGSNQMDYARSRIYDTASHVKDYAREYGGYFHGRAKDAAPGA

SEQ ID NO: 101173 - protein, 166 aa, Arabidopsis thaliana
  peptide (1)..(166): Ceres Seq. ID no. 13607202
  misc_feature (42)..(155): Pfam Name: Oleosin Pfam Description: Oleosin
  misc_feature (1)..(166): Homolog of NCBI NO: 15229674 NR Description: oleosin [Arabidopsis thaliana] gene_id:K24M9.6~unknown protein [Arabidopsis thaliana]
  misc_feature (1)..(166): Homolog of NCBI NO: 15222021 NR Description: oleosin [Arabidopsis thaliana]
  misc_feature (24)..(166): Homolog of NCBI NO: 21311555 NR Description: 15.8 kDa oleosin [Theobroma cacao]
  misc_feature (35)..(152): Homolog of NCBI NO: 7442009 NR Description: oleosin-like protein, salt stress-induced - sweet
  misc_feature (38)..(152): Homolog of NCBI NO: 29170509 NR Description: oleosin [Corylus avellana]
  misc_feature (36)..(147): Homolog of NCBI NO: 15225211 NR Description: oleosin [Arabidopsis thaliana]
  misc_feature (36)..(147): Homolog of NCBI NO: 27754701 NR Description: putative oleosin protein [Arabidopsis thaliana]
  misc_feature (28)..(150): Homolog of NCBI NO: 12003279 NR Description: 15kD oleosin-like protein 1 [Perilla frutescens]
  misc_feature (28)..(150): Homolog of NCBI NO: 12003281 NR Description: 15kD oleosin-like protein 2 [Perilla frutescens]
  misc_feature (41)..(152): Homolog of NCBI NO: 3914199 NR Description: OLEOSIN 1 >gi|460803|emb|CAA55008.1| oleosin
MAERFSSGEAQYWPNYGSTATTTVSNSPISSFFHQLRSHSPTSSQLFGFLALFISTGILLFLLGVSVTAAVLGFIVFLPLIIISSPIWIPVFVVVGGFLTVSGFLVGTVALVSWTYRYFRGMHPVGSNQMDYARSRIYDTASHVKDYAREYGGYFHGRAKDAAPGA

SEQ ID NO: 101174 - DNA, 1656 bp, Arabidopsis thaliana
  misc_feature (1)..(1656): Ceres Seq. ID no. 13607207
  misc_feature: MA Experiment ID: 20000185 Result: Up-regulated in Transcription
  misc_feature: MA Experiment 20000185 PARAMETER Experiment Name: At_Roots__P Parameter: Age (day) Value: 7 vs. 21
  misc_feature: MA Experiment 20000185 PARAMETER Experiment Name: At_Roots__P Parameter: Organism Value: A. thaliana
  misc_feature: MA Experiment 20000185 PARAMETER Experiment Name: At_Roots__P Parameter: Tissue Value: Roots vs. Whole Plant
  misc_feature: MA Experiment ID: 20000234 Result: Down-regulated in Transcription
  misc_feature: MA Experiment 20000234 PARAMETER Experiment Name: At_Siliques_P Parameter: Age (day) Value: 21
  misc_feature: MA Experiment 20000234 PARAMETER Experiment Name: At_Siliques_P Parameter: Organism Value: A. thaliana
  misc_feature: MA Experiment 20000234 PARAMETER Experiment Name: At_Siliques_P Parameter: Plant Line Value: WS
  misc_feature: MA Experiment 20000234 PARAMETER Experiment Name: At_Siliques_P Parameter: Tissue Value: Less Than 5mm Siliques vs. Whole Plant
  misc_feature: MA Experiment ID: 20000439 Result: Up-regulated in Transcription
  misc_feature: MA Experiment 20000439 PARAMETER Experiment Name: At_Roots__P Parameter: Age (day) Value: 14 vs. 21
  misc_feature: MA Experiment 20000439 PARAMETER Experiment Name: At_Roots__P Parameter: Organism Value: A. thaliana
  misc_feature: MA Experiment 20000439 PARAMETER Experiment Name: At_Roots__P Parameter: Tissue Value: Roots vs. Whole Plant
atggcagcgtttatcagcgttgactttcagaactgtttcatcttcattctcctatgcttcttctccctcctctgttattctctcttcttcaagaaaccaaaggactcacgaggctgtgatctacctcccagccctccgtctcttccgattatcggtcatcttcaccttctcctctcttctctatcccacaagtctttacagaaaatctcctctaagtatggacctctcctccatctccggatctttaatgtccccatcatcctcgtttcatcggcttcagttgcagacgaggtcttcaggatccacgacatgaacatctcctctcgcggtgctgctgcgatcgatgagtccctcgtgtttggatcttctggtgtcgtctacgctccctatggagattacttgaagttcgtgaagaagatcattgccactaagctgcttcgacctcaggtgttggagcggtcacgaggtcttcgtgctgaagagctacaacgactttacaacagaattcttgataaggcgaagatgaatgagaacgttgagatcggtaaggaagcgacgatgctcatgaacaacatcttctgtaggatgagcatgggaaggagtttctcagaggagaatggtgaggcagagagagtcagaggcttggtggctgaatcatatgccttggcgaagaagattttcttcgcatctgtactgcgcagactgcttaagaagcttcggatcccactattcaagaaggatatcatggatgtttccaacagattcaatgagctgctagagaagattcttgtggaacacaatgagaaactggacgaggaacataaagacacggatatgatggacgtgttgttggcagcttatgcagatgaaaacgctgagtataagattactaggaatcatatcaagtcatttttcgtggagcttttcgtgggaggcactgatacctcggtgcaaacaacacaatggacaatggccgagatcattaataactctgacgttcttgagaggctgagagaagaaattgactctgttgtagggacatcaagaatgattcaagaaacagatataccaaaccttccttatttgcaagcggtggttaaggaaggactaagattgcacccaccatttcctctcttgacgaggaagtttgaagaaaggtgtgagatcaaagggttctacatcccggagaagacatttcttattataaatgcttacgcttggatgagagatcctgattcctgggaagatcctaatgagtttaagccggagaggtttttaggttcttcaagattaggacaagtagacgagagagaggaagctcagaagtacattcctttcggcggaggaaggagaggctgtcctggagcaaatctagcttctattttcgtaggaaccgcgattggagtgatggtgcagtgctttgactggggaatcaaaggagataagatcaacatggaagagacttttgaaggactgacccttaccatggttcatccaattaagtgcactccgattcctcgaacactgccttttgtaacttctaatctccagagtcctagctcttgacacctaactcaggaacctgtaagaagtttgctttcttcatgtttgttgtattgaaagtctaacattcagatcaaagaaactttatattcc

SEQ ID NO: 101175 - protein, 521 aa, Arabidopsis thaliana
  peptide (1)..(521): Ceres Seq. ID no. 13607208
  misc_feature (1)..(521): Homolog of NCBI NO: 9294003 NR Description: cytochrome P450-like protein [Arabidopsis
  misc_feature (1)..(521): Homolog of NCBI NO: 15231047 NR Description: cytochrome P450 family [Arabidopsis thaliana]
  misc_feature (104)..(521): Homolog of NCBI NO: 30686008 NR Description: cytochrome P450 family [Arabidopsis thaliana]
  misc_feature (1)..(504): Homolog of NCBI NO: 15233794 NR Description: cytochrome P450 family [Arabidopsis thaliana]
  misc_feature (1)..(510): Homolog of NCBI NO: 15231052 NR Description: cytochrome P450 family [Arabidopsis thaliana]
  misc_feature (6)..(511): Homolog of NCBI NO: 15231049 NR Description: cytochrome P450 family [Arabidopsis thaliana]
  misc_feature (1)..(512): Homolog of NCBI NO: 9293969 NR Description: cytochrome P450-like protein [Arabidopsis
  misc_feature (6)..(511): Homolog of NCBI NO: 21553521 NR Description: cytochrome P450, putative [Arabidopsis thaliana]
  misc_feature (1)..(521): Homolog of NCBI NO: 30685997 NR Description: cytochrome P450 family [Arabidopsis thaliana]
  misc_feature (1)..(521): Homolog of NCBI NO: 15232418 NR Description: cytochrome P450 family [Arabidopsis thaliana]
MAAFISVDFQNCFIFILLCFFSLLCYSLFFKKPKDSRGCDLPPSPPSLPIIGHLHLLLSSLSHKSLQKISSKYGPLLHLRIFNVPIILVSSASVADEVFRIHDMNISSRGAAAIDESLVFGSSGVVYAPYGDYLKFVKKIIATKLLRPQVLERSRGLRAEELQRLYNRILDKAKMNENVEIGKEATMLMNNIFCRMSMGRSFSEENGEAERVRGLVAESYALAKKIFFASVLRRLLKKLRIPLFKKDIMDVSNRFNELLEKILVEHNEKLDEEHKDTDMMDVLLAAYADENAEYKITRNHIKSFFVELFVGGTDTSVQTTQWTMAEIINNSDVLERLREEIDSVVGTSRMIQETDIPNLPYLQAVVKEGLRLHPPFPLLTRKFEERCEIKGFYIPEKTFLIINAYAWMRDPDSWEDPNEFKPERFLGSSRLGQVDEREEAQKYIPFGGGRRGCPGANLASIFVGTAIGVMVQCFDWGIKGDKINMEETFEGLTLTMVHPIKCTPIPRTLPFVTSNLQSPSS

SEQ ID NO: 101176 - protein, 418 aa, Arabidopsis thaliana
  peptide (1)..(418): Ceres Seq. ID no. 13607209
  misc_feature (1)..(418): Homolog of NCBI NO: 9294003 NR Description: cytochrome P450-like protein [Arabidopsis
  misc_feature (1)..(418): Homolog of NCBI NO: 15231047 NR Description: cytochrome P450 family [Arabidopsis thaliana]
  misc_feature (1)..(418): Homolog of NCBI NO: 30686008 NR Description: cytochrome P450 family [Arabidopsis thaliana]
  misc_feature (1)..(401): Homolog of NCBI NO: 15233794 NR Description: cytochrome P450 family [Arabidopsis thaliana]
  misc_feature (1)..(407): Homolog of NCBI NO: 15231052 NR Description: cytochrome P450 family [Arabidopsis thaliana]
  misc_feature (1)..(408): Homolog of NCBI NO: 15231049 NR Description: cytochrome P450 family [Arabidopsis thaliana]
  misc_feature (1)..(409): Homolog of NCBI NO: 9293969 NR Description: cytochrome P450-like protein [Arabidopsis
  misc_feature (1)..(408): Homolog of NCBI NO: 21553521 NR Description: cytochrome P450, putative [Arabidopsis thaliana]
  misc_feature (1)..(418): Homolog of NCBI NO: 30685997 NR Description: cytochrome P450 family [Arabidopsis thaliana]
  misc_feature (1)..(418): Homolog of NCBI NO: 15232418 NR Description: cytochrome P450 family [Arabidopsis thaliana]
MNISSRGAAAIDESLVFGSSGVVYAPYGDYLKFVKKIIATKLLRPQVLERSRGLRAEELQRLYNRILDKAKMNENVEIGKEATMLMNNIFCRMSMGRSFSEENGEAERVRGLVAESYALAKKIFFASVLRRLLKKLRIPLFKKDIMDVSNRFNELLEKILVEHNEKLDEEHKDTDMMDVLLAAYADENAEYKITRNHIKSFFVELFVGGTDTSVQTTQWTMAEIINNSDVLERLREEIDSVVGTSRMIQETDIPNLPYLQAVVKEGLRLHPPFPLLTRKFEERCEIKGFYIPEKTFLIINAYAWMRDPDSWEDPNEFKPERFLGSSRLGQVDEREEAQKYIPFGGGRRGCPGANLASIFVGTAIGVMVQCFDWGIKGDKINMEETFEGLTLTMVHPIKCTPIPRTLPFVTSNLQSPSS

SEQ ID NO: 101177 - protein, 347 aa, Arabidopsis thaliana
  peptide (1)..(347): Ceres Seq. ID no. 13607210
  misc_feature (1)..(347): Homolog of NCBI NO: 9294003 NR Description: cytochrome P450-like protein [Arabidopsis
  misc_feature (1)..(347): Homolog of NCBI NO: 15231047 NR Description: cytochrome P450 family [Arabidopsis thaliana]
  misc_feature (1)..(347): Homolog of NCBI NO: 30686008 NR Description: cytochrome P450 family [Arabidopsis thaliana]
  misc_feature (1)..(330): Homolog of NCBI NO: 15233794 NR Description: cytochrome P450 family [Arabidopsis thaliana]
  misc_feature (1)..(336): Homolog of NCBI NO: 15231052 NR Description: cytochrome P450 family [Arabidopsis thaliana]
  misc_feature (1)..(337): Homolog of NCBI NO: 15231049 NR Description: cytochrome P450 family [Arabidopsis thaliana]
  misc_feature (1)..(338): Homolog of NCBI NO: 9293969 NR Description: cytochrome P450-like protein [Arabidopsis
  misc_feature (1)..(337): Homolog of NCBI NO: 21553521 NR Description: cytochrome P450, putative [Arabidopsis thaliana]
  misc_feature (1)..(347): Homolog of NCBI NO: 30685997 NR Description: cytochrome P450 family [Arabidopsis thaliana]
  misc_feature (1)..(347): Homolog of NCBI NO: 15232418 NR Description: cytochrome P450 family [Arabidopsis thaliana]
MNENVEIGKEATMLMNNIFCRMSMGRSFSEENGEAERVRGLVAESYALAKKIFFASVLRRLLKKLRIPLFKKDIMDVSNRFNELLEKILVEHNEKLDEEHKDTDMMDVLLAAYADENAEYKITRNHIKSFFVELFVGGTDTSVQTTQWTMAEIINNSDVLERLREEIDSVVGTSRMIQETDIPNLPYLQAVVKEGLRLHPPFPLLTRKFEERCEIKGFYIPEKTFLIINAYAWMRDPDSWEDPNEFKPERFLGSSRLGQVDEREEAQKYIPFGGGRRGCPGANLASIFVGTAIGVMVQCFDWGIKGDKINMEETFEGLTLTMVHPIKCTPIPRTLPFVTSNLQSPSS

SEQ ID NO: 101178 - DNA, 1067 bp, Arabidopsis thaliana
  misc_feature (1)..(1067): Ceres Seq. ID no. 13607215
  misc_feature: MA Experiment ID: 20000173 Result: Down-regulated in Transcription
  misc_feature: MA Experiment 20000173 PARAMETER Experiment Name: At_42deg_Heat_P Parameter: Age (day) Value: 14
  misc_feature: MA Experiment 20000173 PARAMETER Experiment Name: At_42deg_Heat_P Parameter: Organism Value: A. thaliana
  misc_feature: MA Experiment 20000173 PARAMETER Experiment Name: At_42deg_Heat_P Parameter: Plant Line Value: WS
  misc_feature: MA Experiment 20000173 PARAMETER Experiment Name: At_42deg_Heat_P Parameter: Temperature (deg C) Value: 42 vs. 22
  misc_feature: MA Experiment 20000173 PARAMETER Experiment Name: At_42deg_Heat_P Parameter: Timepoint (hr) Value: 6
  misc_feature: MA Experiment 20000173 PARAMETER Experiment Name: At_42deg_Heat_P Parameter: Tissue Value: Aerial
  misc_feature: MA Experiment ID: 20000184 Result: Down-regulated in Transcription
  misc_feature: MA Experiment 20000184 PARAMETER Experiment Name: At_Shoots__P Parameter: Age (day) Value: 7
  misc_feature: MA Experiment 20000184 PARAMETER Experiment Name: At_Shoots__P Parameter: Tissue Value: Shoots vs. Whole Plant
  misc_feature: MA Experiment ID: 20000573 Result: Down-regulated in Transcription
  misc_feature: MA Experiment 20000573 PARAMETER Experiment Name: At_100uM_ABA_Mutants__P Parameter: Organism Value: A. thaliana
  misc_feature: MA Experiment 20000573 PARAMETER Experiment Name: At_100uM_ABA_Mutants__P Parameter: Plant Line Value: CS22 vs. Ler wt
  misc_feature: MA Experiment 20000573 PARAMETER Experiment Name: At_100uM_ABA_Mutants__P Parameter: Timepoint (hr) Value: N/A
  misc_feature: MA Experiment 20000573 PARAMETER Experiment Name: At_100uM_ABA_Mutants__P Parameter: Tissue Value: Whole Plant
  misc_feature: MA Experiment 20000573 PARAMETER Experiment Name: At_100uM_ABA_Mutants__P Parameter: Treatment Value: None
  misc_feature: MA Experiment ID: 20000574 Result: Down-regulated in Transcription
  misc_feature: MA Experiment 20000574 PARAMETER Experiment Name: At_100uM_ABA_Mutants__P Parameter: Organism Value: A. thaliana
  misc_feature: MA Experiment 20000574 PARAMETER Experiment Name: At_100uM_ABA_Mutants__P Parameter: Plant Line Value: CS23 vs. Ler wt
  misc_feature: MA Experiment 20000574 PARAMETER Experiment Name: At_100uM_ABA_Mutants__P Parameter: Timepoint (hr) Value: N/A
  misc_feature: MA Experiment 20000574 PARAMETER Experiment Name: At_100uM_ABA_Mutants__P Parameter: Tissue Value: Whole Plant
  misc_feature: MA Experiment 20000574 PARAMETER Experiment Name: At_100uM_ABA_Mutants__P Parameter: Treatment Value: None
  misc_feature: MA Experiment ID: 20000794 Result: Up-regulated in Transcription
  misc_feature: MA Experiment 20000794 PARAMETER Experiment Name: At_Petals_P Parameter: Age (day) Value: 23-25 days
  misc_feature: MA Experiment 20000794 PARAMETER Experiment Name: At_Petals_P Parameter: Plant Line Value: WS
  misc_feature: MA Experiment 20000794 PARAMETER Experiment Name: At_Petals_P Parameter: Tissue Value: Petals vs. Whole plant
  misc_feature: MA Experiment ID: 20001557 Result: Down-regulated in Transcription
  misc_feature: MA Experiment 20001557 PARAMETER Experiment Name: At_Drought_Soil_Dry_P Parameter: Age (day) Value: 27
  misc_feature: MA Experiment 20001557 PARAMETER Experiment Name: At_Drought_Soil_Dry_P Parameter: Organism Value: A. thaliana
  misc_feature: MA Experiment 20001557 PARAMETER Experiment Name: At_Drought_Soil_Dry_P Parameter: Plant Line Value: WS
  misc_feature: MA Experiment 20001557 PARAMETER Experiment Name: At_Drought_Soil_Dry_P Parameter: Post Timepoint (hr) Value: 3
  misc_feature: MA Experiment 20001557 PARAMETER Experiment Name: At_Drought_Soil_Dry_P Parameter: Post-Treatment Value: Re-Water vs. No Drought
  misc_feature: MA Experiment 20001557 PARAMETER Experiment Name: At_Drought_Soil_Dry_P Parameter: Timepoint (day) Value: 13
  misc_feature: MA Experiment 20001557 PARAMETER Experiment Name: At_Drought_Soil_Dry_P Parameter: Treatment Value: Drought vs. No Drought
  misc_feature: MA Experiment ID: 20001558 Result: Down-regulated in Transcription
  misc_feature: MA Experiment 20001558 PARAMETER Experiment Name: At_Drought_Soil_Dry_P Parameter: Age (day) Value: 27
  misc_feature: MA Experiment 20001558 PARAMETER Experiment Name: At_Drought_Soil_Dry_P Parameter: Organism Value: A. thaliana
  misc_feature: MA Experiment 20001558 PARAMETER Experiment Name: At_Drought_Soil_Dry_P Parameter: Plant Line Value: WS
  misc_feature: MA Experiment 20001558 PARAMETER Experiment Name: At_Drought_Soil_Dry_P Parameter: Post Timepoint (hr) Value: 6
  misc_feature: MA Experiment 20001558 PARAMETER Experiment Name: At_Drought_Soil_Dry_P Parameter: Post-Treatment Value: Re-Water vs. No Drought
  misc_feature: MA Experiment 20001558 PARAMETER Experiment Name: At_Drought_Soil_Dry_P Parameter: Timepoint (day) Value: 13
  misc_feature: MA Experiment 20001558 PARAMETER Experiment Name: At_Drought_Soil_Dry_P Parameter: Treatment Value: Drought vs. No Drought
cacgagaacacatccttccctctcctcctcctccttcccccaaaaaacctggagaaccatgcagttgcaatttcctctttaacccatttcaaagattcgtttttttttttttgtaaatctctttctcctttggcgaattcgtattccttcttttccaatgagttctagagacagaggatcaccttcttcttcttcgtcatcttcttcgttaccaggaatagaaaagtataatgaaaaggtgaagaatcagatacaagctcttgttcgtgttattaaagttgctcgtacctatagagacgacaatgtcccttcccttattgaacagggtctttatcttggatctgttgcagcagctagtaataagaatgttttgaaatcttacaatgttacacatattttgactgttgctagttcgttgagaccagctcatcctgatgactttgtttacaaggttgttcgagtcgtggataaggaagatacaaatctagaaatgtacttcgatgagtgtgttgatttcattgatgaagccaagagacaaggcggtagtgttcttgttcattgctttgttggcaaatcacggagtgtcactatagttgttgcttacctcatgaagaaacacggtatgactttagctcaagcattgcaacatgttaaaagcaaaagacccgtggcaagtcctaatgctggtttcatcagacaattacaagacctcgagaagtctatgcaagtgagtgaccagtttttttccttttgaggatgaaaagcaagtggttgtggaggagaagacagttccatgtaaatatctcttacatgcatcttccttcttctctataaaacagggaagcaagttacgattgcacaatgtcaggcgtgaagatcattgatcgtaccattgggagaaacttgtaaatctcacacgaagcatcaatcaaaatgttttgttgtttcttctccttaacaactcgaataataacatggaaacgaatttggaatatgttcatgttctctattcgttttgtatagtttcatcatcatggatataaaagtgaacataaataaaaatttgt

SEQ ID NO: 101179 - protein, 198 aa, Arabidopsis thaliana
  peptide (1)..(198): Ceres Seq. ID no. 13607216
  misc_feature (50)..(188): Pfam Name: Dual specificity phosphatase, catalytic domain Pfam Description: Dual specificity phosphatase, catalytic domain
  misc_feature (1)..(198): Homolog of NCBI NO: 15229482 NR Description: dual-specificity protein phosphatase [Arabidopsis
  misc_feature (20)..(198): Homolog of NCBI NO: 9294518 NR Description: dual-specificity protein phosphatase-like protein
  misc_feature (52)..(190): Homolog of NCBI NO: 30679726 NR Description: dual-specificity protein phosphatase -related
  misc_feature (22)..(197): Homolog of NCBI NO: 34905574 NR Description: hypothetical protein~similar to Arabidopsis
  misc_feature (52)..(190): Homolog of NCBI NO: 18397475 NR Description: dual-specificity protein phosphatase -related
  misc_feature (11)..(198): Homolog of NCBI NO: 31747006 NR Description: slingshot-related protein [Xenopus laevis]
  misc_feature (53)..(190): Homolog of NCBI NO: 18254478 NR Description: dual specificity phosphatase 19; protein
  misc_feature (57)..(194): Homolog of NCBI NO: 31239771 NR Description: ENSANGP00000016462 [Anopheles gambiae]
  misc_feature (18)..(194): Homolog of NCBI NO: 21753247 NR Description: unnamed protein product [Homo sapiens]
  misc_feature (18)..(183): Homolog of NCBI NO: 24586673 NR Description: slingshot 3 [Homo sapiens]
MSSRDRGSPSSSSSSSSLPGIEKYNEKVKNQIQALVRVIKVARTYRDDNVPSLIEQGLYLGSVAAASNKNVLKSYNVTHILTVASSLRPAHPDDFVYKVVRVVDKEDTNLEMYFDECVDFIDEAKRQGGSVLVHCFVGKSRSVTIVVAYLMKKHGMTLAQALQHVKSKRPVASPNAGFIRQLQDLEKSMQVSDQFFSF

SEQ ID NO: 101180 - DNA, 973 bp, Arabidopsis thaliana
  misc_feature (1)..(973): Ceres Seq. ID no. 13607217
  misc_feature: MA Experiment ID: 20001906 Result: Up-regulated in Transcription
  misc_feature: MA Experiment 20001906 PARAMETER Experiment Name: At_Drought_Reproduction_P Parameter: Age (day) Value: 35
  misc_feature: MA Experiment 20001906 PARAMETER Experiment Name: At_Drought_Reproduction_P Parameter: Organism Value: A. thaliana
  misc_feature: MA Experiment 20001906 PARAMETER Experiment Name: At_Drought_Reproduction_P Parameter: Plant Line Value: WS
  misc_feature: MA Experiment 20001906 PARAMETER Experiment Name: At_Drought_Reproduction_P Parameter: Timepoint (day) Value: 5
  misc_feature: MA Experiment 20001906 PARAMETER Experiment Name: At_Drought_Reproduction_P Parameter: Tissue Value: Siliques
  misc_feature: MA Experiment 20001906 PARAMETER Experiment Name: At_Drought_Reproduction_P Parameter: Treatment Value: Drought vs. No Drought
aactgagagagatcagagaaagagagatttgtaataatcaaatcatggggaagagaagaggtgtctccgccgtgaacgttgttttcgggtggctgcgacaacaatcgaacaaggttaaaatagctttaggaattatcatctctttgatcctcgtcgttcttctgaaattcaccgttaggaatcacaatcactttttcatcgcctccgagctcatccacgccgccggaatcttgatcctcatctacaaactcactcgccaaaagacttgctccggtctttctttaaaatctcaagaagtgacagcaatatttctagcggtgagattgatatgcagcataaacatggaaggtgatatccatacagttctcgatttcgccaccttggtttcgactctatgggtcatttatatgattcgatacaagctgaaagcatcttatataaagtctctcgacacttgctacaattactatgtgcttgtaccatctgctatccttgcgttgattattaacccgagtacgagttattcttacttccaccgtatattgtgggcgttttgcgtctacacagaatctgtctctgttctacctcaacttcgattaatgcaaaatgctcagatcatagagcctttcacagctcattatgtgtttgcactcggaatagctagattcctggcatgcgctcattggattatccaggtcgttgagactcgtggacattacctatggctactcggggctggttacttctggtttccggtggctctactagccgagatcgttcaaactttcatcctcgccgacttttgctactactatgtcaaaagtgttatggagggtcagcttgtactgaagatgccggtttaagatcatctagtataaaatgaaccaataaattttgcttgttttatctttcaacttaaactacaacttttaaccaaagtagattgctcaaaataatctagaatggtttcttt

SEQ ID NO: 101181 - protein, 286 aa, Arabidopsis thaliana
  peptide (1)..(286): Ceres Seq. ID no. 13607218
  misc_feature (62)..(273): Pfam Name: ER lumen protein retaining receptor Pfam Description: ER lumen protein retaining receptor
  misc_feature (15)..(286): Homolog of NCBI NO: 15230808 NR Description: ER lumen protein retaining receptor -related
  misc_feature (15)..(286): Homolog of NCBI NO: 28393144 NR Description: putative ER lumen protein retaining receptor
  misc_feature (15)..(273): Homolog of NCBI NO: 9294172 NR Description: ER lumen protein retaining receptor-like protein
  misc_feature (24)..(285): Homolog of NCBI NO: 18420309 NR Description: expressed protein [Arabidopsis thaliana] putative ER lumen protein retaining receptor [Arabidopsis
  misc_feature (24)..(285): Homolog of NCBI NO: 15223724 NR Description: ER lumen protein-retaining receptor [Arabidopsis
  misc_feature (24)..(285): Homolog of NCBI NO: 15222871 NR Description: ER lumen protein retaining receptor -related thaliana] >gi|28950707|gb|AAO63277.1| At1g75760 [Arabidopsis
  misc_feature (24)..(285): Homolog of NCBI NO: 13430654 NR Description: putative ER lumen protein retaining receptor
  misc_feature (24)..(285): Homolog of NCBI NO: 18399619 NR Description: ER lumen protein retaining receptor -related thaliana] >gi|20197720|gb|AAD29797.2| putative ER lumen protein
  misc_feature (24)..(285): Homolog of NCBI NO: 21537286 NR Description: putative ER lumen protein retaining receptor
  misc_feature (24)..(285): Homolog of NCBI NO: 9369358 NR Description: F10A5.5 [Arabidopsis thaliana]
LREIREREICNNQIMGKRRGVSAVNVVFGWLRQQSNKVKIALGIIISLILVVLLKFTVRNHNHFFIASELIHAAGILILIYKLTRQKTCSGLSLKSQEVTAIFLAVRLICSINMEGDIHTVLDFATLVSTLWVIYMIRYKLKASYIKSLDTCYNYYVLVPSAILALIINPSTSYSYFHRILWAFCVYTESVSVLPQLRLMQNAQIIEPFTAHYVFALGIARFLACAHWIIQVVETRGHYLWLLGAGYFWFPVALLAEIVQTFILADFCYYYVKSVMEGQLVLKMPV

SEQ ID NO: 101182 - protein, 272 aa, Arabidopsis thaliana
  peptide (1)..(272): Ceres Seq. ID no. 13607219
  misc_feature (48)..(259): Pfam Name: ER lumen protein retaining receptor Pfam Description: ER lumen protein retaining receptor
  misc_feature (1)..(272): Homolog of NCBI NO: 15230808 NR Description: ER lumen protein retaining receptor -related
  misc_feature (1)..(272): Homolog of NCBI NO: 28393144 NR Description: putative ER lumen protein retaining receptor
  misc_feature (1)..(259): Homolog of NCBI NO: 9294172 NR Description: ER lumen protein retaining receptor-like protein
  misc_feature (10)..(271): Homolog of NCBI NO: 18420309 NR Description: expressed protein [Arabidopsis thaliana] putative ER lumen protein retaining receptor [Arabidopsis
  misc_feature (10)..(271): Homolog of NCBI NO: 15223724 NR Description: ER lumen protein-retaining receptor [Arabidopsis
  misc_feature (10)..(271): Homolog of NCBI NO: 15222871 NR Description: ER lumen protein retaining receptor -related thaliana] >gi|28950707|gb|AAO63277.1| At1g75760 [Arabidopsis
  misc_feature (10)..(271): Homolog of NCBI NO: 13430654 NR Description: putative ER lumen protein retaining receptor
  misc_feature (10)..(271): Homolog of NCBI NO: 18399619 NR Description: ER lumen protein retaining receptor -related thaliana] >gi|20197720|gb|AAD29797.2| putative ER lumen protein
  misc_feature (10)..(271): Homolog of NCBI NO: 21537286 NR Description: putative ER lumen protein retaining receptor
  misc_feature (10)..(271): Homolog of NCBI NO: 9369358 NR Description: F10A5.5 [Arabidopsis thaliana]
MGKRRGVSAVNVVFGWLRQQSNKVKIALGIIISLILVVLLKFTVRNHNHFFIASELIHAAGILILIYKLTRQKTCSGLSLKSQEVTAIFLAVRLICSINMEGDIHTVLDFATLVSTLWVIYMIRYKLKASYIKSLDTCYNYYVLVPSAILALIINPSTSYSYFHRILWAFCVYTESVSVLPQLRLMQNAQIIEPFTAHYVFALGIARFLACAHWIIQVVETRGHYLWLLGAGYFWFPVALLAEIVQTFILADFCYYYVKSVMEGQLVLKMPV

SEQ ID NO: 101183 - protein, 173 aa, Arabidopsis thaliana
  peptide (1)..(173): Ceres Seq. ID no. 13607220
  misc_feature (1)..(160): Pfam Name: ER lumen protein retaining receptor Pfam Description: ER lumen protein retaining receptor
  misc_feature (1)..(173): Homolog of NCBI NO: 15230808 NR Description: ER lumen protein retaining receptor -related
  misc_feature (1)..(173): Homolog of NCBI NO: 28393144 NR Description: putative ER lumen protein retaining receptor
  misc_feature (1)..(160): Homolog of NCBI NO: 9294172 NR Description: ER lumen protein retaining receptor-like protein
  misc_feature (1)..(172): Homolog of NCBI NO: 18420309 NR Description: expressed protein [Arabidopsis thaliana] putative ER lumen protein retaining receptor [Arabidopsis
  misc_feature (1)..(172): Homolog of NCBI NO: 15223724 NR Description: ER lumen protein-retaining receptor [Arabidopsis
  misc_feature (1)..(172): Homolog of NCBI NO: 15222871 NR Description: ER lumen protein retaining receptor -related thaliana] >gi|28950707|gb|AAO63277.1| At1g75760 [Arabidopsis
  misc_feature (1)..(172): Homolog of NCBI NO: 13430654 NR Description: putative ER lumen protein retaining receptor
  misc_feature (1)..(172): Homolog of NCBI NO: 18399619 NR Description: ER lumen protein retaining receptor -related thaliana] >gi|20197720|gb|AAD29797.2| putative ER lumen protein
  misc_feature (1)..(172): Homolog of NCBI NO: 21537286 NR Description: putative ER lumen protein retaining receptor
  misc_feature (1)..(172): Homolog of NCBI NO: 9369358 NR Description: F10A5.5 [Arabidopsis thaliana]
MEGDIHTVLDFATLVSTLWVIYMIRYKLKASYIKSLDTCYNYYVLVPSAILALIINPSTSYSYFHRILWAFCVYTESVSVLPQLRLMQNAQIIEPFTAHYVFALGIARFLACAHWIIQVVETRGHYLWLLGAGYFWFPVALLAEIVQTFILADFCYYYVKSVMEGQLVLKMPV

SEQ ID NO: 101184 - DNA, 1120 bp, Arabidopsis thaliana
  misc_feature (1)..(1120): Ceres Seq. ID no. 13607221
  misc_feature: MA Experiment ID: 108595 Result: Down-regulated in Transcription
  misc_feature: MA Experiment 108595 PARAMETER Experiment Name: At_Ler-pi_Ovule_cDNA_P Parameter: Plant Line Value: null
  misc_feature: MA Experiment ID: 20000111 Result: Down-regulated in Transcription
  misc_feature: MA Experiment 20000111 PARAMETER Experiment Name: At_42deg_Heat_cDNA_P Parameter: Temperature (deg C) Value: 42 vs. 22
  misc_feature: MA Experiment 20000111 PARAMETER Experiment Name: At_42deg_Heat_cDNA_P Parameter: Timepoint (hr) Value: 6
  misc_feature: MA Experiment 20000111 PARAMETER Experiment Name: At_42deg_Heat_cDNA_P Parameter: Tissue Value: Aerial
  misc_feature: MA Experiment ID: 20000264 Result: Up-regulated in Transcription
  misc_feature: MA Experiment 20000264 PARAMETER Experiment Name: At_Open_Flower_P Parameter: Age (day) Value: 21
  misc_feature: MA Experiment 20000264 PARAMETER Experiment Name: At_Open_Flower_P Parameter: Plant Line Value: WS
  misc_feature: MA Experiment 20000264 PARAMETER Experiment Name: At_Open_Flower_P Parameter: Tissue Value: Open Flower vs. Whole Plant
  misc_feature: MA Experiment ID: 20000794 Result: Up-regulated in Transcription
  misc_feature: MA Experiment 20000794 PARAMETER Experiment Name: At_Petals_P Parameter: Age (day) Value: 23-25 days
  misc_feature: MA Experiment 20000794 PARAMETER Experiment Name: At_Petals_P Parameter: Plant Line Value: WS
  misc_feature: MA Experiment 20000794 PARAMETER Experiment Name: At_Petals_P Parameter: Tissue Value: Petals vs. Whole plant
  misc_feature: MA Experiment ID: 20001557 Result: Down-regulated in Transcription
  misc_feature: MA Experiment 20001557 PARAMETER Experiment Name: At_Drought_Soil_Dry_P Parameter: Age (day) Value: 27
  misc_feature: MA Experiment 20001557 PARAMETER Experiment Name: At_Drought_Soil_Dry_P Parameter: Organism Value: A. thaliana
  misc_feature: MA Experiment 20001557 PARAMETER Experiment Name: At_Drought_Soil_Dry_P Parameter: Plant Line Value: WS
  misc_feature: MA Experiment 20001557 PARAMETER Experiment Name: At_Drought_Soil_Dry_P Parameter: Post Timepoint (hr) Value: 3
  misc_feature: MA Experiment 20001557 PARAMETER Experiment Name: At_Drought_Soil_Dry_P Parameter: Post-Treatment Value: Re-Water vs. No Drought
  misc_feature: MA Experiment 20001557 PARAMETER Experiment Name: At_Drought_Soil_Dry_P Parameter: Timepoint (day) Value: 13
  misc_feature: MA Experiment 20001557 PARAMETER Experiment Name: At_Drought_Soil_Dry_P Parameter: Treatment Value: Drought vs. No Drought
  misc_feature: MA Experiment ID: 20001558 Result: Down-regulated in Transcription
  misc_feature: MA Experiment 20001558 PARAMETER Experiment Name: At_Drought_Soil_Dry_P Parameter: Age (day) Value: 27
  misc_feature: MA Experiment 20001558 PARAMETER Experiment Name: At_Drought_Soil_Dry_P Parameter: Organism Value: A. thaliana
  misc_feature: MA Experiment 20001558 PARAMETER Experiment Name: At_Drought_Soil_Dry_P Parameter: Plant Line Value: WS
  misc_feature: MA Experiment 20001558 PARAMETER Experiment Name: At_Drought_Soil_Dry_P Parameter: Post Timepoint (hr) Value: 6
  misc_feature: MA Experiment 20001558 PARAMETER Experiment Name: At_Drought_Soil_Dry_P Parameter: Post-Treatment Value: Re-Water vs. No Drought
  misc_feature: MA Experiment 20001558 PARAMETER Experiment Name: At_Drought_Soil_Dry_P Parameter: Timepoint (day) Value: 13
  misc_feature: MA Experiment 20001558 PARAMETER Experiment Name: At_Drought_Soil_Dry_P Parameter: Treatment Value: Drought vs. No Drought
tgcttattcaccagggaaaaatgttgcagaagatttctcagtctatttctttatgtaacggcgatcaatttaagccgttaatatacctcgccggagctccgacgaacttcatctcttcccctctctcaggcaagaagaaatcatcttctctgagaattaaaaggatacaacaacttcaaagtacattagaagatagaataaatccaccactagtatgtggaacagtatcgccacgtcttagtgttcctgatcatatactaaagcctctatatgttgagtctagcaaagttccagagatatcaagtgaattacagattcctgactctataggcattgtgaaaatgaagaaagcgtgtgagctcgcggctcgtgtattagactatgcaggaactttggttagaccgtttgttactacagatgaaattgataaagcagtgcatcagatggttattgagtttggtgcatatccttcacctcttggatatggtggatttcctaaaagtgtttgtacatcggttaatgaatgtatgtttcacgggattcccgattctcgtccgctacagaatggagatattataaacatcgatgttgcggtttacttggatgggtatcatggagatacgtcaaagactttcttatgtggagacgtcaatggaagccttaaacaacttgtcaaggtcacagaagaatgcttggagaaaggtatatcggtttgtaaagatggagcaagcttcaaacaaatcgggaagataatcagtgagcatgctgcaaagtatggctataatatggagcgattcatcggtcatggtgtaggaacggtattacactcggaacctcttatatatcttcatagtaactatgattatgaacttgaatatatgattgaaggtcaaacttttacgctcgaaccaattctcaccattggaacaacagagtttgtaacatggcctgacaaatggacaattgtgaccgcagatggtggtccggccgcacagtttgagcatacaattcttattaccaccactggtgcagaaattctcaccatatcatcatgaattatatcacaatgttacggaatttacattatgaaccatccatttctgttgtaaataaaagaaaa

SEQ ID NO: 101185 - protein, 350 aa, Arabidopsis thaliana
  peptide (1)..(350): Ceres Seq. ID no. 13607222
  misc_feature (7)..(350): Homolog of NCBI NO: 15230872 NR Description: methionine aminopeptidase -related [Arabidopsis
  misc_feature (7)..(350): Homolog of NCBI NO: 11320958 NR Description: methionine aminopeptidase-like protein
  misc_feature (7)..(350): Homolog of NCBI NO: 7939560 NR Description: methionine aminopeptidase-like protein
  misc_feature (41)..(347): Homolog of NCBI NO: 11320956 NR Description: methionine aminopeptidase-like protein
  misc_feature (41)..(347): Homolog of NCBI NO: 15222218 NR Description: methionine aminopeptidase I (MAP1) -related thaliana] >gi|25402759|pir||C86267 probable methionine
  misc_feature (59)..(347): Homolog of NCBI NO: 38345794 NR Description: OSJNBa0085I10.11 [Oryza sativa (japonica
  misc_feature (32)..(347): Homolog of NCBI NO: 34394646 NR Description: putative methionine aminopeptidase I (MAP1)
  misc_feature (49)..(347): Homolog of NCBI NO: 25289731 NR Description: methionyl aminopeptidase-like protein [imported] -
  misc_feature (73)..(347): Homolog of NCBI NO: 18419957 NR Description: methionyl aminopeptidase-related protein
  misc_feature (38)..(347): Homolog of NCBI NO: 40385867 NR Description: methionine aminopeptidase 1D; similar to
LIHQGKMLQKISQSISLCNGDQFKPLIYLAGAPTNFISSPLSGKKKSSSLRIKRIQQLQSTLEDRINPPLVCGTVSPRLSVPDHILKPLYVESSKVPEISSELQIPDSIGIVKMKKACELAARVLDYAGTLVRPFVTTDEIDKAVHQMVIEFGAYPSPLGYGGFPKSVCTSVNECMFHGIPDSRPLQNGDIINIDVAVYLDGYHGDTSKTFLCGDVNGSLKQLVKVTEECLEKGISVCKDGASFKQIGKIISEHAAKYGYNMERFIGHGVGTVLHSEPLIYLHSNYDYELEYMIEGQTFTLEPILTIGTTEFVTWPDKWTIVTADGGPAAQFEHTILITTTGAEILTISS

SEQ ID NO: 101186 - protein, 344 aa, Arabidopsis thaliana
  peptide (1)..(344): Ceres Seq. ID no. 13607223
  misc_feature (1)..(344): Homolog of NCBI NO: 15230872 NR Description: methionine aminopeptidase -related [Arabidopsis
  misc_feature (1)..(344): Homolog of NCBI NO: 11320958 NR Description: methionine aminopeptidase-like protein
  misc_feature (1)..(344): Homolog of NCBI NO: 7939560 NR Description: methionine aminopeptidase-like protein
  misc_feature (35)..(341): Homolog of NCBI NO: 11320956 NR Description: methionine aminopeptidase-like protein
  misc_feature (35)..(341): Homolog of NCBI NO: 15222218 NR Description: methionine aminopeptidase I (MAP1) -related thaliana] >gi|25402759|pir||C86267 probable methionine
  misc_feature (53)..(341): Homolog of NCBI NO: 38345794 NR Description: OSJNBa0085I10.11 [Oryza sativa (japonica
  misc_feature (26)..(341): Homolog of NCBI NO: 34394646 NR Description: putative methionine aminopeptidase I (MAP1)
  misc_feature (43)..(341): Homolog of NCBI NO: 25289731 NR Description: methionyl aminopeptidase-like protein [imported] -
  misc_feature (67)..(341): Homolog of NCBI NO: 18419957 NR Description: methionyl aminopeptidase-related protein
  misc_feature (32)..(341): Homolog of NCBI NO: 40385867 NR Description: methionine aminopeptidase 1D; similar to
MLQKISQSISLCNGDQFKPLIYLAGAPTNFISSPLSGKKKSSSLRIKRIQQLQSTLEDRINPPLVCGTVSPRLSVPDHILKPLYVESSKVPEISSELQIPDSIGIVKMKKACELAARVLDYAGTLVRPFVTTDEIDKAVHQMVIEFGAYPSPLGYGGFPKSVCTSVNECMFHGIPDSRPLQNGDIINIDVAVYLDGYHGDTSKTFLCGDVNGSLKQLVKVTEECLEKGISVCKDGASFKQIGKIISEHAAKYGYNMERFIGHGVGTVLHSEPLIYLHSNYDYELEYMIEGQTFTLEPILTIGTTEFVTWPDKWTIVTADGGPAAQFEHTILITTTGAEILTISS

SEQ ID NO: 101187 - protein, 237 aa, Arabidopsis thaliana; identical to SEQ ID NO: 73797
  peptide (1)..(237): Ceres Seq. ID no. 13607224
  misc_feature (1)..(237): Homolog of NCBI NO: 15230872 NR Description: methionine aminopeptidase -related [Arabidopsis
  misc_feature (1)..(237): Homolog of NCBI NO: 11320958 NR Description: methionine aminopeptidase-like protein
  misc_feature (1)..(237): Homolog of NCBI NO: 7939560 NR Description: methionine aminopeptidase-like protein
  misc_feature (1)..(234): Homolog of NCBI NO: 11320956 NR Description: methionine aminopeptidase-like protein
  misc_feature (1)..(234): Homolog of NCBI NO: 15222218 NR Description: methionine aminopeptidase I (MAP1) -related thaliana] >gi|25402759|pir||C86267 probable methionine
  misc_feature (1)..(234): Homolog of NCBI NO: 38345794 NR Description: OSJNBa0085I10.11 [Oryza sativa (japonica
  misc_feature (1)..(234): Homolog of NCBI NO: 34394646 NR Description: putative methionine aminopeptidase I (MAP1)
  misc_feature (1)..(234): Homolog of NCBI NO: 25289731 NR Description: methionyl aminopeptidase-like protein [imported] -
  misc_feature (1)..(234): Homolog of NCBI NO: 18419957 NR Description: methionyl aminopeptidase-related protein
  misc_feature (1)..(234): Homolog of NCBI NO: 40385867 NR Description: methionine aminopeptidase 1D; similar to

SEQ ID NO: 101188 - DNA, 1292 bp, Arabidopsis thaliana
  misc_feature (1)..(1292): Ceres Seq. ID no. 13607237
  misc_feature: MA Experiment ID: 20000169 Result: Up-regulated in Transcription
  misc_feature: MA Experiment 20000169 PARAMETER Experiment Name: At_100uM_ABA_P Parameter: Age (day) Value: 14
  misc_feature: MA Experiment 20000169 PARAMETER Experiment Name: At_100uM_ABA_P Parameter: Organism Value: A. thaliana
  misc_feature: MA Experiment 20000169 PARAMETER Experiment Name: At_100uM_ABA_P Parameter: Plant Line Value: WS
  misc_feature: MA Experiment 20000169 PARAMETER Experiment Name: At_100uM_ABA_P Parameter: Timepoint (hr) Value: 6
  misc_feature: MA Experiment 20000169 PARAMETER Experiment Name: At_100uM_ABA_P Parameter: Tissue Value: Aerial
  misc_feature: MA Experiment 20000169 PARAMETER Experiment Name: At_100uM_ABA_P Parameter: Treatment Value: 100uM ABA vs. No Treatment
  misc_feature: MA Experiment ID: 20000185 Result: Up-regulated in Transcription
  misc_feature: MA Experiment 20000185 PARAMETER Experiment Name: At_Roots__P Parameter: Age (day) Value: 7 vs. 21
  misc_feature: MA Experiment 20000185 PARAMETER Experiment Name: At_Roots__P Parameter: Organism Value: A. thaliana
  misc_feature: MA Experiment 20000185 PARAMETER Experiment Name: At_Roots__P Parameter: Tissue Value: Roots vs. Whole Plant
  misc_feature: MA Experiment ID: 20000267 Result: Up-regulated in Transcription
  misc_feature: MA Experiment 20000267 PARAMETER Experiment Name: At_Drought_P Parameter: Age (day) Value: 7
  misc_feature: MA Experiment 20000267 PARAMETER Experiment Name: At_Drought_P Parameter: Organism Value: A. thaliana
  misc_feature: MA Experiment 20000267 PARAMETER Experiment Name: At_Drought_P Parameter: Plant Line Value: WS
  misc_feature: MA Experiment 20000267 PARAMETER Experiment Name: At_Drought_P Parameter: Timepoint (hr) Value: 6
  misc_feature: MA Experiment 20000267 PARAMETER Experiment Name: At_Drought_P Parameter: Tissue Value: Whole Plant
  misc_feature: MA Experiment 20000267 PARAMETER Experiment Name: At_Drought_P Parameter: Treatment Value: Drought vs. No Drought
  misc_feature: MA Experiment ID: 20000436 Result: Up-regulated in Transcription
  misc_feature: MA Experiment 20000436 PARAMETER Experiment Name: At_Drought_P Parameter: Age (day) Value: 7
  misc_feature: MA Experiment 20000436 PARAMETER Experiment Name: At_Drought_P Parameter: Organism Value: A. thaliana
  misc_feature: MA Experiment 20000436 PARAMETER Experiment Name: At_Drought_P Parameter: Plant Line Value: WS
  misc_feature: MA Experiment 20000436 PARAMETER Experiment Name: At_Drought_P Parameter: Timepoint (hr) Value: 12
  misc_feature: MA Experiment 20000436 PARAMETER Experiment Name: At_Drought_P Parameter: Tissue Value: Whole Plant
  misc_feature: MA Experiment 20000436 PARAMETER Experiment Name: At_Drought_P Parameter: Treatment Value: Drought vs. No Drought
  misc_feature: MA Experiment ID: 20000439 Result: Up-regulated in Transcription
  misc_feature: MA Experiment 20000439 PARAMETER Experiment Name: At_Roots__P Parameter: Age (day) Value: 14 vs. 21
  misc_feature: MA Experiment 20000439 PARAMETER Experiment Name: At_Roots__P Parameter: Organism Value: A. thaliana
  misc_feature: MA Experiment 20000439 PARAMETER Experiment Name: At_Roots__P Parameter: Tissue Value: Roots vs. Whole Plant
  misc_feature: MA Experiment ID: 20000453 Result: Up-regulated in Transcription
  misc_feature: MA Experiment 20000453 PARAMETER Experiment Name: At_100uM_ABA_P Parameter: Age (day) Value: 15
  misc_feature: MA Experiment 20000453 PARAMETER Experiment Name: At_100uM_ABA_P Parameter: Organism Value: A. thaliana
  misc_feature: MA Experiment 20000453 PARAMETER Experiment Name: At_100uM_ABA_P Parameter: Plant Line Value: WS
  misc_feature: MA Experiment 20000453 PARAMETER Experiment Name: At_100uM_ABA_P Parameter: Timepoint (hr) Value: 24
  misc_feature: MA Experiment 20000453 PARAMETER Experiment Name: At_100uM_ABA_P Parameter: Tissue Value: Aerial
  misc_feature: MA Experiment 20000453 PARAMETER Experiment Name: At_100uM_ABA_P Parameter: Treatment Value: 100uM ABA vs. No Treatment
  misc_feature: MA Experiment ID: 20000455 Result: Up-regulated in Transcription
  misc_feature: MA Experiment 20000455 PARAMETER Experiment Name: At_100uM_ABA_P Parameter: Age (day) Value: 16
  misc_feature: MA Experiment 20000455 PARAMETER Experiment Name: At_100uM_ABA_P Parameter: Organism Value: A. thaliana
  misc_feature: MA Experiment 20000455 PARAMETER Experiment Name: At_100uM_ABA_P Parameter: Plant Line Value: WS
  misc_feature: MA Experiment 20000455 PARAMETER Experiment Name: At_100uM_ABA_P Parameter: Timepoint (hr) Value: 48
  misc_feature: MA Experiment 20000455 PARAMETER Experiment Name: At_100uM_ABA_P Parameter: Tissue Value: Aerial
  misc_feature: MA Experiment 20000455 PARAMETER Experiment Name: At_100uM_ABA_P Parameter: Treatment Value: 100uM ABA vs. No Treatment
  misc_feature: MA Experiment ID: 20001556 Result: Up-regulated in Transcription
  misc_feature: MA Experiment 20001556 PARAMETER Experiment Name: At_Drought_Soil_Dry_P Parameter: Age (day) Value: 26
  misc_feature: MA Experiment 20001556 PARAMETER Experiment Name: At_Drought_Soil_Dry_P Parameter: Organism Value: A. thaliana
  misc_feature: MA Experiment 20001556 PARAMETER Experiment Name: At_Drought_Soil_Dry_P Parameter: Plant Line Value: WS
  misc_feature: MA Experiment 20001556 PARAMETER Experiment Name: At_Drought_Soil_Dry_P Parameter: Post Timepoint (hr) Value: None
  misc_feature: MA Experiment 20001556 PARAMETER Experiment Name: At_Drought_Soil_Dry_P Parameter: Post-Treatment Value: None
  misc_feature: MA Experiment 20001556 PARAMETER Experiment Name: At_Drought_Soil_Dry_P Parameter: Timepoint (day) Value: 12
  misc_feature: MA Experiment 20001556 PARAMETER Experiment Name: At_Drought_Soil_Dry_P Parameter: Treatment Value: Drought vs. No Drought
  misc_feature: MA Experiment ID: 20001557 Result: Up-regulated in Transcription
  misc_feature: MA Experiment 20001557 PARAMETER Experiment Name: At_Drought_Soil_Dry_P Parameter: Age (day) Value: 27
  misc_feature: MA Experiment 20001557 PARAMETER Experiment Name: At_Drought_Soil_Dry_P Parameter: Organism Value: A. thaliana
  misc_feature: MA Experiment 20001557 PARAMETER Experiment Name: At_Drought_Soil_Dry_P Parameter: Plant Line Value: WS
  misc_feature: MA Experiment 20001557 PARAMETER Experiment Name: At_Drought_Soil_Dry_P Parameter: Post Timepoint (hr) Value: 3
  misc_feature: MA Experiment 20001557 PARAMETER Experiment Name: At_Drought_Soil_Dry_P Parameter: Post-Treatment Value: Re-Water vs. No Drought
  misc_feature: MA Experiment 20001557 PARAMETER Experiment Name: At_Drought_Soil_Dry_P Parameter: Timepoint (day) Value: 13
  misc_feature: MA Experiment 20001557 PARAMETER Experiment Name: At_Drought_Soil_Dry_P Parameter: Treatment Value: Drought vs. No Drought
  misc_feature: MA Experiment ID: 20001904 Result: Up-regulated in Transcription
  misc_feature: MA Experiment 20001904 PARAMETER Experiment Name: At_Drought_Reproduction_P Parameter: Age (day) Value: 37
  misc_feature: MA Experiment 20001904 PARAMETER Experiment Name: At_Drought_Reproduction_P Parameter: Organism Value: A. thaliana
  misc_feature: MA Experiment 20001904 PARAMETER Experiment Name: At_Drought_Reproduction_P Parameter: Plant Line Value: WS
  misc_feature: MA Experiment 20001904 PARAMETER Experiment Name: At_Drought_Reproduction_P Parameter: Timepoint (day) Value: 7
  misc_feature: MA Experiment 20001904 PARAMETER Experiment Name: At_Drought_Reproduction_P Parameter: Tissue Value: Rosettes
  misc_feature: MA Experiment 20001904 PARAMETER Experiment Name: At_Drought_Reproduction_P Parameter: Treatment Value: Drought vs. No Drought
  misc_feature: MA Experiment ID: 20001905 Result: Up-regulated in Transcription
  misc_feature: MA Experiment 20001905 PARAMETER Experiment Name: At_Drought_Reproduction_P Parameter: Age (day) Value: 40
  misc_feature: MA Experiment 20001905 PARAMETER Experiment Name: At_Drought_Reproduction_P Parameter: Organism Value: A. thaliana
  misc_feature: MA Experiment 20001905 PARAMETER Experiment Name: At_Drought_Reproduction_P Parameter: Plant Line Value: WS
  misc_feature: MA Experiment 20001905 PARAMETER Experiment Name: At_Drought_Reproduction_P Parameter: Timepoint (day) Value: 10
  misc_feature: MA Experiment 20001905 PARAMETER Experiment Name: At_Drought_Reproduction_P Parameter: Tissue Value: Rosettes
  misc_feature: MA Experiment 20001905 PARAMETER Experiment Name: At_Drought_Reproduction_P Parameter: Treatment Value: Drought vs. No Drought
  misc_feature: MA Experiment ID: 20001911 Result: Up-regulated in Transcription
  misc_feature: MA Experiment 20001911 PARAMETER Experiment Name: At_Drought_Reproduction_P Parameter: Age (day) Value: 40
  misc_feature: MA Experiment 20001911 PARAMETER Experiment Name: At_Drought_Reproduction_P Parameter: Organism Value: A. thaliana
  misc_feature: MA Experiment 20001911 PARAMETER Experiment Name: At_Drought_Reproduction_P Parameter: Plant Line Value: WS
  misc_feature: MA Experiment 20001911 PARAMETER Experiment Name: At_Drought_Reproduction_P Parameter: Timepoint (day) Value: 10
  misc_feature: MA Experiment 20001911 PARAMETER Experiment Name: At_Drought_Reproduction_P Parameter: Tissue Value: Flowers
  misc_feature: MA Experiment 20001911 PARAMETER Experiment Name: At_Drought_Reproduction_P Parameter: Treatment Value: Drought vs. No Drought
aaaaaaatcaattttcagaaaccatttcgtgacaatgaagaaatctattttctttgtcccagttttggtattattcttctttggatcaagattttctagagtagctagcgcaggagaccaaagagccttagccgcttcattcgtcttcggcgattcgctagtagacgcaggaaataacaactacttacaaacgttgtctagagccaacagtcctcctaatggcatcgatttcaaaccatctcgtggaaatccaaccggccggtttactaatggccgtaccatagctgacatcgttggagaaaagttagggcagcaaagttatgcagttccatatttagcaccaaatgcaagtggtgaagcactattaaatggtgtgaactatgcatcaggtggtggtggaattctcaatgctacaggaagtgtatttgtgaatcggttaggaatggacatacaagttgattactttaccaatacaaggaagcagtttgataagcttttgggtcaagataaagctagagattacattagaaagagatccttattttctgtagttatcggttcaaacgattttctcaacaattacctagtcccttttgtcgcggctcaagcaagactaacacaaactcctgaaactttcgtcgatgacatgattagccacctccgcaaccagctcaagagattatatgatatggacgctcggaaatttgtggtgggaaatgtggctcctattggatgtataccataccagaaatcgatcaatcaattgaacgataaacagtgtgttgatttagcaaacaaactggctattcaatacaatgctcgtctcaaagatctcttgacggtggaattgaaagatagtctcaaagacgcacacttcgtttatgccaacgtttatgatttattcatggacctcattgtcaacttcaaagactacgggtttaggacggcaagtgaggcgtgttgcgaaacgagagggagattggcggggatattgccatgtggaccaacgtcgagcctttgtacggaccggtcaaagcatgtgttctgggacgcgtaccatcctaccgaagccgctaatcttcttattgctgacaaattactttacggagactccaaattcgtcactccctttaacctcctccaccttcgtgacctttgagattataataacctttcactaaaaaaattgtaatttctacttttggtggcttagagtggttagcgttaaaaatcatatatgtagtagatttgttctctttttttatatatatattattgtagatttggagttt

SEQ ID NO: 101189 - protein, 385 aa, Arabidopsis thaliana
  peptide (1)..(385): Ceres Seq. ID no. 13607238
  misc_feature (12)..(385): Homolog of NCBI NO: 15229742 NR Description: GDSL-motif lipase/hydrolase protein [Arabidopsis >gi|7630026|emb|CAB88323.1| putative protein [Arabidopsis >gi|26450386|dbj|BAC42308.1| unknown protein [Arabidopsis
  misc_feature (22)..(385): Homolog of NCBI NO: 15227849 NR Description: GDSL-motif lipase/hydrolase protein [Arabidopsis
  misc_feature (45)..(385): Homolog of NCBI NO: 34899288 NR Description: similar to GDSL-motif lipase/hydrolase [Oryza
  misc_feature (47)..(382): Homolog of NCBI NO: 38345537 NR Description: OSJNBa0020J04.12 [Oryza sativa (japonica
  misc_feature (46)..(385): Homolog of NCBI NO: 15238210 NR Description: GDSL-motif lipase/hydrolase protein [Arabidopsis
  misc_feature (228)..(385): Homolog of NCBI NO: 15234857 NR Description: GDSL-motif lipase/hydrolase protein [Arabidopsis
  misc_feature (12)..(147): Homolog of NCBI NO: 15234857 NR Description: GDSL-motif lipase/hydrolase protein [Arabidopsis
  misc_feature (12)..(385): Homolog of NCBI NO: 18417760 NR Description: GDSL-motif lipase/hydrolase protein [Arabidopsis
  misc_feature (22)..(379): Homolog of NCBI NO: 32489520 NR Description: OSJNBa0043L24.11 [Oryza sativa (japonica
  misc_feature (12)..(385): Homolog of NCBI NO: 11280578 NR Description: hypothetical protein F14F8_100 - Arabidopsis >gi|9755617|emb|CAC01771.1| putative protein [Arabidopsis
KKSIFRNHFVTMKKSIFFVPVLVLFFFGSRFSRVASAGDQRALAASFVFGDSLVDAGNNNYLQTLSRANSPPNGIDFKPSRGNPTGRFTNGRTIADIVGEKLGQQSYAVPYLAPNASGEALLNGVNYASGGGGILNATGSVFVNRLGMDIQVDYFTNTRKQFDKLLGQDKARDYIRKRSLFSVVIGSNDFLNNYLVPFVAAQARLTQTPETFVDDMISHLRNQLKRLYDMDARKFVVGNVAPIGCIPYQKSINQLNDKQCVDLANKLAIQYNARLKDLLTVELKDSLKDAHFVYANVYDLFMDLIVNFKDYGFRTASEACCETRGRLAGILPCGPTSSLCTDRSKHVFWDAYHPTEAANLLIADKLLYGDSKFVTPFNLLHLRDL

SEQ ID NO: 101190 - protein, 374 aa, Arabidopsis thaliana
  peptide (1)..(374): Ceres Seq. ID no. 13607239
  misc_feature (1)..(374): Homolog of NCBI NO: 15229742 NR Description: GDSL-motif lipase/hydrolase protein [Arabidopsis >gi|7630026|emb|CAB88323.1| putative protein [Arabidopsis >gi|26450386|dbj|BAC42308.1| unknown protein [Arabidopsis
  misc_feature (11)..(374): Homolog of NCBI NO: 15227849 NR Description: GDSL-motif lipase/hydrolase protein [Arabidopsis
  misc_feature (34)..(374): Homolog of NCBI NO: 34899288 NR Description: similar to GDSL-motif lipase/hydrolase [Oryza
  misc_feature (36)..(371): Homolog of NCBI NO: 38345537 NR Description: OSJNBa0020J04.12 [Oryza sativa (japonica
  misc_feature (35)..(374): Homolog of NCBI NO: 15238210 NR Description: GDSL-motif lipase/hydrolase protein [Arabidopsis
  misc_feature (217)..(374): Homolog of NCBI NO: 15234857 NR Description: GDSL-motif lipase/hydrolase protein [Arabidopsis
  misc_feature (1)..(136): Homolog of NCBI NO: 15234857 NR Description: GDSL-motif lipase/hydrolase protein [Arabidopsis
  misc_feature (1)..(374): Homolog of NCBI NO: 18417760 NR Description: GDSL-motif lipase/hydrolase protein [Arabidopsis
  misc_feature (11)..(368): Homolog of NCBI NO: 32489520 NR Description: OSJNBa0043L24.11 [Oryza sativa (japonica
  misc_feature (1)..(374): Homolog of NCBI NO: 11280578 NR Description: hypothetical protein F14F8_100 - Arabidopsis >gi|9755617|emb|CAC01771.1| putative protein [Arabidopsis
MKKSIFFVPVLVLFFFGSRFSRVASAGDQRALAASFVFGDSLVDAGNNNYLQTLSRANSPPNGIDFKPSRGNPTGRFTNGRTIADIVGEKLGQQSYAVPYLAPNASGEALLNGVNYASGGGGILNATGSVFVNRLGMDIQVDYFTNTRKQFDKLLGQDKARDYIRKRSLFSVVIGSNDFLNNYLVPFVAAQARLTQTPETFVDDMISHLRNQLKRLYDMDARKFVVGNVAPIGCIPYQKSINQLNDKQCVDLANKLAIQYNARLKDLLTVELKDSLKDAHFVYANVYDLFMDLIVNFKDYGFRTASEACCETRGRLAGILPCGPTSSLCTDRSKHVFWDAYHPTEAANLLIADKLLYGDSKFVTPFNLLHLRDL

SEQ ID NO: 101191 - protein, 238 aa, Arabidopsis thaliana
  peptide (1)..(238): Ceres Seq. ID no. 13607240
  misc_feature (1)..(238): Homolog of NCBI NO: 15229742 NR Description: GDSL-motif lipase/hydrolase protein [Arabidopsis >gi|7630026|emb|CAB88323.1| putative protein [Arabidopsis >gi|26450386|dbj|BAC42308.1| unknown protein [Arabidopsis
  misc_feature (1)..(238): Homolog of NCBI NO: 15227849 NR Description: GDSL-motif lipase/hydrolase protein [Arabidopsis
  misc_feature (1)..(238): Homolog of NCBI NO: 34899288 NR Description: similar to GDSL-motif lipase/hydrolase [Oryza
  misc_feature (1)..(235): Homolog of NCBI NO: 38345537 NR Description: OSJNBa0020J04.12 [Oryza sativa (japonica
  misc_feature (1)..(238): Homolog of NCBI NO: 15238210 NR Description: GDSL-motif lipase/hydrolase protein [Arabidopsis
  misc_feature (81)..(238): Homolog of NCBI NO: 15234857 NR Description: GDSL-motif lipase/hydrolase protein [Arabidopsis
  misc_feature (1)..(238): Homolog of NCBI NO: 18417760 NR Description: GDSL-motif lipase/hydrolase protein [Arabidopsis
  misc_feature (1)..(232): Homolog of NCBI NO: 32489520 NR Description: OSJNBa0043L24.11 [Oryza sativa (japonica
  misc_feature (1)..(238): Homolog of NCBI NO: 11280578 NR Description: hypothetical protein F14F8_100 - Arabidopsis >gi|9755617|emb|CAC01771.1| putative protein [Arabidopsis
  misc_feature (1)..(216): Homolog of NCBI NO: 15220514 NR Description: GDSL-motif lipase/hydrolase protein [Arabidopsis
MDIQVDYFTNTRKQFDKLLGQDKARDYIRKRSLFSVVIGSNDFLNNYLVPFVAAQARLTQTPETFVDDMISHLRNQLKRLYDMDARKFVVGNVAPIGCIPYQKSINQLNDKQCVDLANKLAIQYNARLKDLLTVELKDSLKDAHFVYANVYDLFMDLIVNFKDYGFRTASEACCETRGRLAGILPCGPTSSLCTDRSKHVFWDAYHPTEAANLLIADKLLYGDSKFVTPFNLLHLRDL

SEQ ID NO: 101192 - DNA, 2016 bp, Arabidopsis thaliana
  misc_feature (1)..(2016): Ceres Seq. ID no. 13607246
  misc_feature: MA Experiment ID: 20000180 Result: Up-regulated in Transcription
  misc_feature: MA Experiment 20000180 PARAMETER Experiment Name: At_Germinating_Seeds_P Parameter: Age (hr) Value: 24 vs. 0
  misc_feature: MA Experiment 20000180 PARAMETER Experiment Name: At_Germinating_Seeds_P Parameter: Tissue Value: Germinating Seeds
  misc_feature: MA Experiment ID: 20001911 Result: Down-regulated in Transcription
  misc_feature: MA Experiment 20001911 PARAMETER Experiment Name: At_Drought_Reproduction_P Parameter: Age (day) Value: 40
  misc_feature: MA Experiment 20001911 PARAMETER Experiment Name: At_Drought_Reproduction_P Parameter: Organism Value: A. thaliana
  misc_feature: MA Experiment 20001911 PARAMETER Experiment Name: At_Drought_Reproduction_P Parameter: Plant Line Value: WS
  misc_feature: MA Experiment 20001911 PARAMETER Experiment Name: At_Drought_Reproduction_P Parameter: Timepoint (day) Value: 10
  misc_feature: MA Experiment 20001911 PARAMETER Experiment Name: At_Drought_Reproduction_P Parameter: Tissue Value: Flowers
  misc_feature: MA Experiment 20001911 PARAMETER Experiment Name: At_Drought_Reproduction_P Parameter: Treatment Value: Drought vs. No Drought
tcatcaagatcacctctccaatcattcattctacacacagctgtttttgattcatctacaaatttctgattttttttctagggttcttgtttttccccccaaattgacttgttctcctctctgtttaggtttgtgtctctttaatggtgtgtgaaaggtgaaagctttaagcttttgtgtgtgttttaacaacaatggcggagatcaagaatgctaaagtagaacaaaggcaaacgaagattaggaatgttccagtagctgtaactcctgaaggtttctggtgttgtccttctcctgttgcgtttcaaaagactcttaaatctcacaactctctcaccaaacacaagcaatcttctcctgctcttcaacctcctaagccggagaagaaaccatcttcgactactattagatccgtcattgcttctgatgaaactcaacagaatttgggtagttttgatactgttcatagtattgctgttcctgcgacggttcaagagagaccacagaggcaaaaggttgagactttaccgaggaaagttgctattgagtttggtgaaccgggaagtagtgatgctaaagtgattttggttgggaagcaaggtttttgtgtgaagcttagtgttcataagaaagttttggttgatcatagttgtttctttgctaagaaactagctgagaaagattcggtttttgcttgtcttgagattgagagctgtgaagatgctgagctttacgttgagactattggacttatgtattgtaaagatatgaagcaacgacttatgaaacaaaatgttagcagagttcttcgtgtcctcaaggttgcagagcttcttggttttagttcatgtatacagtcttgtttggattacttagaagctgtgccttgggttggggaagaagaagaggagaaagttatctcatcgattcttagattaaaaactgaaggagttggtgtcacgcctgttctcaaacgagttgcttctaatgctgtggatccaccaaaggagacgctatcacgcatcattgagcttgttttaagaagcaaagaggagaaaagtcgacgtgagatgaaatctattgttctgaagcttcttagagaacagaatggagccaatgtagctgataacttcaatgatacaatctattcctcttgccaaacctgcttggattcggttctgtctctgtttaaacaagcttctgagggagagaaacctgagactgataccaaacagattgctgtagaagcagataacctcacgtggctccttgatgtgttagcggaaagacaagctgcagaggaattctcagtcacatgggcaaaccaaaaggagctcgctttgttacatgagaagcttcctttaatgtctcgttaccatataagccgtgtaacatctcggctctttatagggattgggagaggagaattgttgccttcaaaggacactcgacttctgctactaacaacatggttgcaaccgttgttcaatgactataactggcttcaacatggttgcagatcgtttgatggtaaactagtggaggaaggaattggtcggacgatactgacactaccattggaagatcagcagagcattttactgtcgtggctcgggagttttctaaacggaggagatggatgtccgaatcttcagagagcttttgaggtttggtggagacgatctttcattagaccttactcagatcgtcaagctaatggttcgtgtcaaacagattcaacttcaaaagaggagtgacttaaagaaagctgagtaatctttgttagattgtacagtgcataatgtagctatgggaatgtgttggtttggtgatcttgatttccggtttggttttgtttggtttggtttggtttagatcgtaccatgtacgagacaatgtcttgcaggttttttagtggtcgatttttttcttcatgttttgtatttttcagttttcataatgatgatggatgtatatttctgattcgatttttataccattttaaatgtttcagtg

SEQ ID NO: 101193 - protein, 520 aa, Arabidopsis thaliana
  peptide (1)..(520): Ceres Seq. ID no. 13607247
  misc_feature (1)..(520): Homolog of NCBI NO: 15230303 NR Description: expressed protein [Arabidopsis thaliana]
  misc_feature (1)..(510): Homolog of NCBI NO: 40539077 NR Description: expressed protein [Oryza sativa (japonica
  misc_feature (1)..(513): Homolog of NCBI NO: 34394507 NR Description: PRLI-interacting factor G-like protein [Oryza
  misc_feature (50)..(500): Homolog of NCBI NO: 38230508 NR Description: predicted protein [Populus alba x Populus tremula]
  misc_feature (271)..(498): Homolog of NCBI NO: 32488518 NR Description: OSJNBa0011J08.25 [Oryza sativa (japonica
  misc_feature (118)..(263): Homolog of NCBI NO: 32488518 NR Description: OSJNBa0011J08.25 [Oryza sativa (japonica
  misc_feature (66)..(519): Homolog of NCBI NO: 15222554 NR Description: expressed protein [Arabidopsis thaliana]
  misc_feature (26)..(500): Homolog of NCBI NO: 15238599 NR Description: expressed protein [Arabidopsis thaliana] gb|AAF07368.1~gene_id:MGO3.3~similar to unknown protein thaliana] >gi|26450097|dbj|BAC42168.1| unknown protein
  misc_feature (7)..(500): Homolog of NCBI NO: 21553858 NR Description: unknown [Arabidopsis thaliana]
  misc_feature (171)..(500): Homolog of NCBI NO: 18397316 NR Description: f13j11 PRLI-interacting factor G -related thaliana] >gi|20197793|gb|AAD28312.2| expressed protein thaliana] >gi|20198052|gb|AAM15372.1| expressed protein
MAEIKNAKVEQRQTKIRNVPVAVTPEGFWCCPSPVAFQKTLKSHNSLTKHKQSSPALQPPKPEKKPSSTTIRSVIASDETQQNLGSFDTVHSIAVPATVQERPQRQKVETLPRKVAIEFGEPGSSDAKVILVGKQGFCVKLSVHKKVLVDHSCFFAKKLAEKDSVFACLEIESCEDAELYVETIGLMYCKDMKQRLMKQNVSRVLRVLKVAELLGFSSCIQSCLDYLEAVPWVGEEEEEKVISSILRLKTEGVGVTPVLKRVASNAVDPPKETLSRIIELVLRSKEEKSRREMKSIVLKLLREQNGANVADNFNDTIYSSCQTCLDSVLSLFKQASEGEKPETDTKQIAVEADNLTWLLDVLAERQAAEEFSVTWANQKELALLHEKLPLMSRYHISRVTSRLFIGIGRGELLPSKDTRLLLLTTWLQPLFNDYNWLQHGCRSFDGKLVEEGIGRTILTLPLEDQQSILLSWLGSFLNGGDGCPNLQRAFEVWWRRSFIRPYSDRQANGSCQTDSTSKEE

SEQ ID NO: 101194 - protein, 334 aa, Arabidopsis thaliana
  peptide (1)..(334): Ceres Seq. ID no. 13607248
  misc_feature (1)..(334): Homolog of NCBI NO: 15230303 NR Description: expressed protein [Arabidopsis thaliana]
  misc_feature (1)..(324): Homolog of NCBI NO: 40539077 NR Description: expressed protein [Oryza sativa (japonica
  misc_feature (1)..(327): Homolog of NCBI NO: 34394507 NR Description: PRLI-interacting factor G-like protein [Oryza
  misc_feature (1)..(314): Homolog of NCBI NO: 38230508 NR Description: predicted protein [Populus alba x Populus tremula]
  misc_feature (85)..(312): Homolog of NCBI NO: 32488518 NR Description: OSJNBa0011J08.25 [Oryza sativa (japonica
  misc_feature (1)..(77): Homolog of NCBI NO: 32488518 NR Description: OSJNBa0011J08.25 [Oryza sativa (japonica
  misc_feature (1)..(333): Homolog of NCBI NO: 15222554 NR Description: expressed protein [Arabidopsis thaliana]
  misc_feature (1)..(314): Homolog of NCBI NO: 15238599 NR Description: expressed protein [Arabidopsis thaliana] gb|AAF07368.1~gene_id:MGO3.3~similar to unknown protein thaliana] >gi|26450097|dbj|BAC42168.1| unknown protein
  misc_feature (1)..(314): Homolog of NCBI NO: 21553858 NR Description: unknown [Arabidopsis thaliana]
  misc_feature (1)..(314): Homolog of NCBI NO: 18397316 NR Description: f13j11 PRLI-interacting factor G -related thaliana] >gi|20197793|gb|AAD28312.2| expressed protein thaliana] >gi|20198052|gb|AAM15372.1| expressed protein
MYCKDMKQRLMKQNVSRVLRVLKVAELLGFSSCIQSCLDYLEAVPWVGEEEEEKVISSILRLKTEGVGVTPVLKRVASNAVDPPKETLSRIIELVLRSKEEKSRREMKSIVLKLLREQNGANVADNFNDTIYSSCQTCLDSVLSLFKQASEGEKPETDTKQIAVEADNLTWLLDVLAERQAAEEFSVTWANQKELALLHEKLPLMSRYHISRVTSRLFIGIGRGELLPSKDTRLLLLTTWLQPLFNDYNWLQHGCRSFDGKLVEEGIGRTILTLPLEDQQSILLSWLGSFLNGGDGCPNLQRAFEVWWRRSFIRPYSDRQANGSCQTDSTSKEE

SEQ ID NO: 101195 - protein, 329 aa, Arabidopsis thaliana
  peptide (1)..(329): Ceres Seq. ID no. 13607249
  misc_feature (1)..(329): Homolog of NCBI NO: 15230303 NR Description: expressed protein [Arabidopsis thaliana]
  misc_feature (1)..(319): Homolog of NCBI NO: 40539077 NR Description: expressed protein [Oryza sativa (japonica
  misc_feature (1)..(322): Homolog of NCBI NO: 34394507 NR Description: PRLI-interacting factor G-like protein [Oryza
  misc_feature (1)..(309): Homolog of NCBI NO: 38230508 NR Description: predicted protein [Populus alba x Populus tremula]
  misc_feature (80)..(307): Homolog of NCBI NO: 32488518 NR Description: OSJNBa0011J08.25 [Oryza sativa (japonica
  misc_feature (1)..(72): Homolog of NCBI NO: 32488518 NR Description: OSJNBa0011J08.25 [Oryza sativa (japonica
  misc_feature (1)..(328): Homolog of NCBI NO: 15222554 NR Description: expressed protein [Arabidopsis thaliana]
  misc_feature (1)..(309): Homolog of NCBI NO: 15238599 NR Description: expressed protein [Arabidopsis thaliana] gb|AAF07368.1~gene_id:MGO3.3~similar to unknown protein thaliana] >gi|26450097|dbj|BAC42168.1| unknown protein
  misc_feature (1)..(309): Homolog of NCBI NO: 21553858 NR Description: unknown [Arabidopsis thaliana]
  misc_feature (1)..(309): Homolog of NCBI NO: 18397316 NR Description: f13j11 PRLI-interacting factor G -related thaliana] >gi|20197793|gb|AAD28312.2| expressed protein thaliana] >gi|20198052|gb|AAM15372.1| expressed protein
MKQRLMKQNVSRVLRVLKVAELLGFSSCIQSCLDYLEAVPWVGEEEEEKVISSILRLKTEGVGVTPVLKRVASNAVDPPKETLSRIIELVLRSKEEKSRREMKSIVLKLLREQNGANVADNFNDTIYSSCQTCLDSVLSLFKQASEGEKPETDTKQIAVEADNLTWLLDVLAERQAAEEFSVTWANQKELALLHEKLPLMSRYHISRVTSRLFIGIGRGELLPSKDTRLLLLTTWLQPLFNDYNWLQHGCRSFDGKLVEEGIGRTILTLPLEDQQSILLSWLGSFLNGGDGCPNLQRAFEVWWRRSFIRPYSDRQANGSCQTDSTSKEE

SEQ ID NO: 101196 - DNA, 1266 bp, Arabidopsis thaliana
  misc_feature (1)..(1266): Ceres Seq. ID no. 13607258
  misc_feature: MA Experiment ID: 20000171 Result: Up-regulated in Transcription
  misc_feature: MA Experiment 20000171 PARAMETER Experiment Name: At_42deg_Heat_P Parameter: Age (day) Value: 14
  misc_feature: MA Experiment 20000171 PARAMETER Experiment Name: At_42deg_Heat_P Parameter: Organism Value: A. thaliana
  misc_feature: MA Experiment 20000171 PARAMETER Experiment Name: At_42deg_Heat_P Parameter: Plant Line Value: WS
  misc_feature: MA Experiment 20000171 PARAMETER Experiment Name: At_42deg_Heat_P Parameter: Temperature (deg C) Value: 42 vs. 22
  misc_feature: MA Experiment 20000171 PARAMETER Experiment Name: At_42deg_Heat_P Parameter: Timepoint (hr) Value: 1
  misc_feature: MA Experiment 20000171 PARAMETER Experiment Name: At_42deg_Heat_P Parameter: Tissue Value: Aerial
  misc_feature: MA Experiment ID: 20000185 Result: Up-regulated in Transcription
  misc_feature: MA Experiment 20000185 PARAMETER Experiment Name: At_Roots__P Parameter: Age (day) Value: 7 vs. 21
  misc_feature: MA Experiment 20000185 PARAMETER Experiment Name: At_Roots__P Parameter: Organism Value: A. thaliana
  misc_feature: MA Experiment 20000185 PARAMETER Experiment Name: At_Roots__P Parameter: Tissue Value: Roots vs. Whole Plant
  misc_feature: MA Experiment ID: 20000234 Result: Down-regulated in Transcription
  misc_feature: MA Experiment 20000234 PARAMETER Experiment Name: At_Siliques_P Parameter: Age (day) Value: 21
  misc_feature: MA Experiment 20000234 PARAMETER Experiment Name: At_Siliques_P Parameter: Organism Value: A. thaliana
  misc_feature: MA Experiment 20000234 PARAMETER Experiment Name: At_Siliques_P Parameter: Plant Line Value: WS
  misc_feature: MA Experiment 20000234 PARAMETER Experiment Name: At_Siliques_P Parameter: Tissue Value: Less Than 5mm Siliques vs. Whole Plant
  misc_feature: MA Experiment ID: 20000439 Result: Up-regulated in Transcription
  misc_feature: MA Experiment 20000439 PARAMETER Experiment Name: At_Roots__P Parameter: Age (day) Value: 14 vs. 21
  misc_feature: MA Experiment 20000439 PARAMETER Experiment Name: At_Roots__P Parameter: Organism Value: A. thaliana
  misc_feature: MA Experiment 20000439 PARAMETER Experiment Name: At_Roots__P Parameter: Tissue Value: Roots vs. Whole Plant
  misc_feature: MA Experiment ID: 20000495 Result: Up-regulated in Transcription
  misc_feature: MA Experiment 20000495 PARAMETER Experiment Name: At_Guard_Cells_P Parameter: Harvest Date Value: 8/2/2002
  misc_feature: MA Experiment 20000495 PARAMETER Experiment Name: At_Guard_Cells_P Parameter: Organism Value: A. thaliana
  misc_feature: MA Experiment 20000495 PARAMETER Experiment Name: At_Guard_Cells_P Parameter: Tissue Value: Guard Cells vs. Leaves
atgcagcaagggaaccaacatcagctagaatgtgtcacaactgaccagaaccctaataattacttacggcagctctcatcaccaccgacttctcaggttgcaggttcgagtcaagctagagtgaattcaatggtggaacgtgctcggatcgcaaaagtcccattgcctgaagcagctctaaattgccctagatgtgactcaaccaatactaagttctgttacttcaataactatagccttactcaacctcgccatttctgcaaaacatgtcgtcgctattggacacgtggcggttccttgaggaatgttcctgttggaggaggctttaggaggaacaagagaagcaaatccagatcgaaatctacggtcgtggtctcgactgataatactactagtacttcatcacttacttctcgcccaagttactcaaaccctagcaagtttcatagctacggtcaaatcccggagtttaattccaacttgcccatcttgcctcctctccaaagccttggagattacaattcaagcaacactggattagattttggtggaactcaaataagcaacatgataagtggtatgagttctagtggtgggatcttggatgcatggagaatacctccatcacaacaagctcagcaattccctttcttgatcaacactaccggattggtgcaatcttcaaacgcgttatatccattactagaaggcggggttagcgccacgcaaacaagaaatgtgaaggcggaagagaatgatcaggatcggggtagggatggggatggagtgaataacttatcaagaaactttttgggtaatatcaacataaactcaggcaggaacgaggaatacacatcatggggaggtaacagttcttggaccggtttcacctccaacaactcaacaggccatctctcattctaagtactcagcactagctattcttgatgattcttttgttggttggggtgtacattggtgcttgtcatgcgagttattgctgaggaagatcaaaccatgcagctatatccaaaggctaattttgaggctcaaaggaaaggtatggttataaaactatctttttgatcttttaaaagatcttcaaagtgtgagtatgtttattggttggcttctggtgatatttatgttttattagaatttggtcttatatattggctatatatagaggtgtgggtgatatgtatgaattcaagagttgatgttggaaacttttttgtgtgttcattgaataatcatcgaattctc

SEQ ID NO: 101197 - protein, 307 aa, Arabidopsis thaliana
  peptide (1)..(307): Ceres Seq. ID no. 13607259
  misc_feature (55)..(117): Pfam Name: Dof domain, zinc finger Pfam Description: Dof domain, zinc finger
  misc_feature (1)..(307): Homolog of NCBI NO: 11282341 NR Description: zinc finger protein OBP3 - Arabidopsis thaliana
  misc_feature (44)..(307): Homolog of NCBI NO: 30694234 NR Description: Dof zinc finger protein [Arabidopsis thaliana]
  misc_feature (5)..(306): Homolog of NCBI NO: 7688355 NR Description: Dof zinc finger protein [Solanum tuberosum]
  misc_feature (35)..(233): Homolog of NCBI NO: 29124139 NR Description: putative DNA-binding protein [Oryza sativa
  misc_feature (32)..(218): Homolog of NCBI NO: 2130125 NR Description: DNA-binding protein Dof3 - maize (fragment)
  misc_feature (35)..(205): Homolog of NCBI NO: 15224320 NR Description: Dof zinc finger protein [Arabidopsis thaliana]
  misc_feature (40)..(180): Homolog of NCBI NO: 15241827 NR Description: Dof zinc finger protein [Arabidopsis thaliana]
  misc_feature (7)..(252): Homolog of NCBI NO: 25352305 NR Description: probable DOF zinc finger protein [imported] - thaliana >gi|3927829|gb|AAC79586.1| putative DOF zinc finger
  misc_feature (29)..(121): Homolog of NCBI NO: 33146614 NR Description: putative dof zinc finger protein [Oryza sativa
  misc_feature (29)..(121): Homolog of NCBI NO: 34900534 NR Description: DNA-binding protein Dof3-like protein [Oryza
MQQGNQHQLECVTTDQNPNNYLRQLSSPPTSQVAGSSQARVNSMVERARIAKVPLPEAALNCPRCDSTNTKFCYFNNYSLTQPRHFCKTCRRYWTRGGSLRNVPVGGGFRRNKRSKSRSKSTVVVSTDNTTSTSSLTSRPSYSNPSKFHSYGQIPEFNSNLPILPPLQSLGDYNSSNTGLDFGGTQISNMISGMSSSGGILDAWRIPPSQQAQQFPFLINTTGLVQSSNALYPLLEGGVSATQTRNVKAEENDQDRGRDGDGVNNLSRNFLGNININSGRNEEYTSWGGNSSWTGFTSNNSTGHLSF

SEQ ID NO: 101198 - protein, 264 aa, Arabidopsis thaliana; identical to SEQ ID NO: 76238
  peptide (1)..(264): Ceres Seq. ID no. 13607260
  misc_feature (12)..(74): Pfam Name: Dof domain, zinc finger Pfam Description: Dof domain, zinc finger
  misc_feature (1)..(264): Homolog of NCBI NO: 11282341 NR Description: zinc finger protein OBP3 - Arabidopsis thaliana
  misc_feature (1)..(264): Homolog of NCBI NO: 30694234 NR Description: Dof zinc finger protein [Arabidopsis thaliana]
  misc_feature (1)..(263): Homolog of NCBI NO: 7688355 NR Description: Dof zinc finger protein [Solanum tuberosum]
  misc_feature (1)..(190): Homolog of NCBI NO: 29124139 NR Description: putative DNA-binding protein [Oryza sativa
  misc_feature (1)..(175): Homolog of NCBI NO: 2130125 NR Description: DNA-binding protein Dof3 - maize (fragment)
  misc_feature (1)..(162): Homolog of NCBI NO: 15224320 NR Description: Dof zinc finger protein [Arabidopsis thaliana]
  misc_feature (1)..(137): Homolog of NCBI NO: 15241827 NR Description: Dof zinc finger protein [Arabidopsis thaliana]
  misc_feature (1)..(209): Homolog of NCBI NO: 25352305 NR Description: probable DOF zinc finger protein [imported] - thaliana >gi|3927829|gb|AAC79586.1| putative DOF zinc finger
  misc_feature (1)..(78): Homolog of NCBI NO: 33146614 NR Description: putative dof zinc finger protein [Oryza sativa
  misc_feature (1)..(78): Homolog of NCBI NO: 34900534 NR Description: DNA-binding protein Dof3-like protein [Oryza

SEQ ID NO: 101199 - DNA, 2686 bp, Arabidopsis thaliana
  misc_feature (1)..(2686): Ceres Seq. ID no. 13607269
  misc_feature: MA Experiment ID: 20000315 Result: Down-regulated in Transcription
  misc_feature: MA Experiment 20000315 PARAMETER Experiment Name: At_14day_Shoots-Roots_Sub_P Parameter: Age (day) Value: 14
  misc_feature: MA Experiment 20000315 PARAMETER Experiment Name: At_14day_Shoots-Roots_Sub_P Parameter: Organism Value: A. thaliana
  misc_feature: MA Experiment 20000315 PARAMETER Experiment Name: At_14day_Shoots-Roots_Sub_P Parameter: Plant Line Value: WS
  misc_feature: MA Experiment 20000315 PARAMETER Experiment Name: At_14day_Shoots-Roots_Sub_P Parameter: Tissue Value: Shoots vs. Whole Plant
gaatcaatcctccaagtttatcttcttcttcaatccaagaagaaagtctacgaaaagtctcctcctttactaatgggttgtttcagcagtaaacaccggaaaactcaaaacgacggcggcggagaaagatcaattccgataattccagttcaaacccatatcgttgatcaagtccccgatcatcgtaaacctcaaatcccatcaccatcgatacccatctcagttcgagatccagagacgattttaggtaaaccattcgaagacatcaggaaattttacagcttggggagagaattaggtcgaggtggtttagggattacgtatatgtgcaaagagattgggactgggaacatttatgcttgcaaatcgattctcaagaggaagctaattagtgagctgggtagagaagatgtgaagacagagattcagatcatgcagcatttgtctggacaaccaaacgttgttgagatcaaaggttcttatgaagacagacattctgtacatttggtaatggaattatgtgccggtggagagttgtttgataggattatagctcaaggtcattactctgagagagctgctgctggtaccattaagtcaattgtggatgttgttcagatttgtcatttgaatggtgtgattcatcgagatctcaagcctgagaatttcttgttctcgagtaaggaggagaatgcaatgcttaaagtaaccgatttcgggttgtccgcgttcatcgaagaaggaaaaatttacaaggatgtggttgggagtccttactacgttgctcctgaagtattaaggcagagttacggaaaagaaatcgacatttggagtgcaggtgttattttatacatcctactctgcggtgtacctcctttttgggccgacaatgaagaaggagtattcgttgaaattctaaaatgcaaaattgattttgtacgtgagccatggccttctatatctgacagcgcgaaagatcttgttgagaagatgctaaccgaagaccctaagagacgaatcactgctgcacaagttcttgaacatccttggatcaaagggggagaagcaccggaaaagcctattgatagcactgtgttatcacgtatgaagcaattccgagcaatgaacaagcttaagaagctagccctaaaggttagcgcggtgagtctatccgaagaagagatcaaaggtcttaaaaccttgtttgcgaatatggataccaatagaagcgggacaatcacttatgaacaactccaaactgggctaagtagacttagatctagactctctgaaactgaagttcagcaactcgttgaagcgtctgatgtggatggtaatggaacaattgactactatgagtttatctctgcgacaatgcatagatacaaattacatcacgatgagcacgtacacaaagcattccaacacttagataaagacaaaaatgggcacataactagggatgagttggaaagtgccatgaaggaatatggaatgggagatgaagctagcatcaaagaagttatatccgaagttgacaccgacaatgatggaaaaataaactttgaggaatttcgtgcgatgatgagatgtggcaccacacaaccaaaagggaaacagtatccattccactgaccaagactacatagatccaacggaaagtaattcttaaacatggaaaactcaaaacgacggtggcaaaagatgaatcaaccaagccatcaacagattttcaacaccgtctacaaacccaatctcagttcgagatatatcaatgggagatatatcgaatggttacaaaactggacaagtatgtgcacaatacagccttcgaattcagtccttctcgcaatgaaagtcaatatcttggagtagatgatgactgagaattggtggacatttttaggctttatctccagtggaaatcatgagagaggttgcgttaggtaaaattgataatatgtcgagacagatagcaatcatgagactttgtgatcacactgcttagaaaggggagataagtgttttagagattagagaaatccagccgttgttcatctttggccttgcagaaataggagttccagtgaacacattcaagcaaaacaatgttcaggaagatggtttatatcttccagtgcttaacaatgcggcttgatgataaagattgccgtttataatcttcttccagagatttacagaaacctagactcaccaagagactcgttggaagataacaattgatgggtcttggcacttacgggtgcgttctgtgcagcaattaatttgagatagatctcaagtcacgctggatactttatggagattgcatataagatgatagatgaatactttatccgaagctttttgtgaatttcgcatctgatttctatgaaatcgatcttctggaatgaggatgatggattcatgaaagttttctaggtaagagatttcaatctctttgcgaattttaaggagattcaggtaaaagagattgatttgaaatgttgttgcattattccatgttctattgactccaaatcgttagtcaattgcctattgagttgtttagggatacattgtagaagaaactaggacacctatgactggctttacatttttggtgctttccattgtgcagcttgcatggtattaaatccctcaagtttgacgagcaccagatgac

SEQ ID NO: 101200 - protein, 544 aa, Arabidopsis thaliana
  peptide (1)..(544): Ceres Seq. ID no. 13607270
  misc_feature (93)..(351): Pfam Name: Protein kinase domain Pfam Description: Protein kinase domain
  misc_feature (25)..(544): Homolog of NCBI NO: 15234441 NR Description: calcium-dependent protein kinase, putative (CDPK)
  misc_feature (25)..(544): Homolog of NCBI NO: 15234435 NR Description: calcium-dependent protein kinase, putative (CDPK)
  misc_feature (25)..(544): Homolog of NCBI NO: 15292915 NR Description: putative calcium dependent protein kinase
  misc_feature (25)..(530): Homolog of NCBI NO: 4115945 NR Description: contains similarity to eukaryotic protein kinase
  misc_feature (62)..(542): Homolog of NCBI NO: 15234656 NR Description: calcium-dependent protein kinase, putative (CDPK)
  misc_feature (57)..(541): Homolog of NCBI NO: 19171502 NR Description: calcium-dependent protein kinase [Lycopersicon
  misc_feature (51)..(541): Homolog of NCBI NO: 7428009 NR Description: calcium-dependent protein kinase (EC 2.7.1.-) 1 -
  misc_feature (26)..(530): Homolog of NCBI NO: 2827773 NR Description: Calcium-dependent protein kinase (CDPK)
  misc_feature (32)..(535): Homolog of NCBI NO: 13561063 NR Description: protein kinase [Medicago sativa]
  misc_feature (55)..(535): Homolog of NCBI NO: 23616997 NR Description: CDP2_ORYSA Calcium-dependent protein kinase
ESILQVYLLLQSKKKVYEKSPPLLMGCFSSKHRKTQNDGGGERSIPIIPVQTHIVDQVPDHRKPQIPSPSIPISVRDPETILGKPFEDIRKFYSLGRELGRGGLGITYMCKEIGTGNIYACKSILKRKLISELGREDVKTEIQIMQHLSGQPNVVEIKGSYEDRHSVHLVMELCAGGELFDRIIAQGHYSERAAAGTIKSIVDVVQICHLNGVIHRDLKPENFLFSSKEENAMLKVTDFGLSAFIEEGKIYKDVVGSPYYVAPEVLRQSYGKEIDIWSAGVILYILLCGVPPFWADNEEGVFVEILKCKIDFVREPWPSISDSAKDLVEKMLTEDPKRRITAAQVLEHPWIKGGEAPEKPIDSTVLSRMKQFRAMNKLKKLALKVSAVSLSEEEIKGLKTLFANMDTNRSGTITYEQLQTGLSRLRSRLSETEVQQLVEASDVDGNGTIDYYEFISATMHRYKLHHDEHVHKAFQHLDKDKNGHITRDELESAMKEYGMGDEASIKEVISEVDTDNDGKINFEEFRAMMRCGTTQPKGKQYPFH

SEQ ID NO: 101201 - protein, 520 aa, Arabidopsis thaliana
  peptide (1)..(520): Ceres Seq. ID no. 13607271
  misc_feature (69)..(327): Pfam Name: Protein kinase domain Pfam Description: Protein kinase domain
  misc_feature (1)..(520): Homolog of NCBI NO: 15234441 NR Description: calcium-dependent protein kinase, putative (CDPK)
  misc_feature (1)..(520): Homolog of NCBI NO: 15234435 NR Description: calcium-dependent protein kinase, putative (CDPK)
  misc_feature (1)..(520): Homolog of NCBI NO: 15292915 NR Description: putative calcium dependent protein kinase
  misc_feature (1)..(506): Homolog of NCBI NO: 4115945 NR Description: contains similarity to eukaryotic protein kinase
  misc_feature (38)..(518): Homolog of NCBI NO: 15234656 NR Description: calcium-dependent protein kinase, putative (CDPK)
  misc_feature (33)..(517): Homolog of NCBI NO: 19171502 NR Description: calcium-dependent protein kinase [Lycopersicon
  misc_feature (27)..(517): Homolog of NCBI NO: 7428009 NR Description: calcium-dependent protein kinase (EC 2.7.1.-) 1 -
  misc_feature (2)..(506): Homolog of NCBI NO: 2827773 NR Description: Calcium-dependent protein kinase (CDPK)
  misc_feature (8)..(511): Homolog of NCBI NO: 13561063 NR Description: protein kinase [Medicago sativa]
  misc_feature (31)..(511): Homolog of NCBI NO: 23616997 NR Description: CDP2_ORYSA Calcium-dependent protein kinase
MGCFSSKHRKTQNDGGGERSIPIIPVQTHIVDQVPDHRKPQIPSPSIPISVRDPETILGKPFEDIRKFYSLGRELGRGGLGITYMCKEIGTGNIYACKSILKRKLISELGREDVKTEIQIMQHLSGQPNVVEIKGSYEDRHSVHLVMELCAGGELFDRIIAQGHYSERAAAGTIKSIVDVVQICHLNGVIHRDLKPENFLFSSKEENAMLKVTDFGLSAFIEEGKIYKDVVGSPYYVAPEVLRQSYGKEIDIWSAGVILYILLCGVPPFWADNEEGVFVEILKCKIDFVREPWPSISDSAKDLVEKMLTEDPKRRITAAQVLEHPWIKGGEAPEKPIDSTVLSRMKQFRAMNKLKKLALKVSAVSLSEEEIKGLKTLFANMDTNRSGTITYEQLQTGLSRLRSRLSETEVQQLVEASDVDGNGTIDYYEFISATMHRYKLHHDEHVHKAFQHLDKDKNGHITRDELESAMKEYGMGDEASIKEVISEVDTDNDGKINFEEFRAMMRCGTTQPKGKQYPFH

SEQ ID NO: 101202 - protein, 436 aa, Arabidopsis thaliana
  peptide (1)..(436): Ceres Seq. ID no. 13607272
  misc_feature (1)..(243): Pfam Name: Protein kinase domain Pfam Description: Protein kinase domain
  misc_feature (1)..(436): Homolog of NCBI NO: 15234441 NR Description: calcium-dependent protein kinase, putative (CDPK)
  misc_feature (1)..(436): Homolog of NCBI NO: 15234435 NR Description: calcium-dependent protein kinase, putative (CDPK)
  misc_feature (1)..(436): Homolog of NCBI NO: 15292915 NR Description: putative calcium dependent protein kinase
  misc_feature (1)..(422): Homolog of NCBI NO: 4115945 NR Description: contains similarity to eukaryotic protein kinase
  misc_feature (1)..(434): Homolog of NCBI NO: 15234656 NR Description: calcium-dependent protein kinase, putative (CDPK)
  misc_feature (1)..(433): Homolog of NCBI NO: 19171502 NR Description: calcium-dependent protein kinase [Lycopersicon
  misc_feature (1)..(433): Homolog of NCBI NO: 7428009 NR Description: calcium-dependent protein kinase (EC 2.7.1.-) 1 -
  misc_feature (1)..(422): Homolog of NCBI NO: 2827773 NR Description: Calcium-dependent protein kinase (CDPK)
  misc_feature (1)..(427): Homolog of NCBI NO: 13561063 NR Description: protein kinase [Medicago sativa]
  misc_feature (1)..(427): Homolog of NCBI NO: 23616997 NR Description: CDP2_ORYSA Calcium-dependent protein kinase
MCKEIGTGNIYACKSILKRKLISELGREDVKTEIQIMQHLSGQPNVVEIKGSYEDRHSVHLVMELCAGGELFDRIIAQGHYSERAAAGTIKSIVDVVQICHLNGVIHRDLKPENFLFSSKEENAMLKVTDFGLSAFIEEGKIYKDVVGSPYYVAPEVLRQSYGKEIDIWSAGVILYILLCGVPPFWADNEEGVFVEILKCKIDFVREPWPSISDSAKDLVEKMLTEDPKRRITAAQVLEHPWIKGGEAPEKPIDSTVLSRMKQFRAMNKLKKLALKVSAVSLSEEEIKGLKTLFANMDTNRSGTITYEQLQTGLSRLRSRLSETEVQQLVEASDVDGNGTIDYYEFISATMHRYKLHHDEHVHKAFQHLDKDKNGHITRDELESAMKEYGMGDEASIKEVISEVDTDNDGKINFEEFRAMMRCGTTQPKGKQYPFH

SEQ ID NO: 101203 - DNA, 2304 bp, Arabidopsis thaliana
  misc_feature (1)..(2304): Ceres Seq. ID no. 13607273
  misc_feature: MA Experiment ID: 20000227 Result: Down-regulated in Transcription
  misc_feature: MA Experiment 20000227 PARAMETER Experiment Name: At_Root-Tips-vs-Tops_P Parameter: Tissue Value: Root Tips vs. Root Tops
  misc_feature: MA Experiment ID: 20000264 Result: Down-regulated in Transcription
  misc_feature: MA Experiment 20000264 PARAMETER Experiment Name: At_Open_Flower_P Parameter: Age (day) Value: 21
  misc_feature: MA Experiment 20000264 PARAMETER Experiment Name: At_Open_Flower_P Parameter: Plant Line Value: WS
  misc_feature: MA Experiment 20000264 PARAMETER Experiment Name: At_Open_Flower_P Parameter: Tissue Value: Open Flower vs. Whole Plant
  misc_feature: MA Experiment ID: 20001247 Result: Up-regulated in Transcription
  misc_feature: MA Experiment 20001247 PARAMETER Experiment Name: At_Far-red-induction_P Parameter: Age (day) Value: 7
  misc_feature: MA Experiment 20001247 PARAMETER Experiment Name: At_Far-red-induction_P Parameter: Light Value: Far-red vs. White
  misc_feature: MA Experiment 20001247 PARAMETER Experiment Name: At_Far-red-induction_P Parameter: Organism Value: A. thaliana
  misc_feature: MA Experiment 20001247 PARAMETER Experiment Name: At_Far-red-induction_P Parameter: Plant Line Value: Columbia
  misc_feature: MA Experiment 20001247 PARAMETER Experiment Name: At_Far-red-induction_P Parameter: Timepoint (hr) Value: 1
  misc_feature: MA Experiment 20001247 PARAMETER Experiment Name: At_Far-red-induction_P Parameter: Tissue Value: Whole Plant
acgcgtactgtcttcttcgtcttgttcttcttcatctaccatgaaagctcttctctttcttcttacccttttcctcatcctcccaaacccaatctcagccattgatttcatcttcaacggcttcaatgactcatcatctaatgtctccctcttcgggatcgcaacaatcgaatcaaaaatcctaactttaacaaaccaaacatcgtttgcaactggtcgtgctctatacaacagaaccatccgtacaaaagatccaatcacatcctctgttttacctttctctacttctttcatcttcaccatggctccttacaagaacacacttcctggtcacggaatcgtcttcctctttgcaccatccactggaatcaacggttctagctctgctcaacacttaggtctcttcaatttgactaacaatggtaaccctagtaatcacatctttggagttgagtttgatgtctttgctaatcaagaatttagtgacatcgatgctaatcatgtcggaattgatgttaattcacttcattcagtatattctaacacttctggttattggtctgatgatggagtggtgtttaagccattgaagcttaacgatggaagaaactatcaagtttggattgattatagagattttgtagttaatgttactatgcaagtcgctggtaagattcgacctaagattcctttgcttagtacgtctttgaatctctctgatgttgtggaagatgagatgtttgttggattcactgctgctacagggagattggttcagagtcataagatcttagcttggagttttagtaattcgaatttctcgttgagtaatagtttgatcactactggtttaccttcgtttgttttacctaaggactcgattgttaaagcgaaatggtttgtttttgtgttggtgttgatctgtttcttggttgttgctttggttggtttggtgttgtttgctgtggtgagaaagagattagagagggcaaggaagagagcgttgatggaggattgggagatggagtattggcctcatcggattccgtatgaggagattgaatccggcactaaggggtttgatgagaagaatgtgattgggattggcgggaatgggaaagtttataaaggtttgttacaaggaggggttgtggaagttgcggttaagcggatttcgcaggagagtagcgacgggatgagagagtttgtggctgagatatcgagtcttgggcggttaaagcaccggaatttagtttctttaagaggatggtgcaagaaggaggttggtagtttcatgttggtttatgattacatggagaatggaagtttagatcgatggatattcgaaaacgatgagaagattactacccttagttgcgaagagagaattcgtattttgaaaggtgtagcttcaggaatattgtatttgcatgaaggatgggagtctaaggttttacatagagatattaaagctagtaatgttttacttgaccgagatatgataccgaggcttagtgattttgggttagctcgggttcatggacacgagcaaccggttaggaccacgagggtggttggtacagctggctatttggctcctgaagtggttaagacggggcgtgcatcgacacagaccgatgtttttgcttacgggatattggttcttgaagtaatgtgtgggagaagacctattgaagaagggaagaaaccgttgatggattgggtttggggattaatggaaagaggtgagattctaaatgggcttgatccacagatgatgatgacacaaggcgtaacagaagtcattgatgaagctgaaagagttttgcagcttggattgctttgtgcacatcctgatccggccaaaagaccgtcgatgagacaagtggttcaagtgtttgaaggtgataaggctgagatctttgaagcagaaagtagtgaagatgtcgagtcatggatgttgatgaagatgggatctcgtggaagctcgcgagagttttggtatggaagctcatcacatccgacgatagagcagattagacttcagtctttgtctgtgtctctttcgtcttggaacagctcaattttagaagggaggtgatgatgatgaagaaatggcttgaggaacctaaagaatgtagttatttttgtggctttactttgttacttgttttgtacatatacgtatttgtaaacgcatttcattatacatgtatttttttattttaatttttttgttgtgaattgaaactagttttcaatttattatattttgatgtgtatataaacaagttttgcatccgg

SEQ ID NO: 101204 - protein, 699 aa, Arabidopsis thaliana
  peptide (1)..(699): Ceres Seq. ID no. 13607274
  misc_feature (336)..(699): Homolog of NCBI NO: 15235275 NR Description: receptor protein kinase like protein [Arabidopsis
  misc_feature (12)..(280): Homolog of NCBI NO: 15235275 NR Description: receptor protein kinase like protein [Arabidopsis
  misc_feature (18)..(636): Homolog of NCBI NO: 11346411 NR Description: receptor-type protein kinase LRK1 [imported] - thaliana >gi|1418331|emb|CAA65153.1| receptor like protein kinase
  misc_feature (14)..(671): Homolog of NCBI NO: 15224347 NR Description: receptor lectin kinase, putative [Arabidopsis
  misc_feature (14)..(660): Homolog of NCBI NO: 28416699 NR Description: At3g53810 [Arabidopsis thaliana]
  misc_feature (18)..(671): Homolog of NCBI NO: 18411937 NR Description: receptor lectin kinase, putative [Arabidopsis
  misc_feature (14)..(660): Homolog of NCBI NO: 15232332 NR Description: receptor lectin kinase, putative [Arabidopsis
  misc_feature (19)..(671): Homolog of NCBI NO: 18411935 NR Description: contains similarity to a protein kinase domain pkinase.hmm, score: 166.20) and to legume lectins beta domain lectin_legB.hmm, score: 139.32) [Arabidopsis thaliana] kinase
  misc_feature (2)..(636): Homolog of NCBI NO: 34899518 NR Description: putative receptor-like protein kinase [Oryza
  misc_feature (3)..(637): Homolog of NCBI NO: 37536406 NR Description: putative receptor-like protein kinase [Oryza
RVLSSSSCSSSSTMKALLFLLTLFLILPNPISAIDFIFNGFNDSSSNVSLFGIATIESKILTLTNQTSFATGRALYNRTIRTKDPITSSVLPFSTSFIFTMAPYKNTLPGHGIVFLFAPSTGINGSSSAQHLGLFNLTNNGNPSNHIFGVEFDVFANQEFSDIDANHVGIDVNSLHSVYSNTSGYWSDDGVVFKPLKLNDGRNYQVWIDYRDFVVNVTMQVAGKIRPKIPLLSTSLNLSDVVEDEMFVGFTAATGRLVQSHKILAWSFSNSNFSLSNSLITTGLPSFVLPKDSIVKAKWFVFVLVLICFLVVALVGLVLFAVVRKRLERARKRALMEDWEMEYWPHRIPYEEIESGTKGFDEKNVIGIGGNGKVYKGLLQGGVVEVAVKRISQESSDGMREFVAEISSLGRLKHRNLVSLRGWCKKEVGSFMLVYDYMENGSLDRWIFENDEKITTLSCEERIRILKGVASGILYLHEGWESKVLHRDIKASNVLLDRDMIPRLSDFGLARVHGHEQPVRTTRVVGTAGYLAPEVVKTGRASTQTDVFAYGILVLEVMCGRRPIEEGKKPLMDWVWGLMERGEILNGLDPQMMMTQGVTEVIDEAERVLQLGLLCAHPDPAKRPSMRQVVQVFEGDKAEIFEAESSEDVESWMLMKMGSRGSSREFWYGSSSHPTIEQIRLQSLSVSLSSWNSSILEGR

SEQ ID NO: 101205 - protein, 686 aa, Arabidopsis thaliana
  peptide (1)..(686): Ceres Seq. ID no. 13607275
  misc_feature (323)..(686): Homolog of NCBI NO: 15235275 NR Description: receptor protein kinase like protein [Arabidopsis
  misc_feature (1)..(267): Homolog of NCBI NO: 15235275 NR Description: receptor protein kinase like protein [Arabidopsis
  misc_feature (5)..(623): Homolog of NCBI NO: 11346411 NR Description: receptor-type protein kinase LRK1 [imported] - thaliana >gi|1418331|emb|CAA65153.1| receptor like protein kinase
  misc_feature (1)..(658): Homolog of NCBI NO: 15224347 NR Description: receptor lectin kinase, putative [Arabidopsis
  misc_feature (1)..(647): Homolog of NCBI NO: 28416699 NR Description: At3g53810 [Arabidopsis thaliana]
  misc_feature (5)..(658): Homolog of NCBI NO: 18411937 NR Description: receptor lectin kinase, putative [Arabidopsis
  misc_feature (1)..(647): Homolog of NCBI NO: 15232332 NR Description: receptor lectin kinase, putative [Arabidopsis
  misc_feature (6)..(658): Homolog of NCBI NO: 18411935 NR Description: contains similarity to a protein kinase domain pkinase.hmm, score: 166.20) and to legume lectins beta domain lectin_legB.hmm, score: 139.32) [Arabidopsis thaliana] kinase
  misc_feature (1)..(623): Homolog of NCBI NO: 34899518 NR Description: putative receptor-like protein kinase [Oryza
  misc_feature (1)..(624): Homolog of NCBI NO: 37536406 NR Description: putative receptor-like protein kinase [Oryza
MKALLFLLTLFLILPNPISAIDFIFNGFNDSSSNVSLFGIATIESKILTLTNQTSFATGRALYNRTIRTKDPITSSVLPFSTSFIFTMAPYKNTLPGHGIVFLFAPSTGINGSSSAQHLGLFNLTNNGNPSNHIFGVEFDVFANQEFSDIDANHVGIDVNSLHSVYSNTSGYWSDDGVVFKPLKLNDGRNYQVWIDYRDFVVNVTMQVAGKIRPKIPLLSTSLNLSDVVEDEMFVGFTAATGRLVQSHKILAWSFSNSNFSLSNSLITTGLPSFVLPKDSIVKAKWFVFVLVLICFLVVALVGLVLFAVVRKRLERARKRALMEDWEMEYWPHRIPYEEIESGTKGFDEKNVIGIGGNGKVYKGLLQGGVVEVAVKRISQESSDGMREFVAEISSLGRLKHRNLVSLRGWCKKEVGSFMLVYDYMENGSLDRWIFENDEKITTLSCEERIRILKGVASGILYLHEGWESKVLHRDIKASNVLLDRDMIPRLSDFGLARVHGHEQPVRTTRVVGTAGYLAPEVVKTGRASTQTDVFAYGILVLEVMCGRRPIEEGKKPLMDWVWGLMERGEILNGLDPQMMMTQGVTEVIDEAERVLQLGLLCAHPDPAKRPSMRQVVQVFEGDKAEIFEAESSEDVESWMLMKMGSRGSSREFWYGSSSHPTIEQIRLQSLSVSLSSWNSSILEGR

SEQ ID NO: 101206 - protein, 599 aa, Arabidopsis thaliana
  peptide (1)..(599): Ceres Seq. ID no. 13607276
  misc_feature (236)..(599): Homolog of NCBI NO: 15235275 NR Description: receptor protein kinase like protein [Arabidopsis
  misc_feature (1)..(180): Homolog of NCBI NO: 15235275 NR Description: receptor protein kinase like protein [Arabidopsis
  misc_feature (1)..(536): Homolog of NCBI NO: 11346411 NR Description: receptor-type protein kinase LRK1 [imported] - thaliana >gi|1418331|emb|CAA65153.1| receptor like protein kinase
  misc_feature (1)..(571): Homolog of NCBI NO: 15224347 NR Description: receptor lectin kinase, putative [Arabidopsis
  misc_feature (1)..(560): Homolog of NCBI NO: 28416699 NR Description: At3g53810 [Arabidopsis thaliana]
  misc_feature (1)..(571): Homolog of NCBI NO: 18411937 NR Description: receptor lectin kinase, putative [Arabidopsis
  misc_feature (1)..(560): Homolog of NCBI NO: 15232332 NR Description: receptor lectin kinase, putative [Arabidopsis
  misc_feature (1)..(571): Homolog of NCBI NO: 18411935 NR Description: contains similarity to a protein kinase domain pkinase.hmm, score: 166.20) and to legume lectins beta domain lectin_legB.hmm, score: 139.32) [Arabidopsis thaliana] kinase
  misc_feature (1)..(536): Homolog of NCBI NO: 34899518 NR Description: putative receptor-like protein kinase [Oryza
  misc_feature (1)..(537): Homolog of NCBI NO: 37536406 NR Description: putative receptor-like protein kinase [Oryza
MAPYKNTLPGHGIVFLFAPSTGINGSSSAQHLGLFNLTNNGNPSNHIFGVEFDVFANQEFSDIDANHVGIDVNSLHSVYSNTSGYWSDDGVVFKPLKLNDGRNYQVWIDYRDFVVNVTMQVAGKIRPKIPLLSTSLNLSDVVEDEMFVGFTAATGRLVQSHKILAWSFSNSNFSLSNSLITTGLPSFVLPKDSIVKAKWFVFVLVLICFLVVALVGLVLFAVVRKRLERARKRALMEDWEMEYWPHRIPYEEIESGTKGFDEKNVIGIGGNGKVYKGLLQGGVVEVAVKRISQESSDGMREFVAEISSLGRLKHRNLVSLRGWCKKEVGSFMLVYDYMENGSLDRWIFENDEKITTLSCEERIRILKGVASGILYLHEGWESKVLHRDIKASNVLLDRDMIPRLSDFGLARVHGHEQPVRTTRVVGTAGYLAPEVVKTGRASTQTDVFAYGILVLEVMCGRRPIEEGKKPLMDWVWGLMERGEILNGLDPQMMMTQGVTEVIDEAERVLQLGLLCAHPDPAKRPSMRQVVQVFEGDKAEIFEAESSEDVESWMLMKMGSRGSSREFWYGSSSHPTIEQIRLQSLSVSLSSWNSSILEGR

SEQ ID NO: 101207 - DNA, 1726 bp, Arabidopsis thaliana
  misc_feature (1)..(1726): Ceres Seq. ID no. 13607277
  misc_feature: MA Experiment ID: 20000166 Result: Down-regulated in Transcription
  misc_feature: MA Experiment 20000166 PARAMETER Experiment Name: At_100uM_ABA_P Parameter: Age (day) Value: 14
  misc_feature: MA Experiment 20000166 PARAMETER Experiment Name: At_100uM_ABA_P Parameter: Organism Value: A. thaliana
  misc_feature: MA Experiment 20000166 PARAMETER Experiment Name: At_100uM_ABA_P Parameter: Plant Line Value: WS
  misc_feature: MA Experiment 20000166 PARAMETER Experiment Name: At_100uM_ABA_P Parameter: Timepoint (hr) Value: 1
  misc_feature: MA Experiment 20000166 PARAMETER Experiment Name: At_100uM_ABA_P Parameter: Tissue Value: Aerial
  misc_feature: MA Experiment 20000166 PARAMETER Experiment Name: At_100uM_ABA_P Parameter: Treatment Value: 100uM ABA vs. No Treatment
  misc_feature: MA Experiment ID: 20000234 Result: Down-regulated in Transcription
  misc_feature: MA Experiment 20000234 PARAMETER Experiment Name: At_Siliques_P Parameter: Age (day) Value: 21
  misc_feature: MA Experiment 20000234 PARAMETER Experiment Name: At_Siliques_P Parameter: Organism Value: A. thaliana
  misc_feature: MA Experiment 20000234 PARAMETER Experiment Name: At_Siliques_P Parameter: Plant Line Value: WS
  misc_feature: MA Experiment 20000234 PARAMETER Experiment Name: At_Siliques_P Parameter: Tissue Value: Less Than 5mm Siliques vs. Whole Plant
  misc_feature: MA Experiment ID: 20000235 Result: Down-regulated in Transcription
  misc_feature: MA Experiment 20000235 PARAMETER Experiment Name: At_Siliques_P Parameter: Age (day) Value: 21
  misc_feature: MA Experiment 20000235 PARAMETER Experiment Name: At_Siliques_P Parameter: Organism Value: A. thaliana
  misc_feature: MA Experiment 20000235 PARAMETER Experiment Name: At_Siliques_P Parameter: Plant Line Value: WS
  misc_feature: MA Experiment 20000235 PARAMETER Experiment Name: At_Siliques_P Parameter: Tissue Value: 5-10mm Siliques vs. Whole Plant
  misc_feature: MA Experiment ID: 20000265 Result: Down-regulated in Transcription
  misc_feature: MA Experiment 20000265 PARAMETER Experiment Name: At_Open_Flower_P Parameter: Age (day) Value: 21
  misc_feature: MA Experiment 20000265 PARAMETER Experiment Name: At_Open_Flower_P Parameter: Plant Line Value: WS
  misc_feature: MA Experiment 20000265 PARAMETER Experiment Name: At_Open_Flower_P Parameter: Tissue Value: Closed Flower vs. Whole Plant
  misc_feature: MA Experiment ID: 20000496 Result: Down-regulated in Transcription
  misc_feature: MA Experiment 20000496 PARAMETER Experiment Name: At_Guard_Cells_P Parameter: Harvest Date Value: 7/19/2002
  misc_feature: MA Experiment 20000496 PARAMETER Experiment Name: At_Guard_Cells_P Parameter: Organism Value: Canola
  misc_feature: MA Experiment 20000496 PARAMETER Experiment Name: At_Guard_Cells_P Parameter: Tissue Value: Guard Cells vs. Leaves
  misc_feature: MA Experiment ID: 20000794 Result: Up-regulated in Transcription
  misc_feature: MA Experiment 20000794 PARAMETER Experiment Name: At_Petals_P Parameter: Age (day) Value: 23-25 days
  misc_feature: MA Experiment 20000794 PARAMETER Experiment Name: At_Petals_P Parameter: Plant Line Value: WS
  misc_feature: MA Experiment 20000794 PARAMETER Experiment Name: At_Petals_P Parameter: Tissue Value: Petals vs. Whole plant
  misc_feature: MA Experiment ID: 20001248 Result: Down-regulated in Transcription
  misc_feature: MA Experiment 20001248 PARAMETER Experiment Name: At_Far-red-induction_P Parameter: Age (day) Value: 7
  misc_feature: MA Experiment 20001248 PARAMETER Experiment Name: At_Far-red-induction_P Parameter: Light Value: Far-red vs. White
  misc_feature: MA Experiment 20001248 PARAMETER Experiment Name: At_Far-red-induction_P Parameter: Organism Value: A. thaliana
  misc_feature: MA Experiment 20001248 PARAMETER Experiment Name: At_Far-red-induction_P Parameter: Plant Line Value: Columbia
  misc_feature: MA Experiment 20001248 PARAMETER Experiment Name: At_Far-red-induction_P Parameter: Timepoint (hr) Value: 4
  misc_feature: MA Experiment 20001248 PARAMETER Experiment Name: At_Far-red-induction_P Parameter: Tissue Value: Whole Plant
  misc_feature: MA Experiment ID: 20001450 Result: Down-regulated in Transcription
  misc_feature: MA Experiment 20001450 PARAMETER Experiment Name: At_Far-red-induction_P Parameter: Age (day) Value: 7
  misc_feature: MA Experiment 20001450 PARAMETER Experiment Name: At_Far-red-induction_P Parameter: Light Value: Far-red vs. White
  misc_feature: MA Experiment 20001450 PARAMETER Experiment Name: At_Far-red-induction_P Parameter: Organism Value: A. thaliana
  misc_feature: MA Experiment 20001450 PARAMETER Experiment Name: At_Far-red-induction_P Parameter: Plant Line Value: Columbia
  misc_feature: MA Experiment 20001450 PARAMETER Experiment Name: At_Far-red-induction_P Parameter: Timepoint (hr) Value: 8
  misc_feature: MA Experiment 20001450 PARAMETER Experiment Name: At_Far-red-induction_P Parameter: Tissue Value: Whole Plant
  misc_feature: MA Experiment ID: 20001451 Result: Down-regulated in Transcription
  misc_feature: MA Experiment 20001451 PARAMETER Experiment Name: At_Far-red-induction_P Parameter: Age (day) Value: 7
  misc_feature: MA Experiment 20001451 PARAMETER Experiment Name: At_Far-red-induction_P Parameter: Light Value: Far-red vs. White
  misc_feature: MA Experiment 20001451 PARAMETER Experiment Name: At_Far-red-induction_P Parameter: Organism Value: A. thaliana
  misc_feature: MA Experiment 20001451 PARAMETER Experiment Name: At_Far-red-induction_P Parameter: Plant Line Value: Columbia
  misc_feature: MA Experiment 20001451 PARAMETER Experiment Name: At_Far-red-induction_P Parameter: Timepoint (hr) Value: 24
  misc_feature: MA Experiment 20001451 PARAMETER Experiment Name: At_Far-red-induction_P Parameter: Tissue Value: Whole Plant
  misc_feature: MA Experiment ID: 20001560 Result: Down-regulated in Transcription
  misc_feature: MA Experiment 20001560 PARAMETER Experiment Name: At_Drought_Soil_Dry_P Parameter: Age (day) Value: 28
  misc_feature: MA Experiment 20001560 PARAMETER Experiment Name: At_Drought_Soil_Dry_P Parameter: Organism Value: A. thaliana
  misc_feature: MA Experiment 20001560 PARAMETER Experiment Name: At_Drought_Soil_Dry_P Parameter: Plant Line Value: WS
  misc_feature: MA Experiment 20001560 PARAMETER Experiment Name: At_Drought_Soil_Dry_P Parameter: Post Timepoint (hr) Value: None
  misc_feature: MA Experiment 20001560 PARAMETER Experiment Name: At_Drought_Soil_Dry_P Parameter: Post-Treatment Value: None
  misc_feature: MA Experiment 20001560 PARAMETER Experiment Name: At_Drought_Soil_Dry_P Parameter: Timepoint (day) Value: 14
  misc_feature: MA Experiment 20001560 PARAMETER Experiment Name: At_Drought_Soil_Dry_P Parameter: Treatment Value: Drought vs. No Drought
  misc_feature: MA Experiment ID: 20001905 Result: Down-regulated in Transcription
  misc_feature: MA Experiment 20001905 PARAMETER Experiment Name: At_Drought_Reproduction_P Parameter: Age (day) Value: 40
  misc_feature: MA Experiment 20001905 PARAMETER Experiment Name: At_Drought_Reproduction_P Parameter: Organism Value: A. thaliana
  misc_feature: MA Experiment 20001905 PARAMETER Experiment Name: At_Drought_Reproduction_P Parameter: Plant Line Value: WS
  misc_feature: MA Experiment 20001905 PARAMETER Experiment Name: At_Drought_Reproduction_P Parameter: Timepoint (day) Value: 10
  misc_feature: MA Experiment 20001905 PARAMETER Experiment Name: At_Drought_Reproduction_P Parameter: Tissue Value: Rosettes
  misc_feature: MA Experiment 20001905 PARAMETER Experiment Name: At_Drought_Reproduction_P Parameter: Treatment Value: Drought vs. No Drought
atcgatctcataatttcttcttccaaagtcaaaacatttatcaaaaatgtctccgatttcaaatctctttcccgacaacacaatcaatctcactccttacgcaattgtcattctcaccactgtcttctcgattctatggtatatctttaagcgctcgccgcaaccgtccctaccgcctggaccacgagggctgcctatagtcgggaacctcccgtttcttgatccggaccttcacacctacttcgcaaacctcgctcaaagtcacggtccaatctttaaactcaatcttggctcaaagctaaccatcgtagtcaactctccatcgctggctcgagagatcttgaaagatcaagacatcaatttctcaaaccgagacgtccctctcactggccgagccgctacctatggaggtatagacatcgtttggacaccatacggtgccgaatggagacagcttagaaaaatatgcgtcctaaaactccttagccgcaaaactttggattctttctacgagctccgacgcaaagaagtccgggaaagaactagatatttgtacgagcaaggtcgaaaacaatccccggttaaagtcggagatcaattgtttttgacgatgatgaatctaacgatgaatatgttatggggagggtcggtgaaagcagaggagatggagagtgttggaacagagtttaaaggagtgatttctgaaattactaggcttttgagtgagcctaatgtttctgacttttttccttggctagcgaggttcgatcttcaaggacttgtgaagaggatgggtgtgtgtgcccgcgagcttgatgcggtacttgatcgagccatcgagcagatgaaaccgttaagaggaagagatgatgatgaagttaaagacttcttgcaatatttgatgaaattaaaggatcaagaaggtgactcggaggttcccatcaccattaatcatgtcaaagccttactcacggatatggtggttggtggcactgacacatcgacaaacacgatagagtttgcgatggcagagctaatgagcaacccggagctgatcaaaagagcacaagaagagctagatgaagttgtaggcaaagacaacattgttgaagaatcacacatcactagacttccttacattttagccattatgaaagaaacacttaggcttcacccaacccttcctttgttagtccctcaccgtccggctgaaaacaccgtggtgggcggctacaccatccctaaagatactaagatcttcgtaaatgtttggtctattcagagagaccccaatgtgtgggagaatccaactgagtttcgtcctgagaggtttcttgataataactcttgtgatttcactggagccaattatagctattttccatttggatctggccggagaatttgtgccggtgtagcactcgccgagaggatggttttatacactctcgcgacactattgcattcgttcgattggaagataccggaaggccacgtgttggatttgaaagagaagtttgggattgtcttgaagctcaagatccctcttgttgccttgcccattccgaggttttcggattcgaatctttacctataggggcaaagatcgttacattaggcaattcttataccatagaaataaaagtagtacctgttttattttggggtaaaaatgtaatgtatttctggttttgcaaggaaaatcaaacatcaatctgacttgcat

SEQ ID NO: 101208 - protein, 516 aa, Arabidopsis thaliana
  peptide (1)..(516): Ceres Seq. ID no. 13607278
  misc_feature (1)..(516): Homolog of NCBI NO: 15234514 NR Description: cytochrome p450 family [Arabidopsis thaliana]
  misc_feature (1)..(515): Homolog of NCBI NO: 15234517 NR Description: cytochrome P450, putative [Arabidopsis thaliana]
  misc_feature (15)..(516): Homolog of NCBI NO: 11345411 NR Description: putative cytochrome P450 [Matthiola incana]
  misc_feature (80)..(516): Homolog of NCBI NO: 15234519 NR Description: cytochrome P450, putative [Arabidopsis thaliana]
  misc_feature (1)..(516): Homolog of NCBI NO: 15241541 NR Description: cytochrome P450 family [Arabidopsis thaliana]
  misc_feature (19)..(516): Homolog of NCBI NO: 15234521 NR Description: cytochrome P450 family [Arabidopsis thaliana]
  misc_feature (1)..(515): Homolog of NCBI NO: 30685891 NR Description: cytochrome P450 family [Arabidopsis thaliana]
  misc_feature (5)..(515): Homolog of NCBI NO: 7430667 NR Description: cytochrome P450 homolog T12H17.80 - Arabidopsis >gi|2827546|emb|CAA16554.1| cytochrome P450 like protein thaliana] >gi|7269115|emb|CAB79224.1| cytochrome P450 like
  misc_feature (5)..(515): Homolog of NCBI NO: 15235775 NR Description: cytochrome P450 family [Arabidopsis thaliana]
  misc_feature (5)..(515): Homolog of NCBI NO: 15810341 NR Description: putative cytochrome P450 protein [Arabidopsis
MSPISNLFPDNTINLTPYAIVILTTVFSILWYIFKRSPQPSLPPGPRGLPIVGNLPFLDPDLHTYFANLAQSHGPIFKLNLGSKLTIVVNSPSLAREILKDQDINFSNRDVPLTGRAATYGGIDIVWTPYGAEWRQLRKICVLKLLSRKTLDSFYELRRKEVRERTRYLYEQGRKQSPVKVGDQLFLTMMNLTMNMLWGGSVKAEEMESVGTEFKGVISEITRLLSEPNVSDFFPWLARFDLQGLVKRMGVCARELDAVLDRAIEQMKPLRGRDDDEVKDFLQYLMKLKDQEGDSEVPITINHVKALLTDMVVGGTDTSTNTIEFAMAELMSNPELIKRAQEELDEVVGKDNIVEESHITRLPYILAIMKETLRLHPTLPLLVPHRPAENTVVGGYTIPKDTKIFVNVWSIQRDPNVWENPTEFRPERFLDNNSCDFTGANYSYFPFGSGRRICAGVALAERMVLYTLATLLHSFDWKIPEGHVLDLKEKFGIVLKLKIPLVALPIPRFSDSNLYL

SEQ ID NO: 101209 - protein, 328 aa, Arabidopsis thaliana
  peptide (1)..(328): Ceres Seq. ID no. 13607279
  misc_feature (1)..(328): Homolog of NCBI NO: 15234514 NR Description: cytochrome p450 family [Arabidopsis thaliana]
  misc_feature (1)..(327): Homolog of NCBI NO: 15234517 NR Description: cytochrome P450, putative [Arabidopsis thaliana]
  misc_feature (1)..(328): Homolog of NCBI NO: 11345411 NR Description: putative cytochrome P450 [Matthiola incana]
  misc_feature (1)..(328): Homolog of NCBI NO: 15234519 NR Description: cytochrome P450, putative [Arabidopsis thaliana]
  misc_feature (1)..(328): Homolog of NCBI NO: 15241541 NR Description: cytochrome P450 family [Arabidopsis thaliana]
  misc_feature (1)..(328): Homolog of NCBI NO: 15234521 NR Description: cytochrome P450 family [Arabidopsis thaliana]
  misc_feature (1)..(327): Homolog of NCBI NO: 30685891 NR Description: cytochrome P450 family [Arabidopsis thaliana]
  misc_feature (1)..(327): Homolog of NCBI NO: 7430667 NR Description: cytochrome P450 homolog T12H17.80 - Arabidopsis >gi|2827546|emb|CAA16554.1| cytochrome P450 like protein thaliana] >gi|7269115|emb|CAB79224.1| cytochrome P450 like
  misc_feature (1)..(327): Homolog of NCBI NO: 15235775 NR Description: cytochrome P450 family [Arabidopsis thaliana]
  misc_feature (1)..(327): Homolog of NCBI NO: 15810341 NR Description: putative cytochrome P450 protein [Arabidopsis
MMNLTMNMLWGGSVKAEEMESVGTEFKGVISEITRLLSEPNVSDFFPWLARFDLQGLVKRMGVCARELDAVLDRAIEQMKPLRGRDDDEVKDFLQYLMKLKDQEGDSEVPITINHVKALLTDMVVGGTDTSTNTIEFAMAELMSNPELIKRAQEELDEVVGKDNIVEESHITRLPYILAIMKETLRLHPTLPLLVPHRPAENTVVGGYTIPKDTKIFVNVWSIQRDPNVWENPTEFRPERFLDNNSCDFTGANYSYFPFGSGRRICAGVALAERMVLYTLATLLHSFDWKIPEGHVLDLKEKFGIVLKLKIPLVALPIPRFSDSNLYL

SEQ ID NO: 101210 - protein, 327 aa, Arabidopsis thaliana
  peptide (1)..(327): Ceres Seq. ID no. 13607280
  misc_feature (1)..(327): Homolog of NCBI NO: 15234514 NR Description: cytochrome p450 family [Arabidopsis thaliana]
  misc_feature (1)..(326): Homolog of NCBI NO: 15234517 NR Description: cytochrome P450, putative [Arabidopsis thaliana]
  misc_feature (1)..(327): Homolog of NCBI NO: 11345411 NR Description: putative cytochrome P450 [Matthiola incana]
  misc_feature (1)..(327): Homolog of NCBI NO: 15234519 NR Description: cytochrome P450, putative [Arabidopsis thaliana]
  misc_feature (1)..(327): Homolog of NCBI NO: 15241541 NR Description: cytochrome P450 family [Arabidopsis thaliana]
  misc_feature (1)..(327): Homolog of NCBI NO: 15234521 NR Description: cytochrome P450 family [Arabidopsis thaliana]
  misc_feature (1)..(326): Homolog of NCBI NO: 30685891 NR Description: cytochrome P450 family [Arabidopsis thaliana]
  misc_feature (1)..(326): Homolog of NCBI NO: 7430667 NR Description: cytochrome P450 homolog T12H17.80 - Arabidopsis >gi|2827546|emb|CAA16554.1| cytochrome P450 like protein thaliana] >gi|7269115|emb|CAB79224.1| cytochrome P450 like
  misc_feature (1)..(326): Homolog of NCBI NO: 15235775 NR Description: cytochrome P450 family [Arabidopsis thaliana]
  misc_feature (1)..(326): Homolog of NCBI NO: 15810341 NR Description: putative cytochrome P450 protein [Arabidopsis
MNLTMNMLWGGSVKAEEMESVGTEFKGVISEITRLLSEPNVSDFFPWLARFDLQGLVKRMGVCARELDAVLDRAIEQMKPLRGRDDDEVKDFLQYLMKLKDQEGDSEVPITINHVKALLTDMVVGGTDTSTNTIEFAMAELMSNPELIKRAQEELDEVVGKDNIVEESHITRLPYILAIMKETLRLHPTLPLLVPHRPAENTVVGGYTIPKDTKIFVNVWSIQRDPNVWENPTEFRPERFLDNNSCDFTGANYSYFPFGSGRRICAGVALAERMVLYTLATLLHSFDWKIPEGHVLDLKEKFGIVLKLKIPLVALPIPRFSDSNLYL

SEQ ID NO: 101211 - DNA, 1058 bp, Arabidopsis thaliana
  misc_feature (1)..(1058): Ceres Seq. ID no. 13607285
  misc_feature: MA Experiment ID: 20000315 Result: Down-regulated in Transcription
  misc_feature: MA Experiment 20000315 PARAMETER Experiment Name: At_14day_Shoots-Roots_Sub_P Parameter: Age (day) Value: 14
  misc_feature: MA Experiment 20000315 PARAMETER Experiment Name: At_14day_Shoots-Roots_Sub_P Parameter: Organism Value: A. thaliana
  misc_feature: MA Experiment 20000315 PARAMETER Experiment Name: At_14day_Shoots-Roots_Sub_P Parameter: Plant Line Value: WS
  misc_feature: MA Experiment 20000315 PARAMETER Experiment Name: At_14day_Shoots-Roots_Sub_P Parameter: Tissue Value: Shoots vs. Whole Plant
  misc_feature: MA Experiment ID: 20000355 Result: Down-regulated in Transcription
  misc_feature: MA Experiment 20000355 PARAMETER Experiment Name: At_Siliques_Sub_P Parameter: Age (day) Value: 21
  misc_feature: MA Experiment 20000355 PARAMETER Experiment Name: At_Siliques_Sub_P Parameter: Organism Value: A. thaliana
  misc_feature: MA Experiment 20000355 PARAMETER Experiment Name: At_Siliques_Sub_P Parameter: Plant Line Value: WS
  misc_feature: MA Experiment 20000355 PARAMETER Experiment Name: At_Siliques_Sub_P Parameter: Tissue Value: Less Than 5mm Siliques vs. Whole Plant
  misc_feature: MA Experiment ID: 20000440 Result: Up-regulated in Transcription
  misc_feature: MA Experiment 20000440 PARAMETER Experiment Name: At_Closed-Flower__Sub_P Parameter: Tissue Value: Closed Flower vs. Whole Plant
aaaaacagagtcttttagtatcttcttcttgggtataacgaagatttttgtggtttcttctgattaatgatgatgataaagcttgagagaagtgattagtctgtagaagaagaagagttaaaaccattcaccaaagaagaaattgagaactagagacagtcatggagatcaaatcttaccaaaatcaagcagagtattttgttgaacactatttattagcagatccatttcttccatatacttctgttcttgttggaatctgtctttgcaaattggtatatgatcttacggagttattcagctcaattcatgtcaaatcatactcagctctcacaaaaataaagagaattgaatggaacaacaggggaatttctacagtccatgcgatctttatctcattcatggcattatactttgcgttcttctctgatttgttttctgaccaaagaagccttgaaacccttacggtgtttcgtaactcgcctctgtctacctttggtttaggagtatcagttggttactttcttgcggatcttggaatgatcttttggttatacccttctttaggaggatcagaatatatattacatcactgcttatctggaacagcagtagcgtattctttgttctctggagaggctcagctttacacatacatggttttaatctctgaagtgactacaccagagatcaatcttagatggtaccttgacattgctggtttgaaacgatctaaagcttatcttgttaatggagttgctatattctttgcttggttgacagcaagaattcttctgttcatctacatgttttaccatgtctacacacattatgatcaggtgatagagatgcatacattcggttatctactggtatttgttgtaccgatttcattgagtgtcatgaacttgatctggtttggtaagatagtgaagggattgaagaaaactcttgagaaaagacagtgaagaaagagttgtgttttttttttatgtaaatataaaactcttatgaagaatcttacaagtttataagcaacaaagatatggtttgtttct

SEQ ID NO: 101212 - protein, 268 aa, Arabidopsis thaliana
  peptide (1)..(268): Ceres Seq. ID no. 13607286
  misc_feature (25)..(268): Pfam Name: Eukaryotic protein of unknown function (DUF887) Pfam Description: Eukaryotic protein of unknown function (DUF887)
  misc_feature (1)..(268): Homolog of NCBI NO: 22328807 NR Description: expressed protein [Arabidopsis thaliana] expressed protein [Arabidopsis thaliana] unknown protein [Arabidopsis thaliana]
  misc_feature (1)..(267): Homolog of NCBI NO: 18397885 NR Description: expressed protein [Arabidopsis thaliana] At1g31300/T19E23_12 [Arabidopsis thaliana]
  misc_feature (1)..(266): Homolog of NCBI NO: 40538924 NR Description: expressed protein [Oryza sativa (japonica
  misc_feature (1)..(206): Homolog of NCBI NO: 25403400 NR Description: protein T19E23.9 [imported] - Arabidopsis >gi|6692122|gb|AAF24587.1|AC007654_3 T19E23.9 [Arabidopsis
  misc_feature (217)..(267): Homolog of NCBI NO: 25403400 NR Description: protein T19E23.9 [imported] - Arabidopsis >gi|6692122|gb|AAF24587.1|AC007654_3 T19E23.9 [Arabidopsis
  misc_feature (28)..(268): Homolog of NCBI NO: 34909246 NR Description: B1148D12.11 [Oryza sativa (japonica
  misc_feature (28)..(266): Homolog of NCBI NO: 21537382 NR Description: unknown [Arabidopsis thaliana]
  misc_feature (28)..(266): Homolog of NCBI NO: 18413327 NR Description: expressed protein [Arabidopsis thaliana] AT4g10360/F24G24_160 [Arabidopsis thaliana]
  misc_feature (28)..(266): Homolog of NCBI NO: 7486070 NR Description: hypothetical protein F24G24.160 - Arabidopsis >gi|4538965|emb|CAB39789.1| hypothetical protein [Arabidopsis >gi|7267733|emb|CAB78159.1| hypothetical protein [Arabidopsis
  misc_feature (37)..(264): Homolog of NCBI NO: 30725869 NR Description: RIKEN cDNA C730036B01 [Mus musculus]
MEIKSYQNQAEYFVEHYLLADPFLPYTSVLVGICLCKLVYDLTELFSSIHVKSYSALTKIKRIEWNNRGISTVHAIFISFMALYFAFFSDLFSDQRSLETLTVFRNSPLSTFGLGVSVGYFLADLGMIFWLYPSLGGSEYILHHCLSGTAVAYSLFSGEAQLYTYMVLISEVTTPEINLRWYLDIAGLKRSKAYLVNGVAIFFAWLTARILLFIYMFYHVYTHYDQVIEMHTFGYLLVFVVPISLSVMNLIWFGKIVKGLKKTLEKRQ

SEQ ID NO: 101213 - protein, 188 aa, Arabidopsis thaliana
  peptide (1)..(188): Ceres Seq. ID no. 13607287
  misc_feature (1)..(188): Pfam Name: Eukaryotic protein of unknown function (DUF887) Pfam Description: Eukaryotic protein of unknown function (DUF887)
  misc_feature (1)..(188): Homolog of NCBI NO: 22328807 NR Description: expressed protein [Arabidopsis thaliana] expressed protein [Arabidopsis thaliana] unknown protein [Arabidopsis thaliana]
  misc_feature (1)..(187): Homolog of NCBI NO: 18397885 NR Description: expressed protein [Arabidopsis thaliana] At1g31300/T19E23_12 [Arabidopsis thaliana]
  misc_feature (1)..(186): Homolog of NCBI NO: 40538924 NR Description: expressed protein [Oryza sativa (japonica
  misc_feature (1)..(126): Homolog of NCBI NO: 25403400 NR Description: protein T19E23.9 [imported] - Arabidopsis >gi|6692122|gb|AAF24587.1|AC007654_3 T19E23.9 [Arabidopsis
  misc_feature (137)..(187): Homolog of NCBI NO: 25403400 NR Description: protein T19E23.9 [imported] - Arabidopsis >gi|6692122|gb|AAF24587.1|AC007654_3 T19E23.9 [Arabidopsis
  misc_feature (1)..(188): Homolog of NCBI NO: 34909246 NR Description: B1148D12.11 [Oryza sativa (japonica
  misc_feature (1)..(186): Homolog of NCBI NO: 21537382 NR Description: unknown [Arabidopsis thaliana]
  misc_feature (1)..(186): Homolog of NCBI NO: 18413327 NR Description: expressed protein [Arabidopsis thaliana] AT4g10360/F24G24_160 [Arabidopsis thaliana]
  misc_feature (1)..(186): Homolog of NCBI NO: 7486070 NR Description: hypothetical protein F24G24.160 - Arabidopsis >gi|4538965|emb|CAB39789.1| hypothetical protein [Arabidopsis >gi|7267733|emb|CAB78159.1| hypothetical protein [Arabidopsis
  misc_feature (1)..(184): Homolog of NCBI NO: 30725869 NR Description: RIKEN cDNA C730036B01 [Mus musculus]
MALYFAFFSDLFSDQRSLETLTVFRNSPLSTFGLGVSVGYFLADLGMIFWLYPSLGGSEYILHHCLSGTAVAYSLFSGEAQLYTYMVLISEVTTPEINLRWYLDIAGLKRSKAYLVNGVAIFFAWLTARILLFIYMFYHVYTHYDQVIEMHTFGYLLVFVVPISLSVMNLIWFGKIVKGLKKTLEKRQ

SEQ ID NO: 101214 - protein, 142 aa, Arabidopsis thaliana
  peptide (1)..(142): Ceres Seq. ID no. 13607288
  misc_feature (1)..(142): Pfam Name: Eukaryotic protein of unknown function (DUF887) Pfam Description: Eukaryotic protein of unknown function (DUF887)
  misc_feature (1)..(142): Homolog of NCBI NO: 22328807 NR Description: expressed protein [Arabidopsis thaliana] expressed protein [Arabidopsis thaliana] unknown protein [Arabidopsis thaliana]
  misc_feature (1)..(141): Homolog of NCBI NO: 18397885 NR Description: expressed protein [Arabidopsis thaliana] At1g31300/T19E23_12 [Arabidopsis thaliana]
  misc_feature (1)..(140): Homolog of NCBI NO: 40538924 NR Description: expressed protein [Oryza sativa (japonica
  misc_feature (1)..(80): Homolog of NCBI NO: 25403400 NR Description: protein T19E23.9 [imported] - Arabidopsis >gi|6692122|gb|AAF24587.1|AC007654_3 T19E23.9 [Arabidopsis
  misc_feature (91)..(141): Homolog of NCBI NO: 25403400 NR Description: protein T19E23.9 [imported] - Arabidopsis >gi|6692122|gb|AAF24587.1|AC007654_3 T19E23.9 [Arabidopsis
  misc_feature (1)..(142): Homolog of NCBI NO: 34909246 NR Description: B1148D12.11 [Oryza sativa (japonica
  misc_feature (1)..(140): Homolog of NCBI NO: 21537382 NR Description: unknown [Arabidopsis thaliana]
  misc_feature (1)..(140): Homolog of NCBI NO: 18413327 NR Description: expressed protein [Arabidopsis thaliana] AT4g10360/F24G24_160 [Arabidopsis thaliana]
  misc_feature (1)..(140): Homolog of NCBI NO: 7486070 NR Description: hypothetical protein F24G24.160 - Arabidopsis >gi|4538965|emb|CAB39789.1| hypothetical protein [Arabidopsis >gi|7267733|emb|CAB78159.1| hypothetical protein [Arabidopsis
  misc_feature (1)..(138): Homolog of NCBI NO: 30725869 NR Description: RIKEN cDNA C730036B01 [Mus musculus]
MIFWLYPSLGGSEYILHHCLSGTAVAYSLFSGEAQLYTYMVLISEVTTPEINLRWYLDIAGLKRSKAYLVNGVAIFFAWLTARILLFIYMFYHVYTHYDQVIEMHTFGYLLVFVVPISLSVMNLIWFGKIVKGLKKTLEKRQ

SEQ ID NO: 101215 - DNA, 1997 bp, Arabidopsis thaliana
  misc_feature (1)..(1997): Ceres Seq. ID no. 13607292
  misc_feature: MA Experiment ID: 20000234 Result: Up-regulated in Transcription
  misc_feature: MA Experiment 20000234 PARAMETER Experiment Name: At_Siliques_P Parameter: Age (day) Value: 21
  misc_feature: MA Experiment 20000234 PARAMETER Experiment Name: At_Siliques_P Parameter: Organism Value: A. thaliana
  misc_feature: MA Experiment 20000234 PARAMETER Experiment Name: At_Siliques_P Parameter: Plant Line Value: WS
  misc_feature: MA Experiment 20000234 PARAMETER Experiment Name: At_Siliques_P Parameter: Tissue Value: Less Than 5mm Siliques vs. Whole Plant
  misc_feature: MA Experiment ID: 20000235 Result: Up-regulated in Transcription
  misc_feature: MA Experiment 20000235 PARAMETER Experiment Name: At_Siliques_P Parameter: Age (day) Value: 21
  misc_feature: MA Experiment 20000235 PARAMETER Experiment Name: At_Siliques_P Parameter: Organism Value: A. thaliana
  misc_feature: MA Experiment 20000235 PARAMETER Experiment Name: At_Siliques_P Parameter: Plant Line Value: WS
  misc_feature: MA Experiment 20000235 PARAMETER Experiment Name: At_Siliques_P Parameter: Tissue Value: 5-10mm Siliques vs. Whole Plant
  misc_feature: MA Experiment ID: 20000264 Result: Up-regulated in Transcription
  misc_feature: MA Experiment 20000264 PARAMETER Experiment Name: At_Open_Flower_P Parameter: Age (day) Value: 21
  misc_feature: MA Experiment 20000264 PARAMETER Experiment Name: At_Open_Flower_P Parameter: Plant Line Value: WS
  misc_feature: MA Experiment 20000264 PARAMETER Experiment Name: At_Open_Flower_P Parameter: Tissue Value: Open Flower vs. Whole Plant
  misc_feature: MA Experiment ID: 20000265 Result: Up-regulated in Transcription
  misc_feature: MA Experiment 20000265 PARAMETER Experiment Name: At_Open_Flower_P Parameter: Age (day) Value: 21
  misc_feature: MA Experiment 20000265 PARAMETER Experiment Name: At_Open_Flower_P Parameter: Plant Line Value: WS
  misc_feature: MA Experiment 20000265 PARAMETER Experiment Name: At_Open_Flower_P Parameter: Tissue Value: Closed Flower vs. Whole Plant
  misc_feature: MA Experiment ID: 20000286 Result: Up-regulated in Transcription
  misc_feature: MA Experiment 20000286 PARAMETER Experiment Name: At_Open_Flower_P Parameter: Age (day) Value: 21
  misc_feature: MA Experiment 20000286 PARAMETER Experiment Name: At_Open_Flower_P Parameter: Plant Line Value: WS
  misc_feature: MA Experiment 20000286 PARAMETER Experiment Name: At_Open_Flower_P Parameter: Tissue Value: Half Open vs. Whole Plant
acatattccatttaaccaatgtgaaagattcacatcacctttttcgatttttaatagattcggttttaccttctcgtaacgtaattctaagaaaagaaaacgtcaatcatatttactaggaaagataattataatttattgctttttctctcactctctgacctgaaatctcctactgagatttttgaagtgtattcaacaatggcggatccaccacatttctctctgtttcagcaaaaatttcgtaccggagacaaaccatttctcactcttgatgctgacttcttaatgaatcacacgaaagtgttactaaaatcggatgcttcagacaaagtttggaaagtgaaactggacggcggtaggctctccgaaggctgggaagagttcgcctgcgaccagaaattcagagacggtgacgttttggttttcaaacatcatggagacgaggtctttcatgtagctgtggtgtccccatctgtttccggcgacatacgtaacgcatcttctagccaagttattacggaagatacttatattgatgttgacgatgttgatgatgatgattatggacaagacgacgaagatgatgatgatgatgatgatgagggcgaggataatatagagaacatatcggagaagacggataaaagacaagaagcagattcttcatcagaccactcaggtttcatcacagcacgtgtcactcgttatagcctccttcatgaccgtttggatctttctagaaattttacgttgttgtttggtgggcaccaaaaaacatgtgagatcgatgtagtggatgagcaagggagaagatggacaatgaaacttgccaaaaacatctcaagtggtgtgttttacatcagactaggctggggaaacttctgctgcgctaatgggctaactcaaggagacttatgtaagtttaaacttttccaaaatgaggaaaggcctgtgctttggttgtgtccacaggaatctggcaatggccgtaaagagaagaggacgtttgatgaagtttccaaaggaaaggagaagaagaccccttcaccatttctgatagtaaagtatacacctagccgtgagactaccgggcaactatcacttccagtgagtttcacgaggaacaatagcattaataagactggggaggtaattctgctgaaccaagatggaagaaagtggtcatcttatctacagataacaggacttggaagaggcgccggaagtgaatggttttatttgagaagaggttggagagagatgtgcgaagcgaatggagtgggagtaaatgattctttcaagctggaactggtgtgggaaggagctaatcctatgtttaagttctgctccaagattgaaaaccatgaatacaagggaaaaggaaaccaaagaactcgtaagaagagagcttgtgagactgctccacagccaaggaatgtgaaaaagactccaagattaggagtagagggaccagtgtatcaagttgatgaggagagaggacacactcaggtttcaaacagaaccaacaccatctcaggaaatttacagcgcttgctaccaccatcgtgctcagtctccgatcaggtggctaatgtgaaacagggcattgtagatagtctgaacactgtgagacaatgtcggactgagcttgagacaagtgaacaaaatctgcaagcctctttgctagcaattgacgccttaggggagaggatatggggaatcagcaaaatcctcagcagtaatctggtttgaagtgagactgaagatggggaaagaaacaaagagtgattttcactaaactaggtttattctgtatttgagacttgcaagttttagagactgtacttaaaagtttgtagtttggaagggccttcttcagttgtatcagcaatttggactacttcactatatcgctgagaaactagtaatattgtaatgcattgtgagtttcaacttttgttgtattagtgatattgtaatgttatttggttttg

SEQ ID NO: 101216 - protein, 517 aa, Arabidopsis thaliana
  peptide (1)..(517): Ceres Seq. ID no. 13607293
  misc_feature (285)..(389): Pfam Name: B3 DNA binding domain Pfam Description: B3 DNA binding domain
  misc_feature (1)..(517): Homolog of NCBI NO: 18417840 NR Description: transcriptional factor B3 family [Arabidopsis >gi|28393009|gb|AAO41939.1| unknown protein [Arabidopsis >gi|28827382|gb|AAO50535.1| unknown protein [Arabidopsis
  misc_feature (1)..(517): Homolog of NCBI NO: 13604227 NR Description: reproductive meristem protein 1 [Arabidopsis
  misc_feature (1)..(502): Homolog of NCBI NO: 7486327 NR Description: hypothetical protein F28M20.200 - Arabidopsis >gi|3281866|emb|CAA19762.1| putative protein [Arabidopsis >gi|7270064|emb|CAB79879.1| putative protein [Arabidopsis
  misc_feature (113)..(516): Homolog of NCBI NO: 7488600 NR Description: reproductive meristem protein 1 - broccoli
  misc_feature (1)..(152): Homolog of NCBI NO: 7488600 NR Description: reproductive meristem protein 1 - broccoli
  misc_feature (16)..(502): Homolog of NCBI NO: 15236028 NR Description: transcriptional factor B3 family [Arabidopsis
  misc_feature (122)..(502): Homolog of NCBI NO: 22329058 NR Description: transcriptional factor B3 family [Arabidopsis
  misc_feature (31)..(121): Homolog of NCBI NO: 22329058 NR Description: transcriptional factor B3 family [Arabidopsis
  misc_feature (122)..(502): Homolog of NCBI NO: 7486326 NR Description: hypothetical protein F28M20.190 - Arabidopsis >gi|3281865|emb|CAA19761.1| putative protein [Arabidopsis >gi|7270065|emb|CAB79880.1| putative protein [Arabidopsis
  misc_feature (31)..(121): Homolog of NCBI NO: 7486326 NR Description: hypothetical protein F28M20.190 - Arabidopsis >gi|3281865|emb|CAA19761.1| putative protein [Arabidopsis >gi|7270065|emb|CAB79880.1| putative protein [Arabidopsis
MADPPHFSLFQQKFRTGDKPFLTLDADFLMNHTKVLLKSDASDKVWKVKLDGGRLSEGWEEFACDQKFRDGDVLVFKHHGDEVFHVAVVSPSVSGDIRNASSSQVITEDTYIDVDDVDDDDYGQDDEDDDDDDDEGEDNIENISEKTDKRQEADSSSDHSGFITARVTRYSLLHDRLDLSRNFTLLFGGHQKTCEIDVVDEQGRRWTMKLAKNISSGVFYIRLGWGNFCCANGLTQGDLCKFKLFQNEERPVLWLCPQESGNGRKEKRTFDEVSKGKEKKTPSPFLIVKYTPSRETTGQLSLPVSFTRNNSINKTGEVILLNQDGRKWSSYLQITGLGRGAGSEWFYLRRGWREMCEANGVGVNDSFKLELVWEGANPMFKFCSKIENHEYKGKGNQRTRKKRACETAPQPRNVKKTPRLGVEGPVYQVDEERGHTQVSNRTNTISGNLQRLLPPSCSVSDQVANVKQGIVDSLNTVRQCRTELETSEQNLQASLLAIDALGERIWGISKILSSNLV

SEQ ID NO: 101217 - protein, 488 aa, Arabidopsis thaliana
  peptide (1)..(488): Ceres Seq. ID no. 13607294
  misc_feature (256)..(360): Pfam Name: B3 DNA binding domain Pfam Description: B3 DNA binding domain
  misc_feature (1)..(488): Homolog of NCBI NO: 18417840 NR Description: transcriptional factor B3 family [Arabidopsis >gi|28393009|gb|AAO41939.1| unknown protein [Arabidopsis >gi|28827382|gb|AAO50535.1| unknown protein [Arabidopsis
  misc_feature (1)..(488): Homolog of NCBI NO: 13604227 NR Description: reproductive meristem protein 1 [Arabidopsis
  misc_feature (1)..(473): Homolog of NCBI NO: 7486327 NR Description: hypothetical protein F28M20.200 - Arabidopsis >gi|3281866|emb|CAA19762.1| putative protein [Arabidopsis >gi|7270064|emb|CAB79879.1| putative protein [Arabidopsis
  misc_feature (84)..(487): Homolog of NCBI NO: 7488600 NR Description: reproductive meristem protein 1 - broccoli
  misc_feature (1)..(123): Homolog of NCBI NO: 7488600 NR Description: reproductive meristem protein 1 - broccoli
  misc_feature (1)..(473): Homolog of NCBI NO: 15236028 NR Description: transcriptional factor B3 family [Arabidopsis
  misc_feature (93)..(473): Homolog of NCBI NO: 22329058 NR Description: transcriptional factor B3 family [Arabidopsis
  misc_feature (2)..(92): Homolog of NCBI NO: 22329058 NR Description: transcriptional factor B3 family [Arabidopsis
  misc_feature (93)..(473): Homolog of NCBI NO: 7486326 NR Description: hypothetical protein F28M20.190 - Arabidopsis >gi|3281865|emb|CAA19761.1| putative protein [Arabidopsis >gi|7270065|emb|CAB79880.1| putative protein [Arabidopsis
  misc_feature (2)..(92): Homolog of NCBI NO: 7486326 NR Description: hypothetical protein F28M20.190 - Arabidopsis >gi|3281865|emb|CAA19761.1| putative protein [Arabidopsis >gi|7270065|emb|CAB79880.1| putative protein [Arabidopsis
MNHTKVLLKSDASDKVWKVKLDGGRLSEGWEEFACDQKFRDGDVLVFKHHGDEVFHVAVVSPSVSGDIRNASSSQVITEDTYIDVDDVDDDDYGQDDEDDDDDDDEGEDNIENISEKTDKRQEADSSSDHSGFITARVTRYSLLHDRLDLSRNFTLLFGGHQKTCEIDVVDEQGRRWTMKLAKNISSGVFYIRLGWGNFCCANGLTQGDLCKFKLFQNEERPVLWLCPQESGNGRKEKRTFDEVSKGKEKKTPSPFLIVKYTPSRETTGQLSLPVSFTRNNSINKTGEVILLNQDGRKWSSYLQITGLGRGAGSEWFYLRRGWREMCEANGVGVNDSFKLELVWEGANPMFKFCSKIENHEYKGKGNQRTRKKRACETAPQPRNVKKTPRLGVEGPVYQVDEERGHTQVSNRTNTISGNLQRLLPPSCSVSDQVANVKQGIVDSLNTVRQCRTELETSEQNLQASLLAIDALGERIWGISKILSSNLV

SEQ ID NO: 101218 - protein, 310 aa, Arabidopsis thaliana
  peptide (1)..(310): Ceres Seq. ID no. 13607295
  misc_feature (78)..(182): Pfam Name: B3 DNA binding domain Pfam Description: B3 DNA binding domain
  misc_feature (1)..(310): Homolog of NCBI NO: 18417840 NR Description: transcriptional factor B3 family [Arabidopsis >gi|28393009|gb|AAO41939.1| unknown protein [Arabidopsis >gi|28827382|gb|AAO50535.1| unknown protein [Arabidopsis
  misc_feature (1)..(310): Homolog of NCBI NO: 13604227 NR Description: reproductive meristem protein 1 [Arabidopsis
  misc_feature (1)..(295): Homolog of NCBI NO: 7486327 NR Description: hypothetical protein F28M20.200 - Arabidopsis >gi|3281866|emb|CAA19762.1| putative protein [Arabidopsis >gi|7270064|emb|CAB79879.1| putative protein [Arabidopsis
  misc_feature (1)..(309): Homolog of NCBI NO: 7488600 NR Description: reproductive meristem protein 1 - broccoli
  misc_feature (1)..(295): Homolog of NCBI NO: 15236028 NR Description: transcriptional factor B3 family [Arabidopsis
  misc_feature (1)..(295): Homolog of NCBI NO: 22329058 NR Description: transcriptional factor B3 family [Arabidopsis
  misc_feature (1)..(295): Homolog of NCBI NO: 7486326 NR Description: hypothetical protein F28M20.190 - Arabidopsis >gi|3281865|emb|CAA19761.1| putative protein [Arabidopsis >gi|7270065|emb|CAB79880.1| putative protein [Arabidopsis
  misc_feature (1)..(305): Homolog of NCBI NO: 22329060 NR Description: transcriptional factor B3 family [Arabidopsis >gi|17380948|gb|AAL36286.1| unknown protein [Arabidopsis >gi|22136736|gb|AAM91687.1| unknown protein [Arabidopsis
  misc_feature (81)..(294): Homolog of NCBI NO: 30689117 NR Description: transcriptional factor B3 family [Arabidopsis >gi|24817267|emb|CAD56214.1| putative auxin response factor 24
  misc_feature (1)..(21): Homolog of NCBI NO: 30689117 NR Description: transcriptional factor B3 family [Arabidopsis >gi|24817267|emb|CAD56214.1| putative auxin response factor 24
MKLAKNISSGVFYIRLGWGNFCCANGLTQGDLCKFKLFQNEERPVLWLCPQESGNGRKEKRTFDEVSKGKEKKTPSPFLIVKYTPSRETTGQLSLPVSFTRNNSINKTGEVILLNQDGRKWSSYLQITGLGRGAGSEWFYLRRGWREMCEANGVGVNDSFKLELVWEGANPMFKFCSKIENHEYKGKGNQRTRKKRACETAPQPRNVKKTPRLGVEGPVYQVDEERGHTQVSNRTNTISGNLQRLLPPSCSVSDQVANVKQGIVDSLNTVRQCRTELETSEQNLQASLLAIDALGERIWGISKILSSNLV

SEQ ID NO: 101219 - DNA, 921 bp, Arabidopsis thaliana
  misc_feature (1)..(921): Ceres Seq. ID no. 13607303
  misc_feature: MA Experiment ID: 108595 Result: Down-regulated in Transcription
  misc_feature: MA Experiment 108595 PARAMETER Experiment Name: At_Ler-pi_Ovule_cDNA_P Parameter: Plant Line Value: null
  misc_feature: MA Experiment ID: 20000224 Result: Down-regulated in Transcription
  misc_feature: MA Experiment ID: 20000495 Result: Down-regulated in Transcription
  misc_feature: MA Experiment 20000495 PARAMETER Experiment Name: At_Guard_Cells_P Parameter: Harvest Date Value: 8/2/2002
  misc_feature: MA Experiment 20000495 PARAMETER Experiment Name: At_Guard_Cells_P Parameter: Organism Value: A. thaliana
  misc_feature: MA Experiment 20000495 PARAMETER Experiment Name: At_Guard_Cells_P Parameter: Tissue Value: Guard Cells vs. Leaves
  misc_feature: MA Experiment ID: 20000794 Result: Up-regulated in Transcription
  misc_feature: MA Experiment 20000794 PARAMETER Experiment Name: At_Petals_P Parameter: Age (day) Value: 23-25 days
  misc_feature: MA Experiment 20000794 PARAMETER Experiment Name: At_Petals_P Parameter: Plant Line Value: WS
  misc_feature: MA Experiment 20000794 PARAMETER Experiment Name: At_Petals_P Parameter: Tissue Value: Petals vs. Whole plant
agctacgattgtgtgtttattattattgcaaccatttctctgctgtttcttcgtcgtttagcttcagaggacgacaatccggtaggcgagagagagagattaatcaatcggcgacctttttaattcgctcgtaattcgttttgattttcgtgtttttgcaacgaatttaacaacttctgtgtgtgtgggtgtgagtttcttaagagaagtcagaaacaatgattgggttgtttaaagtaaaggaaaagcaaagagaacaagctcaaaatgctactagaggaggagcttctgttaagaagcaatctgctggcgaacttcgtcttcacaaagatatatcagagttgaaccttcctagctcttgttcaatatcttttccaaatggcaaagatgatttgatgaactttgaagtatccattaaacctgatgatggatattaccacaatggtacgtttgtttcacattccaagtctctcctgtgtatccacatgaagctccaaaagttaaatgcaaaaccaaggtttatcatcccaatatcgatttggaaggaaacgtttgcctgaacatcttgcgtgaagattggaaacctgttcttaacattaacacagttatctacggactcttccatctgttcacggaacccaattctgaagatcccttgaaccatgatgctgcagcagttttgagggataacccaaagctctttgagaccaatgttcgcagggccatgaccggtggatatgtcggtcagacctttttcccgcgttgtatctaacaaagctctggtttgtcttcttcaaggaaaaagataagaaccaaaccctttgtccgccattgtatttcttctctttctcaaggaccctcgtttgtttgtttgatcttgtaaaattacattccgcgttaaagtaaccctttccttatatc

SEQ ID NO: 101220 - protein, 113 aa, Arabidopsis thaliana; identical to SEQ ID NO: 74812
  peptide (1)..(113): Ceres Seq. ID no. 13607304
  misc_feature (1)..(73): Homolog of NCBI NO: 25407764 NR Description: ubiquitin-protein ligase-like protein [imported] -
  misc_feature (1)..(79): Homolog of NCBI NO: 6635457 NR Description: RUB1 conjugating enzyme [Arabidopsis thaliana] AT4g36800/C7A10_560 [Arabidopsis thaliana]
  misc_feature (1)..(79): Homolog of NCBI NO: 37531910 NR Description: putative ubiquitin-conjugating enzyme [Oryza
  misc_feature (1)..(79): Homolog of NCBI NO: 40253382 NR Description: putative RUB1 conjugating enzyme [Oryza sativa
  misc_feature (1)..(78): Homolog of NCBI NO: 32400752 NR Description: RUB1-conjugating enzyme [Triticum aestivum]
  misc_feature (1)..(79): Homolog of NCBI NO: 4507791 NR Description: ubiquitin-conjugating enzyme E2M (UBC12 homolog,
  misc_feature (1)..(79): Homolog of NCBI NO: 30585323 NR Description: Homo sapiens ubiquitin-conjugating enzyme E2M
  misc_feature (1)..(79): Homolog of NCBI NO: 38174699 NR Description: Unknown (protein for MGC:75750) [Silurana
  misc_feature (1)..(113): Homolog of NCBI NO: 18419910 NR Description: RUB1-conjugating enzyme RCE1, putative
  misc_feature (1)..(83): Homolog of NCBI NO: 31215017 NR Description: ENSANGP00000013586 [Anopheles gambiae]

SEQ ID NO: 101221 - DNA, 1205 bp, Arabidopsis thaliana
  misc_feature (1)..(1205): Ceres Seq. ID no. 13607309
  misc_feature: MA Experiment ID: 108573 Result: Down-regulated in Transcription
  misc_feature: MA Experiment 108573 PARAMETER Experiment Name: At_Drought_cDNA_P Parameter: Timepoint (hr) Value: 6
  misc_feature: MA Experiment 108573 PARAMETER Experiment Name: At_Drought_cDNA_P Parameter: Tissue Value: Aerial
  misc_feature: MA Experiment 108573 PARAMETER Experiment Name: At_Drought_cDNA_P Parameter: Treatment Value: Drought vs. No Drought
  misc_feature: MA Experiment ID: 108585 Result: Down-regulated in Transcription
  misc_feature: MA Experiment 108585 PARAMETER Experiment Name: At_5mM_NaNP_cDNA_P Parameter: Timepoint (hr) Value: 6
  misc_feature: MA Experiment 108585 PARAMETER Experiment Name: At_5mM_NaNP_cDNA_P Parameter: Tissue Value: Aerial
  misc_feature: MA Experiment 108585 PARAMETER Experiment Name: At_5mM_NaNP_cDNA_P Parameter: Treatment Value: null
  misc_feature: MA Experiment ID: 108595 Result: Down-regulated in Transcription
  misc_feature: MA Experiment 108595 PARAMETER Experiment Name: At_Ler-pi_Ovule_cDNA_P Parameter: Plant Line Value: null
  misc_feature: MA Experiment ID: 20000173 Result: Down-regulated in Transcription
  misc_feature: MA Experiment 20000173 PARAMETER Experiment Name: At_42deg_Heat_P Parameter: Age (day) Value: 14
  misc_feature: MA Experiment 20000173 PARAMETER Experiment Name: At_42deg_Heat_P Parameter: Organism Value: A. thaliana
  misc_feature: MA Experiment 20000173 PARAMETER Experiment Name: At_42deg_Heat_P Parameter: Plant Line Value: WS
  misc_feature: MA Experiment 20000173 PARAMETER Experiment Name: At_42deg_Heat_P Parameter: Temperature (deg C) Value: 42 vs. 22
  misc_feature: MA Experiment 20000173 PARAMETER Experiment Name: At_42deg_Heat_P Parameter: Timepoint (hr) Value: 6
  misc_feature: MA Experiment 20000173 PARAMETER Experiment Name: At_42deg_Heat_P Parameter: Tissue Value: Aerial
  misc_feature: MA Experiment ID: 20000185 Result: Down-regulated in Transcription
  misc_feature: MA Experiment 20000185 PARAMETER Experiment Name: At_Roots__P Parameter: Age (day) Value: 7 vs. 21
  misc_feature: MA Experiment 20000185 PARAMETER Experiment Name: At_Roots__P Parameter: Organism Value: A. thaliana
  misc_feature: MA Experiment 20000185 PARAMETER Experiment Name: At_Roots__P Parameter: Tissue Value: Roots vs. Whole Plant
  misc_feature: MA Experiment ID: 20000436 Result: Down-regulated in Transcription
  misc_feature: MA Experiment 20000436 PARAMETER Experiment Name: At_Drought_P Parameter: Age (day) Value: 7
  misc_feature: MA Experiment 20000436 PARAMETER Experiment Name: At_Drought_P Parameter: Organism Value: A. thaliana
  misc_feature: MA Experiment 20000436 PARAMETER Experiment Name: At_Drought_P Parameter: Plant Line Value: WS
  misc_feature: MA Experiment 20000436 PARAMETER Experiment Name: At_Drought_P Parameter: Timepoint (hr) Value: 12
  misc_feature: MA Experiment 20000436 PARAMETER Experiment Name: At_Drought_P Parameter: Tissue Value: Whole Plant
  misc_feature: MA Experiment 20000436 PARAMETER Experiment Name: At_Drought_P Parameter: Treatment Value: Drought vs. No Drought
  misc_feature: MA Experiment ID: 20000437 Result: Down-regulated in Transcription
  misc_feature: MA Experiment 20000437 PARAMETER Experiment Name: At_Drought_P Parameter: Age (day) Value: 8
  misc_feature: MA Experiment 20000437 PARAMETER Experiment Name: At_Drought_P Parameter: Organism Value: A. thaliana
  misc_feature: MA Experiment 20000437 PARAMETER Experiment Name: At_Drought_P Parameter: Plant Line Value: WS
  misc_feature: MA Experiment 20000437 PARAMETER Experiment Name: At_Drought_P Parameter: Timepoint (hr) Value: 24
  misc_feature: MA Experiment 20000437 PARAMETER Experiment Name: At_Drought_P Parameter: Tissue Value: Whole Plant
  misc_feature: MA Experiment 20000437 PARAMETER Experiment Name: At_Drought_P Parameter: Treatment Value: Drought vs. No Drought
  misc_feature: MA Experiment ID: 20000439 Result: Down-regulated in Transcription
  misc_feature: MA Experiment 20000439 PARAMETER Experiment Name: At_Roots__P Parameter: Age (day) Value: 14 vs. 21
  misc_feature: MA Experiment 20000439 PARAMETER Experiment Name: At_Roots__P Parameter: Organism Value: A. thaliana
  misc_feature: MA Experiment 20000439 PARAMETER Experiment Name: At_Roots__P Parameter: Tissue Value: Roots vs. Whole Plant
  misc_feature: MA Experiment ID: 20000495 Result: Down-regulated in Transcription
  misc_feature: MA Experiment 20000495 PARAMETER Experiment Name: At_Guard_Cells_P Parameter: Harvest Date Value: 8/2/2002
  misc_feature: MA Experiment 20000495 PARAMETER Experiment Name: At_Guard_Cells_P Parameter: Organism Value: A. thaliana
  misc_feature: MA Experiment 20000495 PARAMETER Experiment Name: At_Guard_Cells_P Parameter: Tissue Value: Guard Cells vs. Leaves
  misc_feature: MA Experiment ID: 20000496 Result: Down-regulated in Transcription
  misc_feature: MA Experiment 20000496 PARAMETER Experiment Name: At_Guard_Cells_P Parameter: Harvest Date Value: 7/19/2002
  misc_feature: MA Experiment 20000496 PARAMETER Experiment Name: At_Guard_Cells_P Parameter: Organism Value: Canola
  misc_feature: MA Experiment 20000496 PARAMETER Experiment Name: At_Guard_Cells_P Parameter: Tissue Value: Guard Cells vs. Leaves
  misc_feature: MA Experiment ID: 20001450 Result: Down-regulated in Transcription
  misc_feature: MA Experiment 20001450 PARAMETER Experiment Name: At_Far-red-induction_P Parameter: Age (day) Value: 7
  misc_feature: MA Experiment 20001450 PARAMETER Experiment Name: At_Far-red-induction_P Parameter: Light Value: Far-red vs. White
  misc_feature: MA Experiment 20001450 PARAMETER Experiment Name: At_Far-red-induction_P Parameter: Organism Value: A. thaliana
  misc_feature: MA Experiment 20001450 PARAMETER Experiment Name: At_Far-red-induction_P Parameter: Plant Line Value: Columbia
  misc_feature: MA Experiment 20001450 PARAMETER Experiment Name: At_Far-red-induction_P Parameter: Timepoint (hr) Value: 8
  misc_feature: MA Experiment 20001450 PARAMETER Experiment Name: At_Far-red-induction_P Parameter: Tissue Value: Whole Plant
  misc_feature: MA Experiment ID: 20001451 Result: Down-regulated in Transcription
  misc_feature: MA Experiment 20001451 PARAMETER Experiment Name: At_Far-red-induction_P Parameter: Age (day) Value: 7
  misc_feature: MA Experiment 20001451 PARAMETER Experiment Name: At_Far-red-induction_P Parameter: Light Value: Far-red vs. White
  misc_feature: MA Experiment 20001451 PARAMETER Experiment Name: At_Far-red-induction_P Parameter: Organism Value: A. thaliana
  misc_feature: MA Experiment 20001451 PARAMETER Experiment Name: At_Far-red-induction_P Parameter: Plant Line Value: Columbia
  misc_feature: MA Experiment 20001451 PARAMETER Experiment Name: At_Far-red-induction_P Parameter: Timepoint (hr) Value: 24
  misc_feature: MA Experiment 20001451 PARAMETER Experiment Name: At_Far-red-induction_P Parameter: Tissue Value: Whole Plant
  misc_feature: MA Experiment ID: 20001905 Result: Down-regulated in Transcription
  misc_feature: MA Experiment 20001905 PARAMETER Experiment Name: At_Drought_Reproduction_P Parameter: Age (day) Value: 40
  misc_feature: MA Experiment 20001905 PARAMETER Experiment Name: At_Drought_Reproduction_P Parameter: Organism Value: A. thaliana
  misc_feature: MA Experiment 20001905 PARAMETER Experiment Name: At_Drought_Reproduction_P Parameter: Plant Line Value: WS
  misc_feature: MA Experiment 20001905 PARAMETER Experiment Name: At_Drought_Reproduction_P Parameter: Timepoint (day) Value: 10
  misc_feature: MA Experiment 20001905 PARAMETER Experiment Name: At_Drought_Reproduction_P Parameter: Tissue Value: Rosettes
  misc_feature: MA Experiment 20001905 PARAMETER Experiment Name: At_Drought_Reproduction_P Parameter: Treatment Value: Drought vs. No Drought
  misc_feature: MA Experiment ID: 20001911 Result: Down-regulated in Transcription
  misc_feature: MA Experiment 20001911 PARAMETER Experiment Name: At_Drought_Reproduction_P Parameter: Age (day) Value: 40
  misc_feature: MA Experiment 20001911 PARAMETER Experiment Name: At_Drought_Reproduction_P Parameter: Organism Value: A. thaliana
  misc_feature: MA Experiment 20001911 PARAMETER Experiment Name: At_Drought_Reproduction_P Parameter: Plant Line Value: WS
  misc_feature: MA Experiment 20001911 PARAMETER Experiment Name: At_Drought_Reproduction_P Parameter: Timepoint (day) Value: 10
  misc_feature: MA Experiment 20001911 PARAMETER Experiment Name: At_Drought_Reproduction_P Parameter: Tissue Value: Flowers
  misc_feature: MA Experiment 20001911 PARAMETER Experiment Name: At_Drought_Reproduction_P Parameter: Treatment Value: Drought vs. No Drought
gaagcggataacgaaaagctcgccgagaaagcacaaatggcgggcgtgaaatctctgcaacctagactcatatcttcctttctcggcaacaattctattagatcaacgcaaccacttattcatctctttcgcttcgatttaggaagaagacatgtttcgatgcaattatcaagaaccttttctggattaaccgatctcctgtttaatagaagaaatgaagatgaagttattgatggcaagagaaaacgtctgagaccgggaaatgtatctcctcgtcgtcctgttccgggtcatataacaaaacctccttatgttgattctcttcaagctcccggaatctcaagtggacttgaagttcatgataagaaaggtatagaatgcatgagagcttctggaatacttgcagctagggttcgagattacgctggcactttggttaagccaggcgtaaccactgatgaaatcgatgaagcagttcacaatatgattattgagaatggagcttatccttcgcctcttggttatggaggtttcccgaaaagtgtttgcacatctgtgaatgaatgcatttgccatggtataccagattcaagaccacttgaggatggggatattatcaacatcgatgtcacagtttatttgaatggttatcatggtgatacttcagcaactttcttctgtggaaatgttgacgagaaggctaaaaagctagtcgaggtgacgaaagagtctctcgacaaagcaatatcaatatgtggtcccggagttgagtacaagaaaatcggcaaagtcattcatgatcttgcagataaacataaatatggagttgttcgacaatttgtaggccacggggttggcagcgtcttccacgctgatccagttgttctgcatttccggaacaatgaagctggacgtatggtcttgaatcaaaccttcaccattgaaccgatgcttacaataggaagcagaaacccgataatgtgggatgataactggaccgtggtaacagaagatgcaagcctctcggcgcaattcgagcataccattcttataaccaaagatggtgctgagattctaaccaagtgttaaaaaaatgattctgaaaaattgatcttcttggaatgaaacccaaagccttaaggtatgtaagaatcatattcttattcaaatattgttttgctcacaagcagatgcgaacagttact

SEQ ID NO: 101222 - protein, 362 aa, Arabidopsis thaliana; identical to SEQ ID NO: 30693
  peptide (1)..(362): Ceres Seq. ID no. 13607310
  misc_feature (13)..(362): Homolog of NCBI NO: 18419957 NR Description: methionyl aminopeptidase-related protein
  misc_feature (74)..(362): Homolog of NCBI NO: 25289731 NR Description: methionyl aminopeptidase-like protein [imported] -
  misc_feature (13)..(28): Homolog of NCBI NO: 25289731 NR Description: methionyl aminopeptidase-like protein [imported] -
  misc_feature (80)..(362): Homolog of NCBI NO: 38345794 NR Description: OSJNBa0085I10.11 [Oryza sativa (japonica
  misc_feature (51)..(362): Homolog of NCBI NO: 11320956 NR Description: methionine aminopeptidase-like protein
  misc_feature (51)..(362): Homolog of NCBI NO: 15222218 NR Description: methionine aminopeptidase I (MAP1) -related thaliana] >gi|25402759|pir||C86267 probable methionine
  misc_feature (87)..(360): Homolog of NCBI NO: 7939560 NR Description: methionine aminopeptidase-like protein
  misc_feature (80)..(361): Homolog of NCBI NO: 34394646 NR Description: putative methionine aminopeptidase I (MAP1)
  misc_feature (87)..(360): Homolog of NCBI NO: 15230872 NR Description: methionine aminopeptidase -related [Arabidopsis
  misc_feature (87)..(360): Homolog of NCBI NO: 11320958 NR Description: methionine aminopeptidase-like protein

SEQ ID NO: 101223 - protein, 350 aa, Arabidopsis thaliana; identical to SEQ ID NO: 30694
  peptide (1)..(350): Ceres Seq. ID no. 13607311
  misc_feature (1)..(350): Homolog of NCBI NO: 18419957 NR Description: methionyl aminopeptidase-related protein
  misc_feature (62)..(350): Homolog of NCBI NO: 25289731 NR Description: methionyl aminopeptidase-like protein [imported] -
  misc_feature (1)..(16): Homolog of NCBI NO: 25289731 NR Description: methionyl aminopeptidase-like protein [imported] -
  misc_feature (68)..(350): Homolog of NCBI NO: 38345794 NR Description: OSJNBa0085I10.11 [Oryza sativa (japonica
  misc_feature (39)..(350): Homolog of NCBI NO: 11320956 NR Description: methionine aminopeptidase-like protein
  misc_feature (39)..(350): Homolog of NCBI NO: 15222218 NR Description: methionine aminopeptidase I (MAP1) -related thaliana] >gi|25402759|pir||C86267 probable methionine
  misc_feature (75)..(348): Homolog of NCBI NO: 7939560 NR Description: methionine aminopeptidase-like protein
  misc_feature (68)..(349): Homolog of NCBI NO: 34394646 NR Description: putative methionine aminopeptidase I (MAP1)
  misc_feature (75)..(348): Homolog of NCBI NO: 15230872 NR Description: methionine aminopeptidase -related [Arabidopsis
  misc_feature (75)..(348): Homolog of NCBI NO: 11320958 NR Description: methionine aminopeptidase-like protein

SEQ ID NO: 101224 - protein, 309 aa, Arabidopsis thaliana; identical to SEQ ID NO: 30695
  peptide (1)..(309): Ceres Seq. ID no. 13607312
  misc_feature (1)..(309): Homolog of NCBI NO: 18419957 NR Description: methionyl aminopeptidase-related protein
  misc_feature (21)..(309): Homolog of NCBI NO: 25289731 NR Description: methionyl aminopeptidase-like protein [imported] -
  misc_feature (27)..(309): Homolog of NCBI NO: 38345794 NR Description: OSJNBa0085I10.11 [Oryza sativa (japonica
  misc_feature (1)..(309): Homolog of NCBI NO: 11320956 NR Description: methionine aminopeptidase-like protein
  misc_feature (1)..(309): Homolog of NCBI NO: 15222218 NR Description: methionine aminopeptidase I (MAP1) -related thaliana] >gi|25402759|pir||C86267 probable methionine
  misc_feature (34)..(307): Homolog of NCBI NO: 7939560 NR Description: methionine aminopeptidase-like protein
  misc_feature (27)..(308): Homolog of NCBI NO: 34394646 NR Description: putative methionine aminopeptidase I (MAP1)
  misc_feature (34)..(307): Homolog of NCBI NO: 15230872 NR Description: methionine aminopeptidase -related [Arabidopsis
  misc_feature (34)..(307): Homolog of NCBI NO: 11320958 NR Description: methionine aminopeptidase-like protein
  misc_feature (26)..(308): Homolog of NCBI NO: 24583427 NR Description: CG5188-PA [Drosophila melanogaster]

SEQ ID NO: 101225 - DNA, 720 bp, Arabidopsis thaliana
  misc_feature (1)..(720): Ceres Seq. ID no. 13607313
  misc_feature: MA Experiment ID: 108462 Result: Up-regulated in Transcription
  misc_feature: MA Experiment 108462 PARAMETER Experiment Name: At_Germinating_Seeds_cDNA_P Parameter: Age (day) Value: 2 vs. 0
  misc_feature: MA Experiment 108462 PARAMETER Experiment Name: At_Germinating_Seeds_cDNA_P Parameter: Tissue Value: Germinating Seeds
  misc_feature: MA Experiment ID: 108464 Result: Up-regulated in Transcription
  misc_feature: MA Experiment 108464 PARAMETER Experiment Name: At_Germinating_Seeds_cDNA_P Parameter: Age (day) Value: 4 vs. 0
  misc_feature: MA Experiment 108464 PARAMETER Experiment Name: At_Germinating_Seeds_cDNA_P Parameter: Tissue Value: Germinating Seeds
  misc_feature: MA Experiment ID: 108594 Result: Down-regulated in Transcription
  misc_feature: MA Experiment 108594 PARAMETER Experiment Name: At_Ler-rhl_Root_cDNA_P Parameter: Plant Line Value: null
  misc_feature: MA Experiment ID: 108607 Result: Up-regulated in Transcription
  misc_feature: MA Experiment 108607 PARAMETER Experiment Name: At_100uM_ABA_cDNA_P Parameter: Timepoint (hr) Value: 4
  misc_feature: MA Experiment 108607 PARAMETER Experiment Name: At_100uM_ABA_cDNA_P Parameter: Tissue Value: Aerial
  misc_feature: MA Experiment 108607 PARAMETER Experiment Name: At_100uM_ABA_cDNA_P Parameter: Treatment Value: 100uM ABA vs. No Treatment
  misc_feature: MA Experiment ID: 20000070 Result: Up-regulated in Transcription
  misc_feature: MA Experiment 20000070 PARAMETER Experiment Name: At_100uM_ABA_Mutants_cDNA_P Parameter: Plant Line Value: CS24
  misc_feature: MA Experiment 20000070 PARAMETER Experiment Name: At_100uM_ABA_Mutants_cDNA_P Parameter: Timepoint (hr) Value: 6
  misc_feature: MA Experiment 20000070 PARAMETER Experiment Name: At_100uM_ABA_Mutants_cDNA_P Parameter: Tissue Value: Aerial
  misc_feature: MA Experiment 20000070 PARAMETER Experiment Name: At_100uM_ABA_Mutants_cDNA_P Parameter: Treatment Value: 100uM ABA vs. No Treatment
  misc_feature: MA Experiment ID: 20000071 Result: Up-regulated in Transcription
  misc_feature: MA Experiment 20000071 PARAMETER Experiment Name: At_100uM_ABA_Mutants_cDNA_P Parameter: Plant Line Value: CS8104
  misc_feature: MA Experiment 20000071 PARAMETER Experiment Name: At_100uM_ABA_Mutants_cDNA_P Parameter: Timepoint (hr) Value: 6
  misc_feature: MA Experiment 20000071 PARAMETER Experiment Name: At_100uM_ABA_Mutants_cDNA_P Parameter: Tissue Value: Aerial
  misc_feature: MA Experiment 20000071 PARAMETER Experiment Name: At_100uM_ABA_Mutants_cDNA_P Parameter: Treatment Value: 100uM ABA vs. No Treatment
  misc_feature: MA Experiment ID: 20000072 Result: Up-regulated in Transcription
  misc_feature: MA Experiment 20000072 PARAMETER Experiment Name: At_100uM_ABA_Mutants_cDNA_P Parameter: Plant Line Value: CS8105
  misc_feature: MA Experiment 20000072 PARAMETER Experiment Name: At_100uM_ABA_Mutants_cDNA_P Parameter: Timepoint (hr) Value: 6
  misc_feature: MA Experiment 20000072 PARAMETER Experiment Name: At_100uM_ABA_Mutants_cDNA_P Parameter: Tissue Value: Aerial
  misc_feature: MA Experiment 20000072 PARAMETER Experiment Name: At_100uM_ABA_Mutants_cDNA_P Parameter: Treatment Value: 100uM ABA vs. No Treatment
  misc_feature: MA Experiment ID: 20000087 Result: Up-regulated in Transcription
  misc_feature: MA Experiment 20000087 PARAMETER Experiment Name: At_100uM_ABA_Mutants_cDNA_P Parameter: Plant Line Value: WS
  misc_feature: MA Experiment 20000087 PARAMETER Experiment Name: At_100uM_ABA_Mutants_cDNA_P Parameter: Timepoint (hr) Value: 6
  misc_feature: MA Experiment 20000087 PARAMETER Experiment Name: At_100uM_ABA_Mutants_cDNA_P Parameter: Tissue Value: Aerial
  misc_feature: MA Experiment 20000087 PARAMETER Experiment Name: At_100uM_ABA_Mutants_cDNA_P Parameter: Treatment Value: 100uM ABA vs. No Treatment
  misc_feature: MA Experiment ID: 20000088 Result: Up-regulated in Transcription
  misc_feature: MA Experiment 20000088 PARAMETER Experiment Name: At_100uM_ABA_Mutants_cDNA_P Parameter: Plant Line Value: Landsberg
  misc_feature: MA Experiment 20000088 PARAMETER Experiment Name: At_100uM_ABA_Mutants_cDNA_P Parameter: Timepoint (hr) Value: 6
  misc_feature: MA Experiment 20000088 PARAMETER Experiment Name: At_100uM_ABA_Mutants_cDNA_P Parameter: Tissue Value: Aerial
  misc_feature: MA Experiment 20000088 PARAMETER Experiment Name: At_100uM_ABA_Mutants_cDNA_P Parameter: Treatment Value: 100uM ABA vs. No Treatment
  misc_feature: MA Experiment ID: 20000090 Result: Up-regulated in Transcription
  misc_feature: MA Experiment ID: 20000184 Result: Down-regulated in Transcription
  misc_feature: MA Experiment 20000184 PARAMETER Experiment Name: At_Shoots__P Parameter: Age (day) Value: 7
  misc_feature: MA Experiment 20000184 PARAMETER Experiment Name: At_Shoots__P Parameter: Tissue Value: Shoots vs. Whole Plant
  misc_feature: MA Experiment ID: 20000185 Result: Up-regulated in Transcription
  misc_feature: MA Experiment 20000185 PARAMETER Experiment Name: At_Roots__P Parameter: Age (day) Value: 7 vs. 21
  misc_feature: MA Experiment 20000185 PARAMETER Experiment Name: At_Roots__P Parameter: Organism Value: A. thaliana
  misc_feature: MA Experiment 20000185 PARAMETER Experiment Name: At_Roots__P Parameter: Tissue Value: Roots vs. Whole Plant
  misc_feature: MA Experiment ID: 20000227 Result: Down-regulated in Transcription
  misc_feature: MA Experiment 20000227 PARAMETER Experiment Name: At_Root-Tips-vs-Tops_P Parameter: Tissue Value: Root Tips vs. Root Tops
  misc_feature: MA Experiment ID: 20000264 Result: Down-regulated in Transcription
  misc_feature: MA Experiment 20000264 PARAMETER Experiment Name: At_Open_Flower_P Parameter: Age (day) Value: 21
  misc_feature: MA Experiment 20000264 PARAMETER Experiment Name: At_Open_Flower_P Parameter: Plant Line Value: WS
  misc_feature: MA Experiment 20000264 PARAMETER Experiment Name: At_Open_Flower_P Parameter: Tissue Value: Open Flower vs. Whole Plant
  misc_feature: MA Experiment ID: 20000438 Result: Down-regulated in Transcription
  misc_feature: MA Experiment 20000438 PARAMETER Experiment Name: At_Shoots__P Parameter: Age (day) Value: 14
  misc_feature: MA Experiment 20000438 PARAMETER Experiment Name: At_Shoots__P Parameter: Tissue Value: Shoots vs. Whole Plant
  misc_feature: MA Experiment ID: 20000439 Result: Up-regulated in Transcription
  misc_feature: MA Experiment 20000439 PARAMETER Experiment Name: At_Roots__P Parameter: Age (day) Value: 14 vs. 21
  misc_feature: MA Experiment 20000439 PARAMETER Experiment Name: At_Roots__P Parameter: Organism Value: A. thaliana
  misc_feature: MA Experiment 20000439 PARAMETER Experiment Name: At_Roots__P Parameter: Tissue Value: Roots vs. Whole Plant
  misc_feature: MA Experiment ID: 20000453 Result: Up-regulated in Transcription
  misc_feature: MA Experiment 20000453 PARAMETER Experiment Name: At_100uM_ABA_P Parameter: Age (day) Value: 15
  misc_feature: MA Experiment 20000453 PARAMETER Experiment Name: At_100uM_ABA_P Parameter: Organism Value: A. thaliana
  misc_feature: MA Experiment 20000453 PARAMETER Experiment Name: At_100uM_ABA_P Parameter: Plant Line Value: WS
  misc_feature: MA Experiment 20000453 PARAMETER Experiment Name: At_100uM_ABA_P Parameter: Timepoint (hr) Value: 24
  misc_feature: MA Experiment 20000453 PARAMETER Experiment Name: At_100uM_ABA_P Parameter: Tissue Value: Aerial
  misc_feature: MA Experiment 20000453 PARAMETER Experiment Name: At_100uM_ABA_P Parameter: Treatment Value: 100uM ABA vs. No Treatment
  misc_feature: MA Experiment ID: 20000496 Result: Down-regulated in Transcription
  misc_feature: MA Experiment 20000496 PARAMETER Experiment Name: At_Guard_Cells_P Parameter: Harvest Date Value: 7/19/2002
  misc_feature: MA Experiment 20000496 PARAMETER Experiment Name: At_Guard_Cells_P Parameter: Organism Value: Canola
  misc_feature: MA Experiment 20000496 PARAMETER Experiment Name: At_Guard_Cells_P Parameter: Tissue Value: Guard Cells vs. Leaves
  misc_feature: MA Experiment ID: 20000527 Result: Down-regulated in Transcription
  misc_feature: MA Experiment 20000527 PARAMETER Experiment Name: At_10percent_PEG_P Parameter: Age (day) Value: 20
  misc_feature: MA Experiment 20000527 PARAMETER Experiment Name: At_10percent_PEG_P Parameter: Organism Value: A. thaliana
  misc_feature: MA Experiment 20000527 PARAMETER Experiment Name: At_10percent_PEG_P Parameter: Plant Line Value: WS
  misc_feature: MA Experiment 20000527 PARAMETER Experiment Name: At_10percent_PEG_P Parameter: Timepoint (day) Value: 20
  misc_feature: MA Experiment 20000527 PARAMETER Experiment Name: At_10percent_PEG_P Parameter: Tissue Value: Whole Plant
  misc_feature: MA Experiment 20000527 PARAMETER Experiment Name: At_10percent_PEG_P Parameter: Treatment Value: 10percent PEG vs. No Treatment
  misc_feature: MA Experiment ID: 20000709 Result: Up-regulated in Transcription
  misc_feature: MA Experiment 20000709 PARAMETER Experiment Name: At_15mM_NH4NO3_L-to-H_P Parameter: Age (hr) Value: 14
  misc_feature: MA Experiment 20000709 PARAMETER Experiment Name: At_15mM_NH4NO3_L-to-H_P Parameter: Organism Value: A. thaliana
  misc_feature: MA Experiment 20000709 PARAMETER Experiment Name: At_15mM_NH4NO3_L-to-H_P Parameter: Plant Line Value: WS
  misc_feature: MA Experiment 20000709 PARAMETER Experiment Name: At_15mM_NH4NO3_L-to-H_P Parameter: Timepoint (hr) Value: 4
  misc_feature: MA Experiment 20000709 PARAMETER Experiment Name: At_15mM_NH4NO3_L-to-H_P Parameter: Tissue Value: Aerial
  misc_feature: MA Experiment 20000709 PARAMETER Experiment Name: At_15mM_NH4NO3_L-to-H_P Parameter: Treatment Value: 15mM NH4NO3 vs. 30mM Mannitol
  misc_feature: MA Experiment ID: 20001560 Result: Down-regulated in Transcription
  misc_feature: MA Experiment 20001560 PARAMETER Experiment Name: At_Drought_Soil_Dry_P Parameter: Age (day) Value: 28
  misc_feature: MA Experiment 20001560 PARAMETER Experiment Name: At_Drought_Soil_Dry_P Parameter: Organism Value: A. thaliana
  misc_feature: MA Experiment 20001560 PARAMETER Experiment Name: At_Drought_Soil_Dry_P Parameter: Plant Line Value: WS
  misc_feature: MA Experiment 20001560 PARAMETER Experiment Name: At_Drought_Soil_Dry_P Parameter: Post Timepoint (hr) Value: None
  misc_feature: MA Experiment 20001560 PARAMETER Experiment Name: At_Drought_Soil_Dry_P Parameter: Post-Treatment Value: None
  misc_feature: MA Experiment 20001560 PARAMETER Experiment Name: At_Drought_Soil_Dry_P Parameter: Timepoint (day) Value: 14
  misc_feature: MA Experiment 20001560 PARAMETER Experiment Name: At_Drought_Soil_Dry_P Parameter: Treatment Value: Drought vs. No Drought
  misc_feature: MA Experiment ID: 20001904 Result: Up-regulated in Transcription
  misc_feature: MA Experiment 20001904 PARAMETER Experiment Name: At_Drought_Reproduction_P Parameter: Age (day) Value: 37
  misc_feature: MA Experiment 20001904 PARAMETER Experiment Name: At_Drought_Reproduction_P Parameter: Organism Value: A. thaliana
  misc_feature: MA Experiment 20001904 PARAMETER Experiment Name: At_Drought_Reproduction_P Parameter: Plant Line Value: WS
  misc_feature: MA Experiment 20001904 PARAMETER Experiment Name: At_Drought_Reproduction_P Parameter: Timepoint (day) Value: 7
  misc_feature: MA Experiment 20001904 PARAMETER Experiment Name: At_Drought_Reproduction_P Parameter: Tissue Value: Rosettes
  misc_feature: MA Experiment 20001904 PARAMETER Experiment Name: At_Drought_Reproduction_P Parameter: Treatment Value: Drought vs. No Drought
  misc_feature: MA Experiment ID: 20001905 Result: Up-regulated in Transcription
  misc_feature: MA Experiment 20001905 PARAMETER Experiment Name: At_Drought_Reproduction_P Parameter: Age (day) Value: 40
  misc_feature: MA Experiment 20001905 PARAMETER Experiment Name: At_Drought_Reproduction_P Parameter: Organism Value: A. thaliana
  misc_feature: MA Experiment 20001905 PARAMETER Experiment Name: At_Drought_Reproduction_P Parameter: Plant Line Value: WS
  misc_feature: MA Experiment 20001905 PARAMETER Experiment Name: At_Drought_Reproduction_P Parameter: Timepoint (day) Value: 10
  misc_feature: MA Experiment 20001905 PARAMETER Experiment Name: At_Drought_Reproduction_P Parameter: Tissue Value: Rosettes
  misc_feature: MA Experiment 20001905 PARAMETER Experiment Name: At_Drought_Reproduction_P Parameter: Treatment Value: Drought vs. No Drought
  misc_feature: MA Experiment ID: 20001910 Result: Up-regulated in Transcription
  misc_feature: MA Experiment 20001910 PARAMETER Experiment Name: At_Drought_Reproduction_P Parameter: Age (day) Value: 37
  misc_feature: MA Experiment 20001910 PARAMETER Experiment Name: At_Drought_Reproduction_P Parameter: Organism Value: A. thaliana
  misc_feature: MA Experiment 20001910 PARAMETER Experiment Name: At_Drought_Reproduction_P Parameter: Plant Line Value: WS
  misc_feature: MA Experiment 20001910 PARAMETER Experiment Name: At_Drought_Reproduction_P Parameter: Timepoint (day) Value: 7
  misc_feature: MA Experiment 20001910 PARAMETER Experiment Name: At_Drought_Reproduction_P Parameter: Tissue Value: Flowers
  misc_feature: MA Experiment 20001910 PARAMETER Experiment Name: At_Drought_Reproduction_P Parameter: Treatment Value: Drought vs. No Drought
agtttagattctttatccgactactttgttcatcggttttgtttttctttttgtcttccggaaggcgaattacatgtcggaagcagcacagctcagaagaggtctaaagcctaaagggaagacttatgggttgaccaatcagaagagacgagagatcagagagatctttgatcttttcgacatagacggttcaggtagcatcgatgctagcgagctcaacgttgctatgaggtctcttggatttgagatgaataatcagcaaataaacgaattgatggcagaagtagataaaaaccaaagtggagccatagatttcgacgaatttgtgcatatgatgacaaccaaattcggagaacgagactccatagacgaattgtctaaggcgtttaagatcattgaccacgacaataatgggaagatttcacctcgtgatataaagatgattgctaaagaattgggagaaaatttcacagataatgatatagaagaaatgatcgaagaagcagaccgtgacaaagatggagaagttaacttggaggagttcatgaagatgatgaagagaacctcttacggctaagtataaatcaattagtaatggttgtgaataatatttgttaatcaccttgatttataataataaagaagtttgatttgtggcttggtcgaataaaaatgtattgttgtataaaaataataatgtaattcacatccattattttg

SEQ ID NO: 101226 - protein, 167 aa, Arabidopsis thaliana
  peptide (1)..(167): Ceres Seq. ID no. 13607314
  misc_feature (63)..(91): Pfam Name: EF hand Pfam Description: EF hand
  misc_feature (1)..(167): Homolog of NCBI NO: 15234588 NR Description: caltractin (centrin), putative [Arabidopsis
  misc_feature (1)..(167): Homolog of NCBI NO: 21554823 NR Description: caltractin-like protein [Arabidopsis thaliana]
  misc_feature (1)..(166): Homolog of NCBI NO: 729051 NR Description: CALTRACTIN (CENTRIN) >gi|444342|prf||1906390A
  misc_feature (12)..(167): Homolog of NCBI NO: 15229732 NR Description: caltractin (centrin) [Arabidopsis thaliana]
  misc_feature (1)..(167): Homolog of NCBI NO: 6358509 NR Description: centrin [Nicotiana tabacum]
  misc_feature (1)..(167): Homolog of NCBI NO: 6358511 NR Description: centrin [Nicotiana tabacum]
  misc_feature (1)..(167): Homolog of NCBI NO: 34906754 NR Description: putative caltractin [Oryza sativa (japonica
  misc_feature (6)..(167): Homolog of NCBI NO: 33146874 NR Description: putative caltractin [Oryza sativa (japonica >gi|33146878|dbj|BAC79876.1| putative caltractin [Oryza sativa
  misc_feature (3)..(165): Homolog of NCBI NO: 543936 NR Description: CALTRACTIN (CENTRIN) >gi|631935|pir||S42551 - Scherffelia dubia >gi|21209|emb|CAA49153.1| caltractin
  misc_feature (1)..(165): Homolog of NCBI NO: 2920835 NR Description: centrin [Marsilea vestita]
MSEAAQLRRGLKPKGKTYGLTNQKRREIREIFDLFDIDGSGSIDASELNVAMRSLGFEMNNQQINELMAEVDKNQSGAIDFDEFVHMMTTKFGERDSIDELSKAFKIIDHDNNGKISPRDIKMIAKELGENFTDNDIEEMIEEADRDKDGEVNLEEFMKMMKRTSYG

SEQ ID NO: 101227 - protein, 116 aa, Arabidopsis thaliana
  peptide (1)..(116): Ceres Seq. ID no. 13607315
  misc_feature (12)..(40): Pfam Name: EF hand Pfam Description: EF hand
  misc_feature (1)..(116): Homolog of NCBI NO: 15234588 NR Description: caltractin (centrin), putative [Arabidopsis
  misc_feature (1)..(116): Homolog of NCBI NO: 21554823 NR Description: caltractin-like protein [Arabidopsis thaliana]
  misc_feature (1)..(115): Homolog of NCBI NO: 729051 NR Description: CALTRACTIN (CENTRIN) >gi|444342|prf||1906390A
  misc_feature (1)..(116): Homolog of NCBI NO: 15229732 NR Description: caltractin (centrin) [Arabidopsis thaliana]
  misc_feature (1)..(116): Homolog of NCBI NO: 6358509 NR Description: centrin [Nicotiana tabacum]
  misc_feature (1)..(116): Homolog of NCBI NO: 6358511 NR Description: centrin [Nicotiana tabacum]
  misc_feature (1)..(116): Homolog of NCBI NO: 34906754 NR Description: putative caltractin [Oryza sativa (japonica
  misc_feature (1)..(116): Homolog of NCBI NO: 33146874 NR Description: putative caltractin [Oryza sativa (japonica >gi|33146878|dbj|BAC79876.1| putative caltractin [Oryza sativa
  misc_feature (1)..(114): Homolog of NCBI NO: 543936 NR Description: CALTRACTIN (CENTRIN) >gi|631935|pir||S42551 - Scherffelia dubia >gi|21209|emb|CAA49153.1| caltractin
  misc_feature (1)..(114): Homolog of NCBI NO: 2920835 NR Description: centrin [Marsilea vestita]
MRSLGFEMNNQQINELMAEVDKNQSGAIDFDEFVHMMTTKFGERDSIDELSKAFKIIDHDNNGKISPRDIKMIAKELGENFTDNDIEEMIEEADRDKDGEVNLEEFMKMMKRTSYG

SEQ ID NO: 101228 - protein, 109 aa, Arabidopsis thaliana
  peptide (1)..(109): Ceres Seq. ID no. 13607316
  misc_feature (5)..(33): Pfam Name: EF hand Pfam Description: EF hand
  misc_feature (1)..(109): Homolog of NCBI NO: 15234588 NR Description: caltractin (centrin), putative [Arabidopsis
  misc_feature (1)..(109): Homolog of NCBI NO: 21554823 NR Description: caltractin-like protein [Arabidopsis thaliana]
  misc_feature (1)..(108): Homolog of NCBI NO: 729051 NR Description: CALTRACTIN (CENTRIN) >gi|444342|prf||1906390A
  misc_feature (1)..(109): Homolog of NCBI NO: 15229732 NR Description: caltractin (centrin) [Arabidopsis thaliana]
  misc_feature (1)..(109): Homolog of NCBI NO: 6358509 NR Description: centrin [Nicotiana tabacum]
  misc_feature (1)..(109): Homolog of NCBI NO: 6358511 NR Description: centrin [Nicotiana tabacum]
  misc_feature (1)..(109): Homolog of NCBI NO: 34906754 NR Description: putative caltractin [Oryza sativa (japonica
  misc_feature (1)..(109): Homolog of NCBI NO: 33146874 NR Description: putative caltractin [Oryza sativa (japonica >gi|33146878|dbj|BAC79876.1| putative caltractin [Oryza sativa
  misc_feature (1)..(107): Homolog of NCBI NO: 543936 NR Description: CALTRACTIN (CENTRIN) >gi|631935|pir||S42551 - Scherffelia dubia >gi|21209|emb|CAA49153.1| caltractin
  misc_feature (1)..(107): Homolog of NCBI NO: 2920835 NR Description: centrin [Marsilea vestita]
MNNQQINELMAEVDKNQSGAIDFDEFVHMMTTKFGERDSIDELSKAFKIIDHDNNGKISPRDIKMIAKELGENFTDNDIEEMIEEADRDKDGEVNLEEFMKMMKRTSYG

SEQ ID NO: 101229 - DNA, 1256 bp, Arabidopsis thaliana
  misc_feature (1)..(1256): Ceres Seq. ID no. 13607317
  misc_feature: MA Experiment ID: 20000269 Result: Down-regulated in Transcription
  misc_feature: MA Experiment 20000269 PARAMETER Experiment Name: At_1mM_KNO3_L-vs-H_Roots_P Parameter: Age (day) Value: 7,10,12
  misc_feature: MA Experiment 20000269 PARAMETER Experiment Name: At_1mM_KNO3_L-vs-H_Roots_P Parameter: Organism Value: A. thaliana
  misc_feature: MA Experiment 20000269 PARAMETER Experiment Name: At_1mM_KNO3_L-vs-H_Roots_P Parameter: Plant Line Value: WS
  misc_feature: MA Experiment 20000269 PARAMETER Experiment Name: At_1mM_KNO3_L-vs-H_Roots_P Parameter: Timepoint (day) Value: 7,10,12
  misc_feature: MA Experiment 20000269 PARAMETER Experiment Name: At_1mM_KNO3_L-vs-H_Roots_P Parameter: Tissue Value: Roots
  misc_feature: MA Experiment 20000269 PARAMETER Experiment Name: At_1mM_KNO3_L-vs-H_Roots_P Parameter: Treatment Value: 1mM KNO3 vs. 50mM KNO3
atgagtatcttatccacaagatggttttctgagcaggaaatagaagaaaatagcataattcaacagtttcacatgaactcaatagtgggagaggtccaagaagctcaatacatttttccacactctttcacgaccaacaatgatccctcttatgatgatttgatcgaaatgaaaccaccaaagatccttgagacaacttacatatcaccttcttctcatcttcctccaaattcaaagccccatcatattcaccgtcattcttcctcaagaattctctctttcgaagattatggttcaaatgatatggaacacgagtactctcccacctacctaaactcaatctttagcccaaaattagaggctcaagtgcaaccacaccagaagagtgatgagtttaatcgaaaagggaccaagagggctcaaccgttttcaagaaaccaatccaatgctcaggatcacataatagccgaaagaaaacgtagagagaagcttactcaaagattcgtagctctttccgctctagttcctggccttaaaaagatggacaaggcttctgtgttgggagatgcattaaagcatataaagtatctccaagaaagagtgggagagttggaggaacagaagaaagaaagaagattggaatcaatggttcttgtgaagaagtctaagctgatcttggacgataataatcaatcattctcttcttcttgtgaagatggcttctcggacttggatcttcccgagatcgaggtaagattctcggatgaagatgttctaatcaagatcctttgcgagaagcaaaagggtcatcttgccaagattatggccgagattgagaaacttcatatcttgataactaattcaagtgtattgaattttggaccaactcttgatatcaccattatagctaagaaggagagtgatttcgacatgacactcatggatgttgtaaagagcttaaggtctgctttgtcgaatttcatatgattgtattaactttcatgcttctcgtcaatttctactgtgggagatcttgttgaacacatggacgaaacataagtggtttgccatgaaaatgtttttttttttttataagtttgattggaggttttcttatctgttaattatctataattctatatataaataagattaaattagttgaaaattcacttctctttttttctctatttggttctttccccctttatgtattatattgctgtttccaaagatgtaaagcacttccgtttatg

SEQ ID NO: 101230 - protein, 328 aa, Arabidopsis thaliana
  peptide (1)..(328): Ceres Seq. ID no. 13607318
  misc_feature (149)..(198): Pfam Name: Helix-loop-helix DNA-binding domain Pfam Description: Helix-loop-helix DNA-binding domain
  misc_feature (1)..(328): Homolog of NCBI NO: 30691602 NR Description: bHLH protein family [Arabidopsis thaliana]
  misc_feature (25)..(328): Homolog of NCBI NO: 20127022 NR Description: putative bHLH transcription factor [Arabidopsis
  misc_feature (25)..(320): Homolog of NCBI NO: 7487499 NR Description: hypothetical protein T28I19.130 - Arabidopsis >gi|4490730|emb|CAB38933.1| putative protein [Arabidopsis >gi|7270768|emb|CAB80450.1| putative protein [Arabidopsis
  misc_feature (25)..(325): Homolog of NCBI NO: 30681807 NR Description: bHLH protein family [Arabidopsis thaliana]
  misc_feature (25)..(304): Homolog of NCBI NO: 25412135 NR Description: probable bHLH transcription factor [imported] - thaliana >gi|3738089|gb|AAC63586.1| putative bHLH transcription [Arabidopsis thaliana] >gi|20197757|gb|AAM15234.1| putative bHLH
MSILSTRWFSEQEIEENSIIQQFHMNSIVGEVQEAQYIFPHSFTTNNDPSYDDLIEMKPPKILETTYISPSSHLPPNSKPHHIHRHSSSRILSFEDYGSNDMEHEYSPTYLNSIFSPKLEAQVQPHQKSDEFNRKGTKRAQPFSRNQSNAQDHIIAERKRREKLTQRFVALSALVPGLKKMDKASVLGDALKHIKYLQERVGELEEQKKERRLESMVLVKKSKLILDDNNQSFSSSCEDGFSDLDLPEIEVRFSDEDVLIKILCEKQKGHLAKIMAEIEKLHILITNSSVLNFGPTLDITIIAKKESDFDMTLMDVVKSLRSALSNFI

SEQ ID NO: 101231 - protein, 304 aa, Arabidopsis thaliana; identical to SEQ ID NO: 79720
  peptide (1)..(304): Ceres Seq. ID no. 13607319
  misc_feature (125)..(174): Pfam Name: Helix-loop-helix DNA-binding domain Pfam Description: Helix-loop-helix DNA-binding domain
  misc_feature (1)..(304): Homolog of NCBI NO: 30691602 NR Description: bHLH protein family [Arabidopsis thaliana]
  misc_feature (1)..(304): Homolog of NCBI NO: 20127022 NR Description: putative bHLH transcription factor [Arabidopsis
  misc_feature (1)..(296): Homolog of NCBI NO: 7487499 NR Description: hypothetical protein T28I19.130 - Arabidopsis >gi|4490730|emb|CAB38933.1| putative protein [Arabidopsis >gi|7270768|emb|CAB80450.1| putative protein [Arabidopsis
  misc_feature (1)..(301): Homolog of NCBI NO: 30681807 NR Description: bHLH protein family [Arabidopsis thaliana]
  misc_feature (1)..(280): Homolog of NCBI NO: 25412135 NR Description: probable bHLH transcription factor [imported] - thaliana >gi|3738089|gb|AAC63586.1| putative bHLH transcription [Arabidopsis thaliana] >gi|20197757|gb|AAM15234.1| putative bHLH

SEQ ID NO: 101232 - protein, 272 aa, Arabidopsis thaliana; identical to SEQ ID NO: 79721
  peptide (1)..(272): Ceres Seq. ID no. 13607320
  misc_feature (93)..(142): Pfam Name: Helix-loop-helix DNA-binding domain Pfam Description: Helix-loop-helix DNA-binding domain
  misc_feature (1)..(272): Homolog of NCBI NO: 30691602 NR Description: bHLH protein family [Arabidopsis thaliana]
  misc_feature (1)..(272): Homolog of NCBI NO: 20127022 NR Description: putative bHLH transcription factor [Arabidopsis
  misc_feature (1)..(264): Homolog of NCBI NO: 7487499 NR Description: hypothetical protein T28I19.130 - Arabidopsis >gi|4490730|emb|CAB38933.1| putative protein [Arabidopsis >gi|7270768|emb|CAB80450.1| putative protein [Arabidopsis
  misc_feature (1)..(269): Homolog of NCBI NO: 30681807 NR Description: bHLH protein family [Arabidopsis thaliana]
  misc_feature (1)..(248): Homolog of NCBI NO: 25412135 NR Description: probable bHLH transcription factor [imported] - thaliana >gi|3738089|gb|AAC63586.1| putative bHLH transcription [Arabidopsis thaliana] >gi|20197757|gb|AAM15234.1| putative bHLH

SEQ ID NO: 101233 - DNA, 856 bp, Arabidopsis thaliana
  misc_feature (1)..(856): Ceres Seq. ID no. 13607335
  misc_feature: MA Experiment ID: 108461 Result: Up-regulated in Transcription
  misc_feature: MA Experiment 108461 PARAMETER Experiment Name: At_Germinating_Seeds_cDNA_P Parameter: Age (day) Value: 1 vs. 0
  misc_feature: MA Experiment 108461 PARAMETER Experiment Name: At_Germinating_Seeds_cDNA_P Parameter: Tissue Value: Germinating Seeds
  misc_feature: MA Experiment ID: 108462 Result: Up-regulated in Transcription
  misc_feature: MA Experiment 108462 PARAMETER Experiment Name: At_Germinating_Seeds_cDNA_P Parameter: Age (day) Value: 2 vs. 0
  misc_feature: MA Experiment 108462 PARAMETER Experiment Name: At_Germinating_Seeds_cDNA_P Parameter: Tissue Value: Germinating Seeds
  misc_feature: MA Experiment ID: 108463 Result: Up-regulated in Transcription
  misc_feature: MA Experiment 108463 PARAMETER Experiment Name: At_Germinating_Seeds_cDNA_P Parameter: Age (day) Value: 3 vs. 0
  misc_feature: MA Experiment 108463 PARAMETER Experiment Name: At_Germinating_Seeds_cDNA_P Parameter: Tissue Value: Germinating Seeds
  misc_feature: MA Experiment ID: 108464 Result: Up-regulated in Transcription
  misc_feature: MA Experiment 108464 PARAMETER Experiment Name: At_Germinating_Seeds_cDNA_P Parameter: Age (day) Value: 4 vs. 0
  misc_feature: MA Experiment 108464 PARAMETER Experiment Name: At_Germinating_Seeds_cDNA_P Parameter: Tissue Value: Germinating Seeds
  misc_feature: MA Experiment ID: 108579 Result: Up-regulated in Transcription
  misc_feature: MA Experiment 108579 PARAMETER Experiment Name: At_4deg_Cold_cDNA_P Parameter: Temperature (deg C) Value: 4 vs. 22
  misc_feature: MA Experiment 108579 PARAMETER Experiment Name: At_4deg_Cold_cDNA_P Parameter: Timepoint (hr) Value: 6
  misc_feature: MA Experiment 108579 PARAMETER Experiment Name: At_4deg_Cold_cDNA_P Parameter: Tissue Value: Aerial
  misc_feature: MA Experiment ID: 108595 Result: Down-regulated in Transcription
  misc_feature: MA Experiment 108595 PARAMETER Experiment Name: At_Ler-pi_Ovule_cDNA_P Parameter: Plant Line Value: null
  misc_feature: MA Experiment ID: 20000089 Result: Down-regulated in Transcription
  misc_feature: MA Experiment ID: 20000179 Result: Up-regulated in Transcription
  misc_feature: MA Experiment 20000179 PARAMETER Experiment Name: At_Germinating_Seeds_P Parameter: Age (hr) Value: 6 vs. 0
  misc_feature: MA Experiment 20000179 PARAMETER Experiment Name: At_Germinating_Seeds_P Parameter: Tissue Value: Germinating Seeds
  misc_feature: MA Experiment ID: 20000180 Result: Up-regulated in Transcription
  misc_feature: MA Experiment 20000180 PARAMETER Experiment Name: At_Germinating_Seeds_P Parameter: Age (hr) Value: 24 vs. 0
  misc_feature: MA Experiment 20000180 PARAMETER Experiment Name: At_Germinating_Seeds_P Parameter: Tissue Value: Germinating Seeds
  misc_feature: MA Experiment ID: 20000495 Result: Down-regulated in Transcription
  misc_feature: MA Experiment 20000495 PARAMETER Experiment Name: At_Guard_Cells_P Parameter: Harvest Date Value: 8/2/2002
  misc_feature: MA Experiment 20000495 PARAMETER Experiment Name: At_Guard_Cells_P Parameter: Organism Value: A. thaliana
  misc_feature: MA Experiment 20000495 PARAMETER Experiment Name: At_Guard_Cells_P Parameter: Tissue Value: Guard Cells vs. Leaves
  misc_feature: MA Experiment ID: 20000573 Result: Down-regulated in Transcription
  misc_feature: MA Experiment 20000573 PARAMETER Experiment Name: At_100uM_ABA_Mutants__P Parameter: Organism Value: A. thaliana
  misc_feature: MA Experiment 20000573 PARAMETER Experiment Name: At_100uM_ABA_Mutants__P Parameter: Plant Line Value: CS22 vs. Ler wt
  misc_feature: MA Experiment 20000573 PARAMETER Experiment Name: At_100uM_ABA_Mutants__P Parameter: Timepoint (hr) Value: N/A
  misc_feature: MA Experiment 20000573 PARAMETER Experiment Name: At_100uM_ABA_Mutants__P Parameter: Tissue Value: Whole Plant
  misc_feature: MA Experiment 20000573 PARAMETER Experiment Name: At_100uM_ABA_Mutants__P Parameter: Treatment Value: None
  misc_feature: MA Experiment ID: 20000574 Result: Down-regulated in Transcription
  misc_feature: MA Experiment 20000574 PARAMETER Experiment Name: At_100uM_ABA_Mutants__P Parameter: Organism Value: A. thaliana
  misc_feature: MA Experiment 20000574 PARAMETER Experiment Name: At_100uM_ABA_Mutants__P Parameter: Plant Line Value: CS23 vs. Ler wt
  misc_feature: MA Experiment 20000574 PARAMETER Experiment Name: At_100uM_ABA_Mutants__P Parameter: Timepoint (hr) Value: N/A
  misc_feature: MA Experiment 20000574 PARAMETER Experiment Name: At_100uM_ABA_Mutants__P Parameter: Tissue Value: Whole Plant
  misc_feature: MA Experiment 20000574 PARAMETER Experiment Name: At_100uM_ABA_Mutants__P Parameter: Treatment Value: None
  misc_feature: MA Experiment ID: 20001248 Result: Down-regulated in Transcription
  misc_feature: MA Experiment 20001248 PARAMETER Experiment Name: At_Far-red-induction_P Parameter: Age (day) Value: 7
  misc_feature: MA Experiment 20001248 PARAMETER Experiment Name: At_Far-red-induction_P Parameter: Light Value: Far-red vs. White
  misc_feature: MA Experiment 20001248 PARAMETER Experiment Name: At_Far-red-induction_P Parameter: Organism Value: A. thaliana
  misc_feature: MA Experiment 20001248 PARAMETER Experiment Name: At_Far-red-induction_P Parameter: Plant Line Value: Columbia
  misc_feature: MA Experiment 20001248 PARAMETER Experiment Name: At_Far-red-induction_P Parameter: Timepoint (hr) Value: 4
  misc_feature: MA Experiment 20001248 PARAMETER Experiment Name: At_Far-red-induction_P Parameter: Tissue Value: Whole Plant
  misc_feature: MA Experiment ID: 20001557 Result: Down-regulated in Transcription
  misc_feature: MA Experiment 20001557 PARAMETER Experiment Name: At_Drought_Soil_Dry_P Parameter: Age (day) Value: 27
  misc_feature: MA Experiment 20001557 PARAMETER Experiment Name: At_Drought_Soil_Dry_P Parameter: Organism Value: A. thaliana
  misc_feature: MA Experiment 20001557 PARAMETER Experiment Name: At_Drought_Soil_Dry_P Parameter: Plant Line Value: WS
  misc_feature: MA Experiment 20001557 PARAMETER Experiment Name: At_Drought_Soil_Dry_P Parameter: Post Timepoint (hr) Value: 3
  misc_feature: MA Experiment 20001557 PARAMETER Experiment Name: At_Drought_Soil_Dry_P Parameter: Post-Treatment Value: Re-Water vs. No Drought
  misc_feature: MA Experiment 20001557 PARAMETER Experiment Name: At_Drought_Soil_Dry_P Parameter: Timepoint (day) Value: 13
  misc_feature: MA Experiment 20001557 PARAMETER Experiment Name: At_Drought_Soil_Dry_P Parameter: Treatment Value: Drought vs. No Drought
  misc_feature: MA Experiment ID: 20001558 Result: Down-regulated in Transcription
  misc_feature: MA Experiment 20001558 PARAMETER Experiment Name: At_Drought_Soil_Dry_P Parameter: Age (day) Value: 27
  misc_feature: MA Experiment 20001558 PARAMETER Experiment Name: At_Drought_Soil_Dry_P Parameter: Organism Value: A. thaliana
  misc_feature: MA Experiment 20001558 PARAMETER Experiment Name: At_Drought_Soil_Dry_P Parameter: Plant Line Value: WS
  misc_feature: MA Experiment 20001558 PARAMETER Experiment Name: At_Drought_Soil_Dry_P Parameter: Post Timepoint (hr) Value: 6
  misc_feature: MA Experiment 20001558 PARAMETER Experiment Name: At_Drought_Soil_Dry_P Parameter: Post-Treatment Value: Re-Water vs. No Drought
  misc_feature: MA Experiment 20001558 PARAMETER Experiment Name: At_Drought_Soil_Dry_P Parameter: Timepoint (day) Value: 13
  misc_feature: MA Experiment 20001558 PARAMETER Experiment Name: At_Drought_Soil_Dry_P Parameter: Treatment Value: Drought vs. No Drought
  misc_feature: MA Experiment ID: 20001560 Result: Down-regulated in Transcription
  misc_feature: MA Experiment 20001560 PARAMETER Experiment Name: At_Drought_Soil_Dry_P Parameter: Age (day) Value: 28
  misc_feature: MA Experiment 20001560 PARAMETER Experiment Name: At_Drought_Soil_Dry_P Parameter: Organism Value: A. thaliana
  misc_feature: MA Experiment 20001560 PARAMETER Experiment Name: At_Drought_Soil_Dry_P Parameter: Plant Line Value: WS
  misc_feature: MA Experiment 20001560 PARAMETER Experiment Name: At_Drought_Soil_Dry_P Parameter: Post Timepoint (hr) Value: None
  misc_feature: MA Experiment 20001560 PARAMETER Experiment Name: At_Drought_Soil_Dry_P Parameter: Post-Treatment Value: None
  misc_feature: MA Experiment 20001560 PARAMETER Experiment Name: At_Drought_Soil_Dry_P Parameter: Timepoint (day) Value: 14
  misc_feature: MA Experiment 20001560 PARAMETER Experiment Name: At_Drought_Soil_Dry_P Parameter: Treatment Value: Drought vs. No Drought
  misc_feature: MA Experiment ID: 20001905 Result: Down-regulated in Transcription
  misc_feature: MA Experiment 20001905 PARAMETER Experiment Name: At_Drought_Reproduction_P Parameter: Age (day) Value: 40
  misc_feature: MA Experiment 20001905 PARAMETER Experiment Name: At_Drought_Reproduction_P Parameter: Organism Value: A. thaliana
  misc_feature: MA Experiment 20001905 PARAMETER Experiment Name: At_Drought_Reproduction_P Parameter: Plant Line Value: WS
  misc_feature: MA Experiment 20001905 PARAMETER Experiment Name: At_Drought_Reproduction_P Parameter: Timepoint (day) Value: 10
  misc_feature: MA Experiment 20001905 PARAMETER Experiment Name: At_Drought_Reproduction_P Parameter: Tissue Value: Rosettes
  misc_feature: MA Experiment 20001905 PARAMETER Experiment Name: At_Drought_Reproduction_P Parameter: Treatment Value: Drought vs. No Drought
aaattctcactttactcaaaagattcctcggatcatcagaaaatggctatggctacgcgagcgattcgataccagttaccgtcaccgagatttagagctcctagatgcgaatcatcggaaccgattaagcagattcagatccagcaacgaccaagaggtggcgatttagccgagaacgggaagatcgtgctccaaccaaggctttgcacgctgagatcttatggatctgatatggtcatcgctaaaaaggacggcggagatggtggaggaggaggatctgatgttgagttagcgtctccgttttttgagacgcttacggattacatagagagttcgaagaagagtcaggatttcgaaaccatctccggtagactcgccatgattgtatttgcggtgacggtgacggaggagattgttacggggaactcgttgtttaagaaactagatgtggaaggattgagtgaagctattggagctggtctcgccgcgatgggatgcgcggcgatgtttgcttggttaacgatttctcggaacagagtcggacggatctttacagtgagttgcaactcgttcattgactcgttggttgatcagatcgttgatggactgttctacgataccaagcctagtgattggtctgatgatctttaagttcataaatgataaataccactctcaaatgtattactattgtacactttcatctataatagtatagtatagtttgctcttcttcatggtgcttgaagatgataatgaaagtctgtaacttttgtgtctttatatatatatataaaagatatggaagttcatgtgaaacaattgagtgttgttatgggacgtagttgtatcgatt

SEQ ID NO: 101234 - protein, 216 aa, Arabidopsis thaliana; identical to SEQ ID NO: 28511
  peptide (1)..(216): Ceres Seq. ID no. 13607336
  misc_feature (15)..(216): Homolog of NCBI NO: 18399845 NR Description: stress enhanced protein 2 (SEP2); nuclear gene chloroplast product [Arabidopsis thaliana]
  misc_feature (47)..(216): Homolog of NCBI NO: 14423380 NR Description: Unknown protein [Arabidopsis thaliana]
  misc_feature (15)..(91): Homolog of NCBI NO: 38345615 NR Description: OSJNBb0003B01.7 [Oryza sativa (japonica

SEQ ID NO: 101235 - protein, 202 aa, Arabidopsis thaliana; identical to SEQ ID NO: 28512
  peptide (1)..(202): Ceres Seq. ID no. 13607337
  misc_feature (1)..(202): Homolog of NCBI NO: 18399845 NR Description: stress enhanced protein 2 (SEP2); nuclear gene chloroplast product [Arabidopsis thaliana]
  misc_feature (33)..(202): Homolog of NCBI NO: 14423380 NR Description: Unknown protein [Arabidopsis thaliana]
  misc_feature (1)..(77): Homolog of NCBI NO: 38345615 NR Description: OSJNBb0003B01.7 [Oryza sativa (japonica

SEQ ID NO: 101236 - protein, 200 aa, Arabidopsis thaliana; identical to SEQ ID NO: 28513
  peptide (1)..(200): Ceres Seq. ID no. 13607338
  misc_feature (1)..(200): Homolog of NCBI NO: 18399845 NR Description: stress enhanced protein 2 (SEP2); nuclear gene chloroplast product [Arabidopsis thaliana]
  misc_feature (31)..(200): Homolog of NCBI NO: 14423380 NR Description: Unknown protein [Arabidopsis thaliana]
  misc_feature (1)..(75): Homolog of NCBI NO: 38345615 NR Description: OSJNBb0003B01.7 [Oryza sativa (japonica

SEQ ID NO: 101237 - DNA, 735 bp, Arabidopsis thaliana
  misc_feature (1)..(735): Ceres Seq. ID no. 13607339
  misc_feature: MA Experiment ID: 20000213 Result: Up-regulated in Transcription
  misc_feature: MA Experiment 20000213 PARAMETER Experiment Name: At_4deg_Cold_P Parameter: Timepoint (hr) Value: 2
  misc_feature: MA Experiment ID: 20000437 Result: Up-regulated in Transcription
  misc_feature: MA Experiment 20000437 PARAMETER Experiment Name: At_Drought_P Parameter: Age (day) Value: 8
  misc_feature: MA Experiment 20000437 PARAMETER Experiment Name: At_Drought_P Parameter: Organism Value: A. thaliana
  misc_feature: MA Experiment 20000437 PARAMETER Experiment Name: At_Drought_P Parameter: Plant Line Value: WS
  misc_feature: MA Experiment 20000437 PARAMETER Experiment Name: At_Drought_P Parameter: Timepoint (hr) Value: 24
  misc_feature: MA Experiment 20000437 PARAMETER Experiment Name: At_Drought_P Parameter: Tissue Value: Whole Plant
  misc_feature: MA Experiment 20000437 PARAMETER Experiment Name: At_Drought_P Parameter: Treatment Value: Drought vs. No Drought
  misc_feature: MA Experiment ID: 20000438 Result: Down-regulated in Transcription
  misc_feature: MA Experiment 20000438 PARAMETER Experiment Name: At_Shoots__P Parameter: Age (day) Value: 14
  misc_feature: MA Experiment 20000438 PARAMETER Experiment Name: At_Shoots__P Parameter: Tissue Value: Shoots vs. Whole Plant
  misc_feature: MA Experiment ID: 20001451 Result: Up-regulated in Transcription
  misc_feature: MA Experiment 20001451 PARAMETER Experiment Name: At_Far-red-induction_P Parameter: Age (day) Value: 7
  misc_feature: MA Experiment 20001451 PARAMETER Experiment Name: At_Far-red-induction_P Parameter: Light Value: Far-red vs. White
  misc_feature: MA Experiment 20001451 PARAMETER Experiment Name: At_Far-red-induction_P Parameter: Organism Value: A. thaliana
  misc_feature: MA Experiment 20001451 PARAMETER Experiment Name: At_Far-red-induction_P Parameter: Plant Line Value: Columbia
  misc_feature: MA Experiment 20001451 PARAMETER Experiment Name: At_Far-red-induction_P Parameter: Timepoint (hr) Value: 24
  misc_feature: MA Experiment 20001451 PARAMETER Experiment Name: At_Far-red-induction_P Parameter: Tissue Value: Whole Plant
  misc_feature: MA Experiment ID: 20001557 Result: Up-regulated in Transcription
  misc_feature: MA Experiment 20001557 PARAMETER Experiment Name: At_Drought_Soil_Dry_P Parameter: Age (day) Value: 27
  misc_feature: MA Experiment 20001557 PARAMETER Experiment Name: At_Drought_Soil_Dry_P Parameter: Organism Value: A. thaliana
  misc_feature: MA Experiment 20001557 PARAMETER Experiment Name: At_Drought_Soil_Dry_P Parameter: Plant Line Value: WS
  misc_feature: MA Experiment 20001557 PARAMETER Experiment Name: At_Drought_Soil_Dry_P Parameter: Post Timepoint (hr) Value: 3
  misc_feature: MA Experiment 20001557 PARAMETER Experiment Name: At_Drought_Soil_Dry_P Parameter: Post-Treatment Value: Re-Water vs. No Drought
  misc_feature: MA Experiment 20001557 PARAMETER Experiment Name: At_Drought_Soil_Dry_P Parameter: Timepoint (day) Value: 13
  misc_feature: MA Experiment 20001557 PARAMETER Experiment Name: At_Drought_Soil_Dry_P Parameter: Treatment Value: Drought vs. No Drought
acacatctcactgctcactactctcactgtaatcccttagatcttcttttcaaatttcaatggcgtccggtgatgttgagtatcggtgcttcgttggaggtctagcatgggccactgatgacagagctcttgagactgccttcgctcaatacggcgacgttattgattccaagatcattaacgatcgtgagactggaagatcaaggggattcggattcgtcaccttcaaggatgagaaagccatgaaggatgcgattgagggaatgaacggacaagatctcgatggccgtagcatcactgttaacgaggctcagtcacgaggaagcggtggcggcggaggccaccgtggaggtggtggcggtggataccgcagcggcggtggtggaggttactccggtggaggtggtagctacggaggtggcggcggtagacgcgagggtggaggaggatacagcggcggcggcggcggttactcctcaagaggtggtggtggcggaagctacggtggtggaagacgtgagggaggaggaggatacggtggtggtgaaggaggaggttacggaggaagcggtggtggtggaggatggtaattcctttaattaggtttgggattaccaatgaatgttctctctctcgcttgttatgcttctacttggttttgtgtgttctctattttgttctggttctgctttagatttgatgtaacagttcgtgattaggtattttggtatctgg

SEQ ID NO: 101238 - protein, 176 aa, Arabidopsis thaliana; identical to SEQ ID NO: 76877
  peptide (1)..(176): Ceres Seq. ID no. 13607340
  misc_feature (10)..(81): Pfam Name: RNA recognition motif. (a.k.a. RRM, RBD, or RNP domain) Pfam Description: RNA recognition motif. (a.k.a. RRM, RBD, or RNP
  misc_feature (1)..(176): Homolog of NCBI NO: 15226605 NR Description: glycine-rich RNA-binding protein (AtGRP7)
  misc_feature (1)..(176): Homolog of NCBI NO: 21553354 NR Description: glycine-rich RNA binding protein 7 [Arabidopsis
  misc_feature (1)..(176): Homolog of NCBI NO: 30681492 NR Description: glycine-rich RNA-binding protein (AtGRP7)
  misc_feature (1)..(176): Homolog of NCBI NO: 1346181 NR Description: Glycine-rich RNA-binding protein GRP2A
  misc_feature (1)..(176): Homolog of NCBI NO: 1346180 NR Description: Glycine-rich RNA-binding protein GRP1A
  misc_feature (5)..(176): Homolog of NCBI NO: 15235002 NR Description: glycine-rich RNA-binding protein 8 (GRP8) (CCR1)
  misc_feature (1)..(176): Homolog of NCBI NO: 34851124 NR Description: putative glycine-rich RNA-binding protein [Prunus
  misc_feature (5)..(176): Homolog of NCBI NO: 544416 NR Description: Glycine-rich RNA-binding protein 10
  misc_feature (1)..(176): Homolog of NCBI NO: 544423 NR Description: Glycine-rich RNA-binding protein 2
  misc_feature (1)..(176): Homolog of NCBI NO: 10799202 NR Description: glycine-rich RNA-binding protein [Sorghum bicolor]

SEQ ID NO: 101239 - protein, 115 aa, Arabidopsis thaliana; identical to SEQ ID NO: 76878
  peptide (1)..(115): Ceres Seq. ID no. 13607341
  misc_feature (27)..(113): Pfam Name: Herpesvirus large structural phosphoprotein UL32 Pfam Description: Herpesvirus large structural phosphoprotein UL32
  misc_feature (1)..(115): Homolog of NCBI NO: 15226605 NR Description: glycine-rich RNA-binding protein (AtGRP7)
  misc_feature (1)..(115): Homolog of NCBI NO: 21553354 NR Description: glycine-rich RNA binding protein 7 [Arabidopsis
  misc_feature (1)..(115): Homolog of NCBI NO: 30681492 NR Description: glycine-rich RNA-binding protein (AtGRP7)
  misc_feature (1)..(115): Homolog of NCBI NO: 1346181 NR Description: Glycine-rich RNA-binding protein GRP2A
  misc_feature (1)..(115): Homolog of NCBI NO: 1346180 NR Description: Glycine-rich RNA-binding protein GRP1A
  misc_feature (1)..(115): Homolog of NCBI NO: 15235002 NR Description: glycine-rich RNA-binding protein 8 (GRP8) (CCR1)
  misc_feature (1)..(115): Homolog of NCBI NO: 34851124 NR Description: putative glycine-rich RNA-binding protein [Prunus
  misc_feature (1)..(115): Homolog of NCBI NO: 544416 NR Description: Glycine-rich RNA-binding protein 10
  misc_feature (1)..(115): Homolog of NCBI NO: 544423 NR Description: Glycine-rich RNA-binding protein 2
  misc_feature (1)..(115): Homolog of NCBI NO: 10799202 NR Description: glycine-rich RNA-binding protein [Sorghum bicolor]

SEQ ID NO: 101240 - protein, 108 aa, Arabidopsis thaliana; identical to SEQ ID NO: 76879
  peptide (1)..(108): Ceres Seq. ID no. 13607342
  misc_feature (20)..(106): Pfam Name: Herpesvirus large structural phosphoprotein UL32 Pfam Description: Herpesvirus large structural phosphoprotein UL32
  misc_feature (1)..(108): Homolog of NCBI NO: 15226605 NR Description: glycine-rich RNA-binding protein (AtGRP7)
  misc_feature (1)..(108): Homolog of NCBI NO: 21553354 NR Description: glycine-rich RNA binding protein 7 [Arabidopsis
  misc_feature (1)..(108): Homolog of NCBI NO: 30681492 NR Description: glycine-rich RNA-binding protein (AtGRP7)
  misc_feature (1)..(108): Homolog of NCBI NO: 1346181 NR Description: Glycine-rich RNA-binding protein GRP2A
  misc_feature (1)..(108): Homolog of NCBI NO: 1346180 NR Description: Glycine-rich RNA-binding protein GRP1A
  misc_feature (1)..(108): Homolog of NCBI NO: 15235002 NR Description: glycine-rich RNA-binding protein 8 (GRP8) (CCR1)
  misc_feature (1)..(108): Homolog of NCBI NO: 34851124 NR Description: putative glycine-rich RNA-binding protein [Prunus
  misc_feature (1)..(108): Homolog of NCBI NO: 544416 NR Description: Glycine-rich RNA-binding protein 10
  misc_feature (1)..(108): Homolog of NCBI NO: 544423 NR Description: Glycine-rich RNA-binding protein 2
  misc_feature (1)..(108): Homolog of NCBI NO: 10799202 NR Description: glycine-rich RNA-binding protein [Sorghum bicolor]

SEQ ID NO: 101241 - DNA, 930 bp, Arabidopsis thaliana
  misc_feature (1)..(930): Ceres Seq. ID no. 13607346
  misc_feature: MA Experiment ID: 20000227 Result: Down-regulated in Transcription
  misc_feature: MA Experiment 20000227 PARAMETER Experiment Name: At_Root-Tips-vs-Tops_P Parameter: Tissue Value: Root Tips vs. Root Tops
  misc_feature: MA Experiment ID: 20000438 Result: Down-regulated in Transcription
  misc_feature: MA Experiment 20000438 PARAMETER Experiment Name: At_Shoots__P Parameter: Age (day) Value: 14
  misc_feature: MA Experiment 20000438 PARAMETER Experiment Name: At_Shoots__P Parameter: Tissue Value: Shoots vs. Whole Plant
  misc_feature: MA Experiment ID: 20001247 Result: Down-regulated in Transcription
  misc_feature: MA Experiment 20001247 PARAMETER Experiment Name: At_Far-red-induction_P Parameter: Age (day) Value: 7
  misc_feature: MA Experiment 20001247 PARAMETER Experiment Name: At_Far-red-induction_P Parameter: Light Value: Far-red vs. White
  misc_feature: MA Experiment 20001247 PARAMETER Experiment Name: At_Far-red-induction_P Parameter: Organism Value: A. thaliana
  misc_feature: MA Experiment 20001247 PARAMETER Experiment Name: At_Far-red-induction_P Parameter: Plant Line Value: Columbia
  misc_feature: MA Experiment 20001247 PARAMETER Experiment Name: At_Far-red-induction_P Parameter: Timepoint (hr) Value: 1
  misc_feature: MA Experiment 20001247 PARAMETER Experiment Name: At_Far-red-induction_P Parameter: Tissue Value: Whole Plant
ttgagttttctcaattttttctagactcgtatcgatatggcgaatcatgaaacgatatttgatcagctaaagaagcagattccagtagatgaggaagaacctctgattttgaatcgagactcaagcgttggtctcgtcatcgttgacgttgttaatggcttctgcacaattggctccggcaatatggtttggctccaacaaagcataatgaacagatatcgaagatggtggaggaaagtgcaaagcttgctagagagttctgtgatcggaaatggccggttttggcgtttattgactctcatcatccagatattccggagagaccttatcctcctcattgtattataggaactgaagaatcagaacttgttcctgctctgaaatggcttgaaagtgaggattgtgccactcttagacgaaaggattgtattaatgggtttgtgggttcgatggagagtgatggttctaatgtttttgtggattgggttaaggaaaaacagatcaaagttgtatctgtacagacatatgtgtgtttgattttgtggctactgcactttctgcccgaaaccacggtgttctttctcctgtagaagatgtggtagtgtactcccgtggctgtgctacttttgaccttcctcttcatgttgcgaaagacatcaaaggcgctcaggctcatcctcaggagttgatgcaccatgtaggtctatatatggctaaaggaagaggagctcaggtagtctctaaaatttcttttgagacttgaaagactatatctcgtttataaacataacactcttgatatcaaatatttcagtaaattgttgagtttgcctctcttttctttcgtgtaaattgttcatgaagcttgttctctgaatttcaactcttgtgtaactgtttcagaatgacaaataatatgatgggtttctc

SEQ ID NO: 101242 - protein, 121 aa, Arabidopsis thaliana
  peptide (1)..(121): Ceres Seq. ID no. 13607347
  misc_feature (1)..(112): Pfam Name: Isochorismatase family Pfam Description: Isochorismatase family
  misc_feature (1)..(112): Homolog of NCBI NO: 18400020 NR Description: isochorismatase hydrolase family [Arabidopsis >gi|20197887|gb|AAM15300.1| expressed protein [Arabidopsis >gi|26983880|gb|AAN86192.1| unknown protein [Arabidopsis
  misc_feature (1)..(112): Homolog of NCBI NO: 21537016 NR Description: unknown [Arabidopsis thaliana]
  misc_feature (1)..(112): Homolog of NCBI NO: 15144508 NR Description: unknown [Lycopersicon esculentum]
  misc_feature (1)..(112): Homolog of NCBI NO: 23042463 NR Description: hypothetical protein [Trichodesmium erythraeum
  misc_feature (1)..(112): Homolog of NCBI NO: 25412119 NR Description: hypothetical protein At2g22570 [imported] - thaliana >gi|4314355|gb|AAD15566.1| unknown protein [Arabidopsis
MVEESAKLAREFCDRKWPVLAFIDSHHPDIPERPYPPHCIIGTEESELVPALKWLESEDCATLRRKDCINGFVGSMESDGSNVFVDWVKEKQIKVVSVQTYVCLILWLLHFLPETTVFFLL

SEQ ID NO: 101243 - protein, 103 aa, Arabidopsis thaliana
  peptide (1)..(103): Ceres Seq. ID no. 13607348
  misc_feature (1)..(50): Homolog of NCBI NO: 18400020 NR Description: isochorismatase hydrolase family [Arabidopsis >gi|20197887|gb|AAM15300.1| expressed protein [Arabidopsis >gi|26983880|gb|AAN86192.1| unknown protein [Arabidopsis
  misc_feature (1)..(50): Homolog of NCBI NO: 21537016 NR Description: unknown [Arabidopsis thaliana]
  misc_feature (5)..(50): Homolog of NCBI NO: 15144508 NR Description: unknown [Lycopersicon esculentum]
  misc_feature (1)..(48): Homolog of NCBI NO: 23042463 NR Description: hypothetical protein [Trichodesmium erythraeum
  misc_feature (1)..(64): Homolog of NCBI NO: 25412119 NR Description: hypothetical protein At2g22570 [imported] - thaliana >gi|4314355|gb|AAD15566.1| unknown protein [Arabidopsis
MANHETIFDQLKKQIPVDEEEPLILNRDSSVGLVIVDVVNGFCTIGSGNMVWLQQSIMNRYRRWWRKVQSLLESSVIGNGRFWRLLTLIIQIFRRDLILLIVL

SEQ ID NO: 101244 - DNA, 1688 bp, Arabidopsis thaliana
  misc_feature (1)..(1688): Ceres Seq. ID no. 13607362
  misc_feature: MA Experiment ID: 108576 Result: Down-regulated in Transcription
  misc_feature: MA Experiment 108576 PARAMETER Experiment Name: At_42deg_Heat_cDNA_P Parameter: Temperature (deg C) Value: 42 vs. 22
  misc_feature: MA Experiment 108576 PARAMETER Experiment Name: At_42deg_Heat_cDNA_P Parameter: Timepoint (hr) Value: 1
  misc_feature: MA Experiment 108576 PARAMETER Experiment Name: At_42deg_Heat_cDNA_P Parameter: Tissue Value: Aerial
  misc_feature: MA Experiment ID: 108668 Result: Down-regulated in Transcription
  misc_feature: MA Experiment 108668 PARAMETER Experiment Name: At_2mM_SA_cDNA_P Parameter: Plant Line Value: WS
  misc_feature: MA Experiment 108668 PARAMETER Experiment Name: At_2mM_SA_cDNA_P Parameter: Timepoint (hr) Value: 6
  misc_feature: MA Experiment 108668 PARAMETER Experiment Name: At_2mM_SA_cDNA_P Parameter: Treatment Value: 2mM SA vs. No Treatment
  misc_feature: MA Experiment ID: 20000179 Result: Up-regulated in Transcription
  misc_feature: MA Experiment 20000179 PARAMETER Experiment Name: At_Germinating_Seeds_P Parameter: Age (hr) Value: 6 vs. 0
  misc_feature: MA Experiment 20000179 PARAMETER Experiment Name: At_Germinating_Seeds_P Parameter: Tissue Value: Germinating Seeds
  misc_feature: MA Experiment ID: 20000182 Result: Down-regulated in Transcription
  misc_feature: MA Experiment 20000182 PARAMETER Experiment Name: At_2mM_SA_P Parameter: Age (day) Value: 14
  misc_feature: MA Experiment 20000182 PARAMETER Experiment Name: At_2mM_SA_P Parameter: Organism Value: A. thaliana
  misc_feature: MA Experiment 20000182 PARAMETER Experiment Name: At_2mM_SA_P Parameter: Plant Line Value: WS
  misc_feature: MA Experiment 20000182 PARAMETER Experiment Name: At_2mM_SA_P Parameter: Timepoint (hr) Value: 6
  misc_feature: MA Experiment 20000182 PARAMETER Experiment Name: At_2mM_SA_P Parameter: Tissue Value: Aerial
  misc_feature: MA Experiment 20000182 PARAMETER Experiment Name: At_2mM_SA_P Parameter: Treatment Value: 2mM SA vs. No Treatment
  misc_feature: MA Experiment ID: 20000185 Result: Down-regulated in Transcription
  misc_feature: MA Experiment 20000185 PARAMETER Experiment Name: At_Roots__P Parameter: Age (day) Value: 7 vs. 21
  misc_feature: MA Experiment 20000185 PARAMETER Experiment Name: At_Roots__P Parameter: Organism Value: A. thaliana
  misc_feature: MA Experiment 20000185 PARAMETER Experiment Name: At_Roots__P Parameter: Tissue Value: Roots vs. Whole Plant
  misc_feature: MA Experiment ID: 20000227 Result: Up-regulated in Transcription
  misc_feature: MA Experiment 20000227 PARAMETER Experiment Name: At_Root-Tips-vs-Tops_P Parameter: Tissue Value: Root Tips vs. Root Tops
  misc_feature: MA Experiment ID: 20000234 Result: Up-regulated in Transcription
  misc_feature: MA Experiment 20000234 PARAMETER Experiment Name: At_Siliques_P Parameter: Age (day) Value: 21
  misc_feature: MA Experiment 20000234 PARAMETER Experiment Name: At_Siliques_P Parameter: Organism Value: A. thaliana
  misc_feature: MA Experiment 20000234 PARAMETER Experiment Name: At_Siliques_P Parameter: Plant Line Value: WS
  misc_feature: MA Experiment 20000234 PARAMETER Experiment Name: At_Siliques_P Parameter: Tissue Value: Less Than 5mm Siliques vs. Whole Plant
  misc_feature: MA Experiment ID: 20000265 Result: Up-regulated in Transcription
  misc_feature: MA Experiment 20000265 PARAMETER Experiment Name: At_Open_Flower_P Parameter: Age (day) Value: 21
  misc_feature: MA Experiment 20000265 PARAMETER Experiment Name: At_Open_Flower_P Parameter: Plant Line Value: WS
  misc_feature: MA Experiment 20000265 PARAMETER Experiment Name: At_Open_Flower_P Parameter: Tissue Value: Closed Flower vs. Whole Plant
  misc_feature: MA Experiment ID: 20000496 Result: Up-regulated in Transcription
  misc_feature: MA Experiment 20000496 PARAMETER Experiment Name: At_Guard_Cells_P Parameter: Harvest Date Value: 7/19/2002
  misc_feature: MA Experiment 20000496 PARAMETER Experiment Name: At_Guard_Cells_P Parameter: Organism Value: Canola
  misc_feature: MA Experiment 20000496 PARAMETER Experiment Name: At_Guard_Cells_P Parameter: Tissue Value: Guard Cells vs. Leaves
  misc_feature: MA Experiment ID: 20000794 Result: Down-regulated in Transcription
  misc_feature: MA Experiment 20000794 PARAMETER Experiment Name: At_Petals_P Parameter: Age (day) Value: 23-25 days
  misc_feature: MA Experiment 20000794 PARAMETER Experiment Name: At_Petals_P Parameter: Plant Line Value: WS
  misc_feature: MA Experiment 20000794 PARAMETER Experiment Name: At_Petals_P Parameter: Tissue Value: Petals vs. Whole plant
  misc_feature: MA Experiment ID: 20001558 Result: Up-regulated in Transcription
  misc_feature: MA Experiment 20001558 PARAMETER Experiment Name: At_Drought_Soil_Dry_P Parameter: Age (day) Value: 27
  misc_feature: MA Experiment 20001558 PARAMETER Experiment Name: At_Drought_Soil_Dry_P Parameter: Organism Value: A. thaliana
  misc_feature: MA Experiment 20001558 PARAMETER Experiment Name: At_Drought_Soil_Dry_P Parameter: Plant Line Value: WS
  misc_feature: MA Experiment 20001558 PARAMETER Experiment Name: At_Drought_Soil_Dry_P Parameter: Post Timepoint (hr) Value: 6
  misc_feature: MA Experiment 20001558 PARAMETER Experiment Name: At_Drought_Soil_Dry_P Parameter: Post-Treatment Value: Re-Water vs. No Drought
  misc_feature: MA Experiment 20001558 PARAMETER Experiment Name: At_Drought_Soil_Dry_P Parameter: Timepoint (day) Value: 13
  misc_feature: MA Experiment 20001558 PARAMETER Experiment Name: At_Drought_Soil_Dry_P Parameter: Treatment Value: Drought vs. No Drought
  misc_feature: MA Experiment ID: 20001560 Result: Up-regulated in Transcription
  misc_feature: MA Experiment 20001560 PARAMETER Experiment Name: At_Drought_Soil_Dry_P Parameter: Age (day) Value: 28
  misc_feature: MA Experiment 20001560 PARAMETER Experiment Name: At_Drought_Soil_Dry_P Parameter: Organism Value: A. thaliana
  misc_feature: MA Experiment 20001560 PARAMETER Experiment Name: At_Drought_Soil_Dry_P Parameter: Plant Line Value: WS
  misc_feature: MA Experiment 20001560 PARAMETER Experiment Name: At_Drought_Soil_Dry_P Parameter: Post Timepoint (hr) Value: None
  misc_feature: MA Experiment 20001560 PARAMETER Experiment Name: At_Drought_Soil_Dry_P Parameter: Post-Treatment Value: None
  misc_feature: MA Experiment 20001560 PARAMETER Experiment Name: At_Drought_Soil_Dry_P Parameter: Timepoint (day) Value: 14
  misc_feature: MA Experiment 20001560 PARAMETER Experiment Name: At_Drought_Soil_Dry_P Parameter: Treatment Value: Drought vs. No Drought
  misc_feature: MA Experiment ID: 20001904 Result: Down-regulated in Transcription
  misc_feature: MA Experiment 20001904 PARAMETER Experiment Name: At_Drought_Reproduction_P Parameter: Age (day) Value: 37
  misc_feature: MA Experiment 20001904 PARAMETER Experiment Name: At_Drought_Reproduction_P Parameter: Organism Value: A. thaliana
  misc_feature: MA Experiment 20001904 PARAMETER Experiment Name: At_Drought_Reproduction_P Parameter: Plant Line Value: WS
  misc_feature: MA Experiment 20001904 PARAMETER Experiment Name: At_Drought_Reproduction_P Parameter: Timepoint (day) Value: 7
  misc_feature: MA Experiment 20001904 PARAMETER Experiment Name: At_Drought_Reproduction_P Parameter: Tissue Value: Rosettes
  misc_feature: MA Experiment 20001904 PARAMETER Experiment Name: At_Drought_Reproduction_P Parameter: Treatment Value: Drought vs. No Drought
  misc_feature: MA Experiment ID: 20001911 Result: Down-regulated in Transcription
  misc_feature: MA Experiment 20001911 PARAMETER Experiment Name: At_Drought_Reproduction_P Parameter: Age (day) Value: 40
  misc_feature: MA Experiment 20001911 PARAMETER Experiment Name: At_Drought_Reproduction_P Parameter: Organism Value: A. thaliana
  misc_feature: MA Experiment 20001911 PARAMETER Experiment Name: At_Drought_Reproduction_P Parameter: Plant Line Value: WS
  misc_feature: MA Experiment 20001911 PARAMETER Experiment Name: At_Drought_Reproduction_P Parameter: Timepoint (day) Value: 10
  misc_feature: MA Experiment 20001911 PARAMETER Experiment Name: At_Drought_Reproduction_P Parameter: Tissue Value: Flowers
  misc_feature: MA Experiment 20001911 PARAMETER Experiment Name: At_Drought_Reproduction_P Parameter: Treatment Value: Drought vs. No Drought
aacaccactctctctttctctgtgtctccttcaaatcttcatctctctctccatctctcttctccacaagaagctgagtatggatctcctcacaccactcatcttcctcctcctcctcctctcaccattttcactctcagatgctggttccatcggagtaaactacggccgaatctccgacgaactcccctccgcattcaaagtagtccaactactaaaatcccaaggaatcacgcgagtcaaaatcttcgacgcagacccatcagttctcaaagcattatccggatctggaatcaaagtcaccgtagatctccccaacgagttactcttctccgccgccaaaagaacttccttcgccgtctcatgggtcaaacgcaacgtagcagcttatcatccttcaacacagatcgaatcaatagctgttggtaacgaagtcttcgttgatacacacaacactacaagcttcttgatccctgcaatgagaaacattcacaaagctcttatgagtttcaatctccactccgacattaaaatctcttctcctcttgctttaagcgctcttcaaaactcttacccttcttcctccggttctttccgaccagaacttattgactctgttatcaaaccaatgcttgacttcttacgtgaaactggttcaagacttatgatcaatgtctatcctttctttgcttatgaaggaaactctgacgtcattcctttagattatgctttgcttagagagaatccaggaatggttgattctggtaatggtttgagatactttaatctcttcgacgctcaaatcgacgccgttttcgcagcaatgtcggctttaaagtacgatgatatcgaaatcattgtcacggaaactggttggccgtcgaaaggagatgagaatgaagtcggagctactctagctaacgcagcttcttacaacggaaacttaatccgtcggatcttgacacgtggaggtacaccgttacgtcctaaagcagatctaacggtctatcttttcgctctgttcaacgagaacaagaagttaggtccaacgtcggagagaaactatggtctcttcttccctgatgagaagaaagtctacgacattcctttcacaacagaggggttgaaacattaccgtgacggtggtcatactccggtcactggaggagatcaggttacaaagcctccgatgagtggaggcgtgtcgaagagtttgaatggttatacttggtgtgtagctaatggtgatgctggtgaagaaaggttacaaggtggtttagattatgcttgtggtgaaggtggtgctgattgtcgtcctattcaacctggtgctaactgttatagtcctgatacacttgaggctcacgcttcgtttgctttcaatagttattaccagaagaagggtcgtgccggtgggagttgttacttcggcggcgccgcttacgtcgttagccaaccaccgaagtatggaagatgcgagtttccgacaggatattaaggaagaagaagatttaagtttagattaatttctgctatataatatattcgttttttgatgtattttgtttggtgggaagttttagttaatttttgtaacaatgactttttaatgttgtgttgttaataccaacttagacgatgttattgatatttgatatttaggtaatgaaattaaatatgtttgtttc

SEQ ID NO: 101245 - protein, 498 aa, Arabidopsis thaliana
  peptide (1)..(498): Ceres Seq. ID no. 13607363
  misc_feature (51)..(370): Pfam Name: Glycosyl hydrolases family 17 Pfam Description: Glycosyl hydrolases family 17
  misc_feature (27)..(498): Homolog of NCBI NO: 30678225 NR Description: glycosyl hydrolase family 17 [Arabidopsis
  misc_feature (27)..(489): Homolog of NCBI NO: 25316444 NR Description: probable beta-1,3-glucanase [imported] -
  misc_feature (25)..(498): Homolog of NCBI NO: 18423719 NR Description: glycosyl hydrolase family 17 [Arabidopsis
  misc_feature (25)..(498): Homolog of NCBI NO: 18700155 NR Description: AT5g55180/MCO15_13 [Arabidopsis thaliana]
  misc_feature (25)..(498): Homolog of NCBI NO: 21594590 NR Description: beta-1,3-glucanase-like protein [Arabidopsis
  misc_feature (36)..(498): Homolog of NCBI NO: 11071974 NR Description: elicitor inducible beta-1,3-glucanase Nt-SubE76
  misc_feature (25)..(489): Homolog of NCBI NO: 9758115 NR Description: beta-1,3-glucanase-like protein [Arabidopsis
  misc_feature (38)..(488): Homolog of NCBI NO: 15236882 NR Description: glycosyl hydrolase family 17 [Arabidopsis
  misc_feature (33)..(377): Homolog of NCBI NO: 27529826 NR Description: beta-1,3-glucanase-like protein [Nicotiana
  misc_feature (23)..(374): Homolog of NCBI NO: 11279331 NR Description: beta-1,3-glucanase (EC 3.2.1.-) precursor
TPLSLSLCLLQIFISLSISLLHKKLSMDLLTPLIFLLLLLSPFSLSDAGSIGVNYGRISDELPSAFKVVQLLKSQGITRVKIFDADPSVLKALSGSGIKVTVDLPNELLFSAAKRTSFAVSWVKRNVAAYHPSTQIESIAVGNEVFVDTHNTTSFLIPAMRNIHKALMSFNLHSDIKISSPLALSALQNSYPSSSGSFRPELIDSVIKPMLDFLRETGSRLMINVYPFFAYEGNSDVIPLDYALLRENPGMVDSGNGLRYFNLFDAQIDAVFAAMSALKYDDIEIIVTETGWPSKGDENEVGATLANAASYNGNLIRRILTRGGTPLRPKADLTVYLFALFNENKKLGPTSERNYGLFFPDEKKVYDIPFTTEGLKHYRDGGHTPVTGGDQVTKPPMSGGVSKSLNGYTWCVANGDAGEERLQGGLDYACGEGGADCRPIQPGANCYSPDTLEAHASFAFNSYYQKKGRAGGSCYFGGAAYVVSQPPKYGRCEFPTGY

SEQ ID NO: 101246 - protein, 472 aa, Arabidopsis thaliana
  peptide (1)..(472): Ceres Seq. ID no. 13607364
  misc_feature (25)..(344): Pfam Name: Glycosyl hydrolases family 17 Pfam Description: Glycosyl hydrolases family 17
  misc_feature (1)..(472): Homolog of NCBI NO: 30678225 NR Description: glycosyl hydrolase family 17 [Arabidopsis
  misc_feature (1)..(463): Homolog of NCBI NO: 25316444 NR Description: probable beta-1,3-glucanase [imported] -
  misc_feature (1)..(472): Homolog of NCBI NO: 18423719 NR Description: glycosyl hydrolase family 17 [Arabidopsis
  misc_feature (1)..(472): Homolog of NCBI NO: 18700155 NR Description: AT5g55180/MCO15_13 [Arabidopsis thaliana]
  misc_feature (1)..(472): Homolog of NCBI NO: 21594590 NR Description: beta-1,3-glucanase-like protein [Arabidopsis
  misc_feature (10)..(472): Homolog of NCBI NO: 11071974 NR Description: elicitor inducible beta-1,3-glucanase Nt-SubE76
  misc_feature (1)..(463): Homolog of NCBI NO: 9758115 NR Description: beta-1,3-glucanase-like protein [Arabidopsis
  misc_feature (12)..(462): Homolog of NCBI NO: 15236882 NR Description: glycosyl hydrolase family 17 [Arabidopsis
  misc_feature (7)..(351): Homolog of NCBI NO: 27529826 NR Description: beta-1,3-glucanase-like protein [Nicotiana
  misc_feature (1)..(348): Homolog of NCBI NO: 11279331 NR Description: beta-1,3-glucanase (EC 3.2.1.-) precursor
MDLLTPLIFLLLLLSPFSLSDAGSIGVNYGRISDELPSAFKVVQLLKSQGITRVKIFDADPSVLKALSGSGIKVTVDLPNELLFSAAKRTSFAVSWVKRNVAAYHPSTQIESIAVGNEVFVDTHNTTSFLIPAMRNIHKALMSFNLHSDIKISSPLALSALQNSYPSSSGSFRPELIDSVIKPMLDFLRETGSRLMINVYPFFAYEGNSDVIPLDYALLRENPGMVDSGNGLRYFNLFDAQIDAVFAAMSALKYDDIEIIVTETGWPSKGDENEVGATLANAASYNGNLIRRILTRGGTPLRPKADLTVYLFALFNENKKLGPTSERNYGLFFPDEKKVYDIPFTTEGLKHYRDGGHTPVTGGDQVTKPPMSGGVSKSLNGYTWCVANGDAGEERLQGGLDYACGEGGADCRPIQPGANCYSPDTLEAHASFAFNSYYQKKGRAGGSCYFGGAAYVVSQPPKYGRCEFPTGY

SEQ ID NO: 101247 - protein, 339 aa, Arabidopsis thaliana
  peptide (1)..(339): Ceres Seq. ID no. 13607365
  misc_feature (1)..(211): Pfam Name: Glycosyl hydrolases family 17 Pfam Description: Glycosyl hydrolases family 17
  misc_feature (1)..(339): Homolog of NCBI NO: 30678225 NR Description: glycosyl hydrolase family 17 [Arabidopsis
  misc_feature (1)..(330): Homolog of NCBI NO: 25316444 NR Description: probable beta-1,3-glucanase [imported] -
  misc_feature (1)..(339): Homolog of NCBI NO: 18423719 NR Description: glycosyl hydrolase family 17 [Arabidopsis
  misc_feature (1)..(339): Homolog of NCBI NO: 18700155 NR Description: AT5g55180/MCO15_13 [Arabidopsis thaliana]
  misc_feature (1)..(339): Homolog of NCBI NO: 21594590 NR Description: beta-1,3-glucanase-like protein [Arabidopsis
  misc_feature (1)..(339): Homolog of NCBI NO: 11071974 NR Description: elicitor inducible beta-1,3-glucanase Nt-SubE76
  misc_feature (1)..(330): Homolog of NCBI NO: 9758115 NR Description: beta-1,3-glucanase-like protein [Arabidopsis
  misc_feature (1)..(329): Homolog of NCBI NO: 15236882 NR Description: glycosyl hydrolase family 17 [Arabidopsis
  misc_feature (1)..(218): Homolog of NCBI NO: 27529826 NR Description: beta-1,3-glucanase-like protein [Nicotiana
  misc_feature (1)..(215): Homolog of NCBI NO: 11279331 NR Description: beta-1,3-glucanase (EC 3.2.1.-) precursor
MRNIHKALMSFNLHSDIKISSPLALSALQNSYPSSSGSFRPELIDSVIKPMLDFLRETGSRLMINVYPFFAYEGNSDVIPLDYALLRENPGMVDSGNGLRYFNLFDAQIDAVFAAMSALKYDDIEIIVTETGWPSKGDENEVGATLANAASYNGNLIRRILTRGGTPLRPKADLTVYLFALFNENKKLGPTSERNYGLFFPDEKKVYDIPFTTEGLKHYRDGGHTPVTGGDQVTKPPMSGGVSKSLNGYTWCVANGDAGEERLQGGLDYACGEGGADCRPIQPGANCYSPDTLEAHASFAFNSYYQKKGRAGGSCYFGGAAYVVSQPPKYGRCEFPTGY

SEQ ID NO: 101248 - DNA, 1597 bp, Arabidopsis thaliana
  misc_feature (1)..(1597): Ceres Seq. ID no. 13607368
  misc_feature: MA Experiment ID: 20000179 Result: Up-regulated in Transcription
  misc_feature: MA Experiment 20000179 PARAMETER Experiment Name: At_Germinating_Seeds_P Parameter: Age (hr) Value: 6 vs. 0
  misc_feature: MA Experiment 20000179 PARAMETER Experiment Name: At_Germinating_Seeds_P Parameter: Tissue Value: Germinating Seeds
  misc_feature: MA Experiment ID: 20000180 Result: Up-regulated in Transcription
  misc_feature: MA Experiment 20000180 PARAMETER Experiment Name: At_Germinating_Seeds_P Parameter: Age (hr) Value: 24 vs. 0
  misc_feature: MA Experiment 20000180 PARAMETER Experiment Name: At_Germinating_Seeds_P Parameter: Tissue Value: Germinating Seeds
  misc_feature: MA Experiment ID: 20000184 Result: Up-regulated in Transcription
  misc_feature: MA Experiment 20000184 PARAMETER Experiment Name: At_Shoots__P Parameter: Age (day) Value: 7
  misc_feature: MA Experiment 20000184 PARAMETER Experiment Name: At_Shoots__P Parameter: Tissue Value: Shoots vs. Whole Plant
  misc_feature: MA Experiment ID: 20000265 Result: Up-regulated in Transcription
  misc_feature: MA Experiment 20000265 PARAMETER Experiment Name: At_Open_Flower_P Parameter: Age (day) Value: 21
  misc_feature: MA Experiment 20000265 PARAMETER Experiment Name: At_Open_Flower_P Parameter: Plant Line Value: WS
  misc_feature: MA Experiment 20000265 PARAMETER Experiment Name: At_Open_Flower_P Parameter: Tissue Value: Closed Flower vs. Whole Plant
  misc_feature: MA Experiment ID: 20000437 Result: Down-regulated in Transcription
  misc_feature: MA Experiment 20000437 PARAMETER Experiment Name: At_Drought_P Parameter: Age (day) Value: 8
  misc_feature: MA Experiment 20000437 PARAMETER Experiment Name: At_Drought_P Parameter: Organism Value: A. thaliana
  misc_feature: MA Experiment 20000437 PARAMETER Experiment Name: At_Drought_P Parameter: Plant Line Value: WS
  misc_feature: MA Experiment 20000437 PARAMETER Experiment Name: At_Drought_P Parameter: Timepoint (hr) Value: 24
  misc_feature: MA Experiment 20000437 PARAMETER Experiment Name: At_Drought_P Parameter: Tissue Value: Whole Plant
  misc_feature: MA Experiment 20000437 PARAMETER Experiment Name: At_Drought_P Parameter: Treatment Value: Drought vs. No Drought
  misc_feature: MA Experiment ID: 20000438 Result: Up-regulated in Transcription
  misc_feature: MA Experiment 20000438 PARAMETER Experiment Name: At_Shoots__P Parameter: Age (day) Value: 14
  misc_feature: MA Experiment 20000438 PARAMETER Experiment Name: At_Shoots__P Parameter: Tissue Value: Shoots vs. Whole Plant
  misc_feature: MA Experiment ID: 20000794 Result: Down-regulated in Transcription
  misc_feature: MA Experiment 20000794 PARAMETER Experiment Name: At_Petals_P Parameter: Age (day) Value: 23-25 days
  misc_feature: MA Experiment 20000794 PARAMETER Experiment Name: At_Petals_P Parameter: Plant Line Value: WS
  misc_feature: MA Experiment 20000794 PARAMETER Experiment Name: At_Petals_P Parameter: Tissue Value: Petals vs. Whole plant
  misc_feature: MA Experiment ID: 20001558 Result: Up-regulated in Transcription
  misc_feature: MA Experiment 20001558 PARAMETER Experiment Name: At_Drought_Soil_Dry_P Parameter: Age (day) Value: 27
  misc_feature: MA Experiment 20001558 PARAMETER Experiment Name: At_Drought_Soil_Dry_P Parameter: Organism Value: A. thaliana
  misc_feature: MA Experiment 20001558 PARAMETER Experiment Name: At_Drought_Soil_Dry_P Parameter: Plant Line Value: WS
  misc_feature: MA Experiment 20001558 PARAMETER Experiment Name: At_Drought_Soil_Dry_P Parameter: Post Timepoint (hr) Value: 6
  misc_feature: MA Experiment 20001558 PARAMETER Experiment Name: At_Drought_Soil_Dry_P Parameter: Post-Treatment Value: Re-Water vs. No Drought
  misc_feature: MA Experiment 20001558 PARAMETER Experiment Name: At_Drought_Soil_Dry_P Parameter: Timepoint (day) Value: 13
  misc_feature: MA Experiment 20001558 PARAMETER Experiment Name: At_Drought_Soil_Dry_P Parameter: Treatment Value: Drought vs. No Drought
  misc_feature: MA Experiment ID: 20001560 Result: Up-regulated in Transcription
  misc_feature: MA Experiment 20001560 PARAMETER Experiment Name: At_Drought_Soil_Dry_P Parameter: Age (day) Value: 28
  misc_feature: MA Experiment 20001560 PARAMETER Experiment Name: At_Drought_Soil_Dry_P Parameter: Organism Value: A. thaliana
  misc_feature: MA Experiment 20001560 PARAMETER Experiment Name: At_Drought_Soil_Dry_P Parameter: Plant Line Value: WS
  misc_feature: MA Experiment 20001560 PARAMETER Experiment Name: At_Drought_Soil_Dry_P Parameter: Post Timepoint (hr) Value: None
  misc_feature: MA Experiment 20001560 PARAMETER Experiment Name: At_Drought_Soil_Dry_P Parameter: Post-Treatment Value: None
  misc_feature: MA Experiment 20001560 PARAMETER Experiment Name: At_Drought_Soil_Dry_P Parameter: Timepoint (day) Value: 14
  misc_feature: MA Experiment 20001560 PARAMETER Experiment Name: At_Drought_Soil_Dry_P Parameter: Treatment Value: Drought vs. No Drought
  misc_feature: MA Experiment ID: 20001757 Result: Up-regulated in Transcription
  misc_feature: MA Experiment 20001757 PARAMETER Experiment Name: At_50mM_NH4NO3_L-to-H_P Parameter: Timepoint (hr) Value: 6
  misc_feature: MA Experiment 20001757 PARAMETER Experiment Name: At_50mM_NH4NO3_L-to-H_P Parameter: Tissue Value: Leaf
  misc_feature: MA Experiment 20001757 PARAMETER Experiment Name: At_50mM_NH4NO3_L-to-H_P Parameter: Treatment Value: 50mM NH4NO3 vs 100mM Mannitol
  misc_feature: MA Experiment ID: 20001911 Result: Down-regulated in Transcription
  misc_feature: MA Experiment 20001911 PARAMETER Experiment Name: At_Drought_Reproduction_P Parameter: Age (day) Value: 40
  misc_feature: MA Experiment 20001911 PARAMETER Experiment Name: At_Drought_Reproduction_P Parameter: Organism Value: A. thaliana
  misc_feature: MA Experiment 20001911 PARAMETER Experiment Name: At_Drought_Reproduction_P Parameter: Plant Line Value: WS
  misc_feature: MA Experiment 20001911 PARAMETER Experiment Name: At_Drought_Reproduction_P Parameter: Timepoint (day) Value: 10
  misc_feature: MA Experiment 20001911 PARAMETER Experiment Name: At_Drought_Reproduction_P Parameter: Tissue Value: Flowers
  misc_feature: MA Experiment 20001911 PARAMETER Experiment Name: At_Drought_Reproduction_P Parameter: Treatment Value: Drought vs. No Drought
gttttgtaattgagacgaaaacttctgatatcacttaaaaacttcacagaaacaacacctcgatctcatcgaagctcctctctcttacatatcatcacttcacatcaaccaaacctacttctgtctctctctctcgctctctatctctcacgctctcacagaagaaaaaattagaaaggttgtgagaatggcggctacagcagcttcaagcttacaaattgctacacgaaggccgagcatgtcttcgcctagcaaaattcttaaagcaggaacctacattgttggtgccaatcctggaaacgcttcatgggataaactttcatgcactcgccaattatcaaaccttggatgtttgagaaaccacagtgctgttccaacttgtaagagacccttttctttttccacaagggcaatgtctgaatccagtgaaaacaaggctccttcagggcttccaattgatttgagagggaaaagagctttcattgctggtatagctgatgataatggctatggttgggccatagcaaaatctcttgctgctgctggagctgaaatattggttgggacttgggttcctgcacttaatatatttgagacaagcttgagacgtggaaaattcgaccagtcacgagtgttgcctgacgggtcattgatggagattaagaaggtttatgctttggatgctgtgtttgacaatcctgaagatgtgcctgaagatgtgaaaacgaataagcgatatgcaggatcgtcaaactggaccgtacaggaagctgctgaatgtgtgaaaaaagattttggaagcattgacattcttgtccattcccttgcaaatggcccagaggttagcaaacctcttctggagacatcaaggaaaggctatctcgctgctatctctgcttcgagttactcctttgtttccttgctgaggcattttctgccaattatgaacccaggaggtgcttcaatatctcttacttacattgcctctgaaagaatcattcctgggtatggtggaggtatgagttctgccaaagctgcactagagagtgacacacgggtgcttgcatatgaagctggaaggaaatcaaacattagggtcaacaccatctctgcgggtcctttgggaagccgagcagcaaaagccattgggttcatagacaccatgattgagtattcctacaataatgggcctattcagaaaacactgaccgcagatgaagttgggaatgcagcagccttcttggcatctccattggcctctgccataaccggtgcaaccatatatgtggacaatggtttgaatgcaatgggcgttgcactggacagcccggtgttcaaagaccttaacagcaagaattagagtcttgatcgacgactggactcgagaaattccgtgttttcgtgagcttgcttgtttctttatgagttagtatgtacggcatatgttccccatcggctgtctttttttttctttctttaagagaataaattatggttctaggttgggtcatttagcaactatatatgtagtgatggattattattcctcttatgattgaaaatttgcaagtgagaaaaactatcatgtttcttgtaa

SEQ ID NO: 101249 - protein, 390 aa, Arabidopsis thaliana
  peptide (1)..(390): Ceres Seq. ID no. 13607369
  misc_feature (279)..(371): Pfam Name: short chain dehydrogenase Pfam Description: short chain dehydrogenase
  misc_feature (1)..(390): Homolog of NCBI NO: 18396215 NR Description: enoyl-[acyl-carrier protein] reductase [NADH]
  misc_feature (1)..(390): Homolog of NCBI NO: 7141083 NR Description: enoyl-ACP reductase [Arabidopsis thaliana]
  misc_feature (1)..(390): Homolog of NCBI NO: 2204087 NR Description: enoyl-ACP reductase [Arabidopsis thaliana]
  misc_feature (1)..(386): Homolog of NCBI NO: 14422255 NR Description: enoyl-[acyl-carrier protein] reductase [Brassica
  misc_feature (1)..(386): Homolog of NCBI NO: 14422257 NR Description: enoyl-[acyl-carrier protein] reductase [Brassica
  misc_feature (1)..(386): Homolog of NCBI NO: 7488486 NR Description: probable enoyl-[acyl-carrier-protein] reductase
  misc_feature (1)..(387): Homolog of NCBI NO: 14422261 NR Description: enoyl-[acyl carrier-protein] reductase [Brassica
  misc_feature (1)..(387): Homolog of NCBI NO: 14422259 NR Description: enoyl-[acyl-carrier protein] reductase [Brassica
  misc_feature (1)..(387): Homolog of NCBI NO: 461461 NR Description: Enoyl-[acyl-carrier protein] reductase [NADH],
  misc_feature (1)..(387): Homolog of NCBI NO: 99805 NR Description: enoyl-[acyl-carrier-protein] reductase (NADH2)
MAATAASSLQIATRRPSMSSPSKILKAGTYIVGANPGNASWDKLSCTRQLSNLGCLRNHSAVPTCKRPFSFSTRAMSESSENKAPSGLPIDLRGKRAFIAGIADDNGYGWAIAKSLAAAGAEILVGTWVPALNIFETSLRRGKFDQSRVLPDGSLMEIKKVYALDAVFDNPEDVPEDVKTNKRYAGSSNWTVQEAAECVKKDFGSIDILVHSLANGPEVSKPLLETSRKGYLAAISASSYSFVSLLRHFLPIMNPGGASISLTYIASERIIPGYGGGMSSAKAALESDTRVLAYEAGRKSNIRVNTISAGPLGSRAAKAIGFIDTMIEYSYNNGPIQKTLTADEVGNAAAFLASPLASAITGATIYVDNGLNAMGVALDSPVFKDLNSKN

SEQ ID NO: 101250 - protein, 373 aa, Arabidopsis thaliana; identical to SEQ ID NO: 23380
  peptide (1)..(373): Ceres Seq. ID no. 13607370
  misc_feature (262)..(354): Pfam Name: short chain dehydrogenase Pfam Description: short chain dehydrogenase
  misc_feature (1)..(373): Homolog of NCBI NO: 18396215 NR Description: enoyl-[acyl-carrier protein] reductase [NADH]
  misc_feature (1)..(373): Homolog of NCBI NO: 7141083 NR Description: enoyl-ACP reductase [Arabidopsis thaliana]
  misc_feature (1)..(373): Homolog of NCBI NO: 2204087 NR Description: enoyl-ACP reductase [Arabidopsis thaliana]
  misc_feature (1)..(369): Homolog of NCBI NO: 14422255 NR Description: enoyl-[acyl-carrier protein] reductase [Brassica
  misc_feature (1)..(369): Homolog of NCBI NO: 14422257 NR Description: enoyl-[acyl-carrier protein] reductase [Brassica
  misc_feature (1)..(369): Homolog of NCBI NO: 7488486 NR Description: probable enoyl-[acyl-carrier-protein] reductase
  misc_feature (1)..(370): Homolog of NCBI NO: 14422261 NR Description: enoyl-[acyl carrier-protein] reductase [Brassica
  misc_feature (1)..(370): Homolog of NCBI NO: 14422259 NR Description: enoyl-[acyl-carrier protein] reductase [Brassica
  misc_feature (1)..(370): Homolog of NCBI NO: 461461 NR Description: Enoyl-[acyl-carrier protein] reductase [NADH],
  misc_feature (1)..(370): Homolog of NCBI NO: 99805 NR Description: enoyl-[acyl-carrier-protein] reductase (NADH2)

SEQ ID NO: 101251 - protein, 315 aa, Arabidopsis thaliana
  peptide (1)..(315): Ceres Seq. ID no. 13607371
  misc_feature (204)..(296): Pfam Name: short chain dehydrogenase Pfam Description: short chain dehydrogenase
  misc_feature (1)..(315): Homolog of NCBI NO: 18396215 NR Description: enoyl-[acyl-carrier protein] reductase [NADH]
  misc_feature (1)..(315): Homolog of NCBI NO: 7141083 NR Description: enoyl-ACP reductase [Arabidopsis thaliana]
  misc_feature (1)..(315): Homolog of NCBI NO: 2204087 NR Description: enoyl-ACP reductase [Arabidopsis thaliana]
  misc_feature (1)..(311): Homolog of NCBI NO: 14422255 NR Description: enoyl-[acyl-carrier protein] reductase [Brassica
  misc_feature (1)..(311): Homolog of NCBI NO: 14422257 NR Description: enoyl-[acyl-carrier protein] reductase [Brassica
  misc_feature (1)..(311): Homolog of NCBI NO: 7488486 NR Description: probable enoyl-[acyl-carrier-protein] reductase
  misc_feature (1)..(312): Homolog of NCBI NO: 14422261 NR Description: enoyl-[acyl carrier-protein] reductase [Brassica
  misc_feature (1)..(312): Homolog of NCBI NO: 14422259 NR Description: enoyl-[acyl-carrier protein] reductase [Brassica
  misc_feature (1)..(312): Homolog of NCBI NO: 461461 NR Description: Enoyl-[acyl-carrier protein] reductase [NADH],
  misc_feature (1)..(312): Homolog of NCBI NO: 99805 NR Description: enoyl-[acyl-carrier-protein] reductase (NADH2)
MSESSENKAPSGLPIDLRGKRAFIAGIADDNGYGWAIAKSLAAAGAEILVGTWVPALNIFETSLRRGKFDQSRVLPDGSLMEIKKVYALDAVFDNPEDVPEDVKTNKRYAGSSNWTVQEAAECVKKDFGSIDILVHSLANGPEVSKPLLETSRKGYLAAISASSYSFVSLLRHFLPIMNPGGASISLTYIASERIIPGYGGGMSSAKAALESDTRVLAYEAGRKSNIRVNTISAGPLGSRAAKAIGFIDTMIEYSYNNGPIQKTLTADEVGNAAAFLASPLASAITGATIYVDNGLNAMGVALDSPVFKDLNSKN

SEQ ID NO: 101252 - DNA, 1233 bp, Arabidopsis thaliana
  misc_feature (1)..(1233): Ceres Seq. ID no. 13607372
  misc_feature: MA Experiment ID: 108573 Result: Up-regulated in Transcription
  misc_feature: MA Experiment 108573 PARAMETER Experiment Name: At_Drought_cDNA_P Parameter: Timepoint (hr) Value: 6
  misc_feature: MA Experiment 108573 PARAMETER Experiment Name: At_Drought_cDNA_P Parameter: Tissue Value: Aerial
  misc_feature: MA Experiment 108573 PARAMETER Experiment Name: At_Drought_cDNA_P Parameter: Treatment Value: Drought vs. No Drought
  misc_feature: MA Experiment ID: 108579 Result: Down-regulated in Transcription
  misc_feature: MA Experiment 108579 PARAMETER Experiment Name: At_4deg_Cold_cDNA_P Parameter: Temperature (deg C) Value: 4 vs. 22
  misc_feature: MA Experiment 108579 PARAMETER Experiment Name: At_4deg_Cold_cDNA_P Parameter: Timepoint (hr) Value: 6
  misc_feature: MA Experiment 108579 PARAMETER Experiment Name: At_4deg_Cold_cDNA_P Parameter: Tissue Value: Aerial
  misc_feature: MA Experiment ID: 20000495 Result: Up-regulated in Transcription
  misc_feature: MA Experiment 20000495 PARAMETER Experiment Name: At_Guard_Cells_P Parameter: Harvest Date Value: 8/2/2002
  misc_feature: MA Experiment 20000495 PARAMETER Experiment Name: At_Guard_Cells_P Parameter: Organism Value: A. thaliana
  misc_feature: MA Experiment 20000495 PARAMETER Experiment Name: At_Guard_Cells_P Parameter: Tissue Value: Guard Cells vs. Leaves
  misc_feature: MA Experiment ID: 20000573 Result: Down-regulated in Transcription
  misc_feature: MA Experiment 20000573 PARAMETER Experiment Name: At_100uM_ABA_Mutants__P Parameter: Organism Value: A. thaliana
  misc_feature: MA Experiment 20000573 PARAMETER Experiment Name: At_100uM_ABA_Mutants__P Parameter: Plant Line Value: CS22 vs. Ler wt
  misc_feature: MA Experiment 20000573 PARAMETER Experiment Name: At_100uM_ABA_Mutants__P Parameter: Timepoint (hr) Value: N/A
  misc_feature: MA Experiment 20000573 PARAMETER Experiment Name: At_100uM_ABA_Mutants__P Parameter: Tissue Value: Whole Plant
  misc_feature: MA Experiment 20000573 PARAMETER Experiment Name: At_100uM_ABA_Mutants__P Parameter: Treatment Value: None
  misc_feature: MA Experiment ID: 20000574 Result: Down-regulated in Transcription
  misc_feature: MA Experiment 20000574 PARAMETER Experiment Name: At_100uM_ABA_Mutants__P Parameter: Organism Value: A. thaliana
  misc_feature: MA Experiment 20000574 PARAMETER Experiment Name: At_100uM_ABA_Mutants__P Parameter: Plant Line Value: CS23 vs. Ler wt
  misc_feature: MA Experiment 20000574 PARAMETER Experiment Name: At_100uM_ABA_Mutants__P Parameter: Timepoint (hr) Value: N/A
  misc_feature: MA Experiment 20000574 PARAMETER Experiment Name: At_100uM_ABA_Mutants__P Parameter: Tissue Value: Whole Plant
  misc_feature: MA Experiment 20000574 PARAMETER Experiment Name: At_100uM_ABA_Mutants__P Parameter: Treatment Value: None
  misc_feature: MA Experiment ID: 20000794 Result: Up-regulated in Transcription
  misc_feature: MA Experiment 20000794 PARAMETER Experiment Name: At_Petals_P Parameter: Age (day) Value: 23-25 days
  misc_feature: MA Experiment 20000794 PARAMETER Experiment Name: At_Petals_P Parameter: Plant Line Value: WS
  misc_feature: MA Experiment 20000794 PARAMETER Experiment Name: At_Petals_P Parameter: Tissue Value: Petals vs. Whole plant
  misc_feature: MA Experiment ID: 20001911 Result: Up-regulated in Transcription
  misc_feature: MA Experiment 20001911 PARAMETER Experiment Name: At_Drought_Reproduction_P Parameter: Age (day) Value: 40
  misc_feature: MA Experiment 20001911 PARAMETER Experiment Name: At_Drought_Reproduction_P Parameter: Organism Value: A. thaliana
  misc_feature: MA Experiment 20001911 PARAMETER Experiment Name: At_Drought_Reproduction_P Parameter: Plant Line Value: WS
  misc_feature: MA Experiment 20001911 PARAMETER Experiment Name: At_Drought_Reproduction_P Parameter: Timepoint (day) Value: 10
  misc_feature: MA Experiment 20001911 PARAMETER Experiment Name: At_Drought_Reproduction_P Parameter: Tissue Value: Flowers
  misc_feature: MA Experiment 20001911 PARAMETER Experiment Name: At_Drought_Reproduction_P Parameter: Treatment Value: Drought vs. No Drought
aattactttagagatttcccaaattccgtctcgaagatgtcaacggagagacgtgcttcgtcgaatccaatgaccaacgaagagaacgctatgttccttgatatattgcatgaagcaccattatttggtcacaggaaatctagaagccttgttggaagttacctctatatgcttctattggcaggttatgctattttagctgctggtgctccttggatgtttcaccgagtccaacagttgaccccttcattgctctgctgctgcgatgttgcgcttttggttgtcacaggtgtctttcaacaatactttgtttatcaagtccagaaaatacgtctccagggttattacagtttcagtcaaaagttgaagcatgttgttcgtctgccatttgcaatcgctgcatatgggactgctgcaatgcttcttgtgatagtgtggaggcctcaaatccacattctttctatttcttctttgcaacggatcatcatgttggttgaagcagtgggcgctggctttttcatgggtttatacatcggttatgtgcaccaatacaattccgtgaattcccggccagatgtcttgaagtcattatattctcctcttcagccgtcaagttctatggaaggtttgaggtattatgaaggccggctttctgatcaacaaacggctttgttacaatatcaacgcgaaaatctccattttctaagcgaggagattctgtgcttgcaagagaaacttagcaaatatgaacaatctgatgatggaagcacacctcaggttgatctcgcacatcttttagctgctcgagatcaagagctgaggacactttcagctgagatgaatcagcttcagtctgagctacggcttgctcgttctttaatagccgagagagatgcagaggtgcagcgtgtcaacagtaccaacaaccagtatatcgaagaaaacgaaagactgagggcaattttgagtgaatggagcatgcgggcagcgaatcttgagagagctttggaagtggaacggatgtcgaactcagaactacagaaggaagtagcaagcacgcgtagaaagcagatgcttgagacaacaacgtctgagcaaccttaattctaatatgggaatcaaagcttatataggtttttaacataatctctaaagtttgatggtgtaactataaagatcatggaatgtgtctacggaaagaagtttgtgtagtaaacggctcttttgtttttt

SEQ ID NO: 101253 - protein, 367 aa, Arabidopsis thaliana; identical to SEQ ID NO: 36679
  peptide (1)..(367): Ceres Seq. ID no. 13607373
  misc_feature (13)..(367): Homolog of NCBI NO: 18396221 NR Description: expressed protein [Arabidopsis thaliana] Expressed protein [Arabidopsis thaliana]
  misc_feature (140)..(367): Homolog of NCBI NO: 20453094 NR Description: At2g06010/F5K7.23 [Arabidopsis thaliana]
  misc_feature (211)..(314): Homolog of NCBI NO: 25411202 NR Description: hypothetical protein At2g06010 [imported] -
  misc_feature (238)..(359): Homolog of NCBI NO: 15242018 NR Description: expressed protein [Arabidopsis thaliana]

SEQ ID NO: 101254 - protein, 355 aa, Arabidopsis thaliana; identical to SEQ ID NO: 36680
  peptide (1)..(355): Ceres Seq. ID no. 13607374
  misc_feature (1)..(355): Homolog of NCBI NO: 18396221 NR Description: expressed protein [Arabidopsis thaliana] Expressed protein [Arabidopsis thaliana]
  misc_feature (128)..(355): Homolog of NCBI NO: 20453094 NR Description: At2g06010/F5K7.23 [Arabidopsis thaliana]
  misc_feature (199)..(302): Homolog of NCBI NO: 25411202 NR Description: hypothetical protein At2g06010 [imported] -
  misc_feature (226)..(347): Homolog of NCBI NO: 15242018 NR Description: expressed protein [Arabidopsis thaliana]

SEQ ID NO: 101255 - protein, 344 aa, Arabidopsis thaliana; identical to SEQ ID NO: 36681
  peptide (1)..(344): Ceres Seq. ID no. 13607375
  misc_feature (1)..(344): Homolog of NCBI NO: 18396221 NR Description: expressed protein [Arabidopsis thaliana] Expressed protein [Arabidopsis thaliana]
  misc_feature (117)..(344): Homolog of NCBI NO: 20453094 NR Description: At2g06010/F5K7.23 [Arabidopsis thaliana]
  misc_feature (188)..(291): Homolog of NCBI NO: 25411202 NR Description: hypothetical protein At2g06010 [imported] -
  misc_feature (215)..(336): Homolog of NCBI NO: 15242018 NR Description: expressed protein [Arabidopsis thaliana]

SEQ ID NO: 101256 - DNA, 735 bp, Arabidopsis thaliana
  misc_feature (1)..(735): Ceres Seq. ID no. 13607387
  misc_feature: MA Experiment ID: 20000224 Result: Down-regulated in Transcription
attttgctctcaaatcgcgactcctctctgggctctctccttctgtatctctctaaggggaacaacgaaatcatcaccttctcttttatcgtcaccggcgatcattcaagactcgatctccggtaatcagaacattttcattcgccgacatggcgatgaccatcgaagacttgctggacttgctttcatgttttcatctagtatcctcctacagatcctggcatgcgcgatatatggtaactggtggccaatgctatcagcactcatgtatgtagtggtgcctatgccttgtatgttctttggaggaggctcaacccaattccttattagtcgggacggtggagggtggatagacgcagcgaagttcttgaccggagcatcgaccgtgggaagccttgctatcccaatcatcttaaggcacgcacagatgatcgagacaggtgcaatgctcatagagttcacatcattcttcatattcatttgcactgtcatgtgttttcaccgggctagtctcgatgatgactggtaacgtagatgttgctgctcgtgaattactaattggattcgtatgagaaagagagtgtgaagaaaagatgaggttactatgagtggttaagaaagttgtgttcttctccctctttttgtaaagctttgtatcactcaatgtttgtaaaaagttttattcatcactgtgaatcttttcctgaaactaagtgccaaaatattttgtttcgc

SEQ ID NO: 101257 - protein, 175 aa, Arabidopsis thaliana
  peptide (1)..(175): Ceres Seq. ID no. 13607388
  misc_feature (57)..(175): Homolog of NCBI NO: 12322900 NR Description: unknown protein; 72859-71336 [Arabidopsis
  misc_feature (57)..(175): Homolog of NCBI NO: 16648828 NR Description: AT3g11530/F24K9_21 [Arabidopsis thaliana] AT3g11530/F24K9_21 [Arabidopsis thaliana]
  misc_feature (63)..(175): Homolog of NCBI NO: 18399269 NR Description: expressed protein [Arabidopsis thaliana]
  misc_feature (95)..(175): Homolog of NCBI NO: 34905898 NR Description: P0458E05.25 [Oryza sativa (japonica
  misc_feature (53)..(164): Homolog of NCBI NO: 21554354 NR Description: unknown [Arabidopsis thaliana]
  misc_feature (53)..(164): Homolog of NCBI NO: 18398420 NR Description: expressed protein [Arabidopsis thaliana] expressed protein [Arabidopsis thaliana] At1g32410/F5D14_6 [Arabidopsis thaliana]
  misc_feature (53)..(164): Homolog of NCBI NO: 25518386 NR Description: hypothetical protein F5D14.18 - Arabidopsis >gi|8920616|gb|AAF81338.1|AC007767_18 Contains similarity to a protein F19I3.26 gi|7485810 from Arabidopsis thaliana ESTs
  misc_feature (55)..(166): Homolog of NCBI NO: 38103616 NR Description: hypothetical protein MG04054.4 [Magnaporthe
  misc_feature (55)..(174): Homolog of NCBI NO: 32564911 NR Description: vacuolar protein sorting 55 family member, N- myristoylated (14.1 kD) (2G487) [Caenorhabditis elegans]
  misc_feature (56)..(144): Homolog of NCBI NO: 6322504 NR Description: Vacuolar Protein Sorting; Vps55p [Saccharomyces
FCSQIATPLWALSFCISLRGTTKSSPSLLSSPAIIQDSISGNQNIFIRRHGDDHRRLAGLAFMFSSSILLQILACAIYGNWWPMLSALMYVVVPMPCMFFGGGSTQFLISRDGGGWIDAAKFLTGASTVGSLAIPIILRHAQMIETGAMLIEFTSFFIFICTVMCFHRASLDDDW

SEQ ID NO: 101258 - protein, 113 aa, Arabidopsis thaliana; identical to SEQ ID NO: 21390
  peptide (1)..(113): Ceres Seq. ID no. 13607389
  misc_feature (1)..(113): Homolog of NCBI NO: 12322900 NR Description: unknown protein; 72859-71336 [Arabidopsis
  misc_feature (1)..(113): Homolog of NCBI NO: 16648828 NR Description: AT3g11530/F24K9_21 [Arabidopsis thaliana] AT3g11530/F24K9_21 [Arabidopsis thaliana]
  misc_feature (1)..(113): Homolog of NCBI NO: 18399269 NR Description: expressed protein [Arabidopsis thaliana]
  misc_feature (33)..(113): Homolog of NCBI NO: 34905898 NR Description: P0458E05.25 [Oryza sativa (japonica
  misc_feature (1)..(102): Homolog of NCBI NO: 21554354 NR Description: unknown [Arabidopsis thaliana]
  misc_feature (1)..(102): Homolog of NCBI NO: 18398420 NR Description: expressed protein [Arabidopsis thaliana] expressed protein [Arabidopsis thaliana] At1g32410/F5D14_6 [Arabidopsis thaliana]
  misc_feature (1)..(102): Homolog of NCBI NO: 25518386 NR Description: hypothetical protein F5D14.18 - Arabidopsis >gi|8920616|gb|AAF81338.1|AC007767_18 Contains similarity to a protein F19I3.26 gi|7485810 from Arabidopsis thaliana ESTs
  misc_feature (1)..(104): Homolog of NCBI NO: 38103616 NR Description: hypothetical protein MG04054.4 [Magnaporthe
  misc_feature (1)..(112): Homolog of NCBI NO: 32564911 NR Description: vacuolar protein sorting 55 family member, N- myristoylated (14.1 kD) (2G487) [Caenorhabditis elegans]
  misc_feature (1)..(82): Homolog of NCBI NO: 6322504 NR Description: Vacuolar Protein Sorting; Vps55p [Saccharomyces

SEQ ID NO: 101259 - protein, 92 aa, Arabidopsis thaliana
  peptide (1)..(92): Ceres Seq. ID no. 13607390
  misc_feature (1)..(92): Homolog of NCBI NO: 12322900 NR Description: unknown protein; 72859-71336 [Arabidopsis
  misc_feature (1)..(92): Homolog of NCBI NO: 16648828 NR Description: AT3g11530/F24K9_21 [Arabidopsis thaliana] AT3g11530/F24K9_21 [Arabidopsis thaliana]
  misc_feature (1)..(92): Homolog of NCBI NO: 18399269 NR Description: expressed protein [Arabidopsis thaliana]
  misc_feature (12)..(92): Homolog of NCBI NO: 34905898 NR Description: P0458E05.25 [Oryza sativa (japonica
  misc_feature (1)..(81): Homolog of NCBI NO: 21554354 NR Description: unknown [Arabidopsis thaliana]
  misc_feature (1)..(81): Homolog of NCBI NO: 18398420 NR Description: expressed protein [Arabidopsis thaliana] expressed protein [Arabidopsis thaliana] At1g32410/F5D14_6 [Arabidopsis thaliana]
  misc_feature (1)..(81): Homolog of NCBI NO: 25518386 NR Description: hypothetical protein F5D14.18 - Arabidopsis >gi|8920616|gb|AAF81338.1|AC007767_18 Contains similarity to a protein F19I3.26 gi|7485810 from Arabidopsis thaliana ESTs
  misc_feature (1)..(83): Homolog of NCBI NO: 38103616 NR Description: hypothetical protein MG04054.4 [Magnaporthe
  misc_feature (1)..(91): Homolog of NCBI NO: 32564911 NR Description: vacuolar protein sorting 55 family member, N- myristoylated (14.1 kD) (2G487) [Caenorhabditis elegans]
  misc_feature (1)..(61): Homolog of NCBI NO: 6322504 NR Description: Vacuolar Protein Sorting; Vps55p [Saccharomyces
MLSALMYVVVPMPCMFFGGGSTQFLISRDGGGWIDAAKFLTGASTVGSLAIPIILRHAQMIETGAMLIEFTSFFIFICTVMCFHRASLDDDW

SEQ ID NO: 101260 - DNA, 1390 bp, Arabidopsis thaliana
  misc_feature (1)..(1390): Ceres Seq. ID no. 13607397
  misc_feature: MA Experiment ID: 108561 Result: Down-regulated in Transcription
  misc_feature: MA Experiment 108561 PARAMETER Experiment Name: At_100uM_ABA_cDNA_P Parameter: Timepoint (hr) Value: 6
  misc_feature: MA Experiment 108561 PARAMETER Experiment Name: At_100uM_ABA_cDNA_P Parameter: Tissue Value: Aerial
  misc_feature: MA Experiment 108561 PARAMETER Experiment Name: At_100uM_ABA_cDNA_P Parameter: Treatment Value: 100uM ABA vs. No Treatment
  misc_feature: MA Experiment ID: 108569 Result: Up-regulated in Transcription
  misc_feature: MA Experiment 108569 PARAMETER Experiment Name: At_0.001%_MeJA__cDNA_P Parameter: Timepoint (hr) Value: 6
  misc_feature: MA Experiment 108569 PARAMETER Experiment Name: At_0.001%_MeJA__cDNA_P Parameter: Tissue Value: Aerial
  misc_feature: MA Experiment 108569 PARAMETER Experiment Name: At_0.001%_MeJA__cDNA_P Parameter: Treatment Value: 0.001% MeJA vs. No Treatment
  misc_feature: MA Experiment ID: 108572 Result: Down-regulated in Transcription
  misc_feature: MA Experiment 108572 PARAMETER Experiment Name: At_Drought_cDNA_P Parameter: Timepoint (hr) Value: 1
  misc_feature: MA Experiment 108572 PARAMETER Experiment Name: At_Drought_cDNA_P Parameter: Tissue Value: Aerial
  misc_feature: MA Experiment 108572 PARAMETER Experiment Name: At_Drought_cDNA_P Parameter: Treatment Value: Drought vs. No Drought
  misc_feature: MA Experiment ID: 108576 Result: Down-regulated in Transcription
  misc_feature: MA Experiment 108576 PARAMETER Experiment Name: At_42deg_Heat_cDNA_P Parameter: Temperature (deg C) Value: 42 vs. 22
  misc_feature: MA Experiment 108576 PARAMETER Experiment Name: At_42deg_Heat_cDNA_P Parameter: Timepoint (hr) Value: 1
  misc_feature: MA Experiment 108576 PARAMETER Experiment Name: At_42deg_Heat_cDNA_P Parameter: Tissue Value: Aerial
  misc_feature: MA Experiment ID: 108668 Result: Down-regulated in Transcription
  misc_feature: MA Experiment 108668 PARAMETER Experiment Name: At_2mM_SA_cDNA_P Parameter: Plant Line Value: WS
  misc_feature: MA Experiment 108668 PARAMETER Experiment Name: At_2mM_SA_cDNA_P Parameter: Timepoint (hr) Value: 6
  misc_feature: MA Experiment 108668 PARAMETER Experiment Name: At_2mM_SA_cDNA_P Parameter: Treatment Value: 2mM SA vs. No Treatment
  misc_feature: MA Experiment ID: 20000169 Result: Down-regulated in Transcription
  misc_feature: MA Experiment 20000169 PARAMETER Experiment Name: At_100uM_ABA_P Parameter: Age (day) Value: 14
  misc_feature: MA Experiment 20000169 PARAMETER Experiment Name: At_100uM_ABA_P Parameter: Organism Value: A. thaliana
  misc_feature: MA Experiment 20000169 PARAMETER Experiment Name: At_100uM_ABA_P Parameter: Plant Line Value: WS
  misc_feature: MA Experiment 20000169 PARAMETER Experiment Name: At_100uM_ABA_P Parameter: Timepoint (hr) Value: 6
  misc_feature: MA Experiment 20000169 PARAMETER Experiment Name: At_100uM_ABA_P Parameter: Tissue Value: Aerial
  misc_feature: MA Experiment 20000169 PARAMETER Experiment Name: At_100uM_ABA_P Parameter: Treatment Value: 100uM ABA vs. No Treatment
  misc_feature: MA Experiment ID: 20000171 Result: Down-regulated in Transcription
  misc_feature: MA Experiment 20000171 PARAMETER Experiment Name: At_42deg_Heat_P Parameter: Age (day) Value: 14
  misc_feature: MA Experiment 20000171 PARAMETER Experiment Name: At_42deg_Heat_P Parameter: Organism Value: A. thaliana
  misc_feature: MA Experiment 20000171 PARAMETER Experiment Name: At_42deg_Heat_P Parameter: Plant Line Value: WS
  misc_feature: MA Experiment 20000171 PARAMETER Experiment Name: At_42deg_Heat_P Parameter: Temperature (deg C) Value: 42 vs. 22
  misc_feature: MA Experiment 20000171 PARAMETER Experiment Name: At_42deg_Heat_P Parameter: Timepoint (hr) Value: 1
  misc_feature: MA Experiment 20000171 PARAMETER Experiment Name: At_42deg_Heat_P Parameter: Tissue Value: Aerial
  misc_feature: MA Experiment ID: 20000173 Result: Down-regulated in Transcription
  misc_feature: MA Experiment 20000173 PARAMETER Experiment Name: At_42deg_Heat_P Parameter: Age (day) Value: 14
  misc_feature: MA Experiment 20000173 PARAMETER Experiment Name: At_42deg_Heat_P Parameter: Organism Value: A. thaliana
  misc_feature: MA Experiment 20000173 PARAMETER Experiment Name: At_42deg_Heat_P Parameter: Plant Line Value: WS
  misc_feature: MA Experiment 20000173 PARAMETER Experiment Name: At_42deg_Heat_P Parameter: Temperature (deg C) Value: 42 vs. 22
  misc_feature: MA Experiment 20000173 PARAMETER Experiment Name: At_42deg_Heat_P Parameter: Timepoint (hr) Value: 6
  misc_feature: MA Experiment 20000173 PARAMETER Experiment Name: At_42deg_Heat_P Parameter: Tissue Value: Aerial
  misc_feature: MA Experiment ID: 20000180 Result: Up-regulated in Transcription
  misc_feature: MA Experiment 20000180 PARAMETER Experiment Name: At_Germinating_Seeds_P Parameter: Age (hr) Value: 24 vs. 0
  misc_feature: MA Experiment 20000180 PARAMETER Experiment Name: At_Germinating_Seeds_P Parameter: Tissue Value: Germinating Seeds
  misc_feature: MA Experiment ID: 20000182 Result: Down-regulated in Transcription
  misc_feature: MA Experiment 20000182 PARAMETER Experiment Name: At_2mM_SA_P Parameter: Age (day) Value: 14
  misc_feature: MA Experiment 20000182 PARAMETER Experiment Name: At_2mM_SA_P Parameter: Organism Value: A. thaliana
  misc_feature: MA Experiment 20000182 PARAMETER Experiment Name: At_2mM_SA_P Parameter: Plant Line Value: WS
  misc_feature: MA Experiment 20000182 PARAMETER Experiment Name: At_2mM_SA_P Parameter: Timepoint (hr) Value: 6
  misc_feature: MA Experiment 20000182 PARAMETER Experiment Name: At_2mM_SA_P Parameter: Tissue Value: Aerial
  misc_feature: MA Experiment 20000182 PARAMETER Experiment Name: At_2mM_SA_P Parameter: Treatment Value: 2mM SA vs. No Treatment
  misc_feature: MA Experiment ID: 20000184 Result: Up-regulated in Transcription
  misc_feature: MA Experiment 20000184 PARAMETER Experiment Name: At_Shoots__P Parameter: Age (day) Value: 7
  misc_feature: MA Experiment 20000184 PARAMETER Experiment Name: At_Shoots__P Parameter: Tissue Value: Shoots vs. Whole Plant
  misc_feature: MA Experiment ID: 20000227 Result: Up-regulated in Transcription
  misc_feature: MA Experiment 20000227 PARAMETER Experiment Name: At_Root-Tips-vs-Tops_P Parameter: Tissue Value: Root Tips vs. Root Tops
  misc_feature: MA Experiment ID: 20000234 Result: Up-regulated in Transcription
  misc_feature: MA Experiment 20000234 PARAMETER Experiment Name: At_Siliques_P Parameter: Age (day) Value: 21
  misc_feature: MA Experiment 20000234 PARAMETER Experiment Name: At_Siliques_P Parameter: Organism Value: A. thaliana
  misc_feature: MA Experiment 20000234 PARAMETER Experiment Name: At_Siliques_P Parameter: Plant Line Value: WS
  misc_feature: MA Experiment 20000234 PARAMETER Experiment Name: At_Siliques_P Parameter: Tissue Value: Less Than 5mm Siliques vs. Whole Plant
  misc_feature: MA Experiment ID: 20000264 Result: Up-regulated in Transcription
  misc_feature: MA Experiment 20000264 PARAMETER Experiment Name: At_Open_Flower_P Parameter: Age (day) Value: 21
  misc_feature: MA Experiment 20000264 PARAMETER Experiment Name: At_Open_Flower_P Parameter: Plant Line Value: WS
  misc_feature: MA Experiment 20000264 PARAMETER Experiment Name: At_Open_Flower_P Parameter: Tissue Value: Open Flower vs. Whole Plant
  misc_feature: MA Experiment ID: 20000265 Result: Up-regulated in Transcription
  misc_feature: MA Experiment 20000265 PARAMETER Experiment Name: At_Open_Flower_P Parameter: Age (day) Value: 21
  misc_feature: MA Experiment 20000265 PARAMETER Experiment Name: At_Open_Flower_P Parameter: Plant Line Value: WS
  misc_feature: MA Experiment 20000265 PARAMETER Experiment Name: At_Open_Flower_P Parameter: Tissue Value: Closed Flower vs. Whole Plant
  misc_feature: MA Experiment ID: 20000267 Result: Down-regulated in Transcription
  misc_feature: MA Experiment 20000267 PARAMETER Experiment Name: At_Drought_P Parameter: Age (day) Value: 7
  misc_feature: MA Experiment 20000267 PARAMETER Experiment Name: At_Drought_P Parameter: Organism Value: A. thaliana
  misc_feature: MA Experiment 20000267 PARAMETER Experiment Name: At_Drought_P Parameter: Plant Line Value: WS
  misc_feature: MA Experiment 20000267 PARAMETER Experiment Name: At_Drought_P Parameter: Timepoint (hr) Value: 6
  misc_feature: MA Experiment 20000267 PARAMETER Experiment Name: At_Drought_P Parameter: Tissue Value: Whole Plant
  misc_feature: MA Experiment 20000267 PARAMETER Experiment Name: At_Drought_P Parameter: Treatment Value: Drought vs. No Drought
  misc_feature: MA Experiment ID: 20000286 Result: Up-regulated in Transcription
  misc_feature: MA Experiment 20000286 PARAMETER Experiment Name: At_Open_Flower_P Parameter: Age (day) Value: 21
  misc_feature: MA Experiment 20000286 PARAMETER Experiment Name: At_Open_Flower_P Parameter: Plant Line Value: WS
  misc_feature: MA Experiment 20000286 PARAMETER Experiment Name: At_Open_Flower_P Parameter: Tissue Value: Half Open vs. Whole Plant
  misc_feature: MA Experiment ID: 20000436 Result: Down-regulated in Transcription
  misc_feature: MA Experiment 20000436 PARAMETER Experiment Name: At_Drought_P Parameter: Age (day) Value: 7
  misc_feature: MA Experiment 20000436 PARAMETER Experiment Name: At_Drought_P Parameter: Organism Value: A. thaliana
  misc_feature: MA Experiment 20000436 PARAMETER Experiment Name: At_Drought_P Parameter: Plant Line Value: WS
  misc_feature: MA Experiment 20000436 PARAMETER Experiment Name: At_Drought_P Parameter: Timepoint (hr) Value: 12
  misc_feature: MA Experiment 20000436 PARAMETER Experiment Name: At_Drought_P Parameter: Tissue Value: Whole Plant
  misc_feature: MA Experiment 20000436 PARAMETER Experiment Name: At_Drought_P Parameter: Treatment Value: Drought vs. No Drought
  misc_feature: MA Experiment ID: 20000437 Result: Down-regulated in Transcription
  misc_feature: MA Experiment 20000437 PARAMETER Experiment Name: At_Drought_P Parameter: Age (day) Value: 8
  misc_feature: MA Experiment 20000437 PARAMETER Experiment Name: At_Drought_P Parameter: Organism Value: A. thaliana
  misc_feature: MA Experiment 20000437 PARAMETER Experiment Name: At_Drought_P Parameter: Plant Line Value: WS
  misc_feature: MA Experiment 20000437 PARAMETER Experiment Name: At_Drought_P Parameter: Timepoint (hr) Value: 24
  misc_feature: MA Experiment 20000437 PARAMETER Experiment Name: At_Drought_P Parameter: Tissue Value: Whole Plant
  misc_feature: MA Experiment 20000437 PARAMETER Experiment Name: At_Drought_P Parameter: Treatment Value: Drought vs. No Drought
  misc_feature: MA Experiment ID: 20000438 Result: Up-regulated in Transcription
  misc_feature: MA Experiment 20000438 PARAMETER Experiment Name: At_Shoots__P Parameter: Age (day) Value: 14
  misc_feature: MA Experiment 20000438 PARAMETER Experiment Name: At_Shoots__P Parameter: Tissue Value: Shoots vs. Whole Plant
  misc_feature: MA Experiment ID: 20000527 Result: Down-regulated in Transcription
  misc_feature: MA Experiment 20000527 PARAMETER Experiment Name: At_10percent_PEG_P Parameter: Age (day) Value: 20
  misc_feature: MA Experiment 20000527 PARAMETER Experiment Name: At_10percent_PEG_P Parameter: Organism Value: A. thaliana
  misc_feature: MA Experiment 20000527 PARAMETER Experiment Name: At_10percent_PEG_P Parameter: Plant Line Value: WS
  misc_feature: MA Experiment 20000527 PARAMETER Experiment Name: At_10percent_PEG_P Parameter: Timepoint (day) Value: 20
  misc_feature: MA Experiment 20000527 PARAMETER Experiment Name: At_10percent_PEG_P Parameter: Tissue Value: Whole Plant
  misc_feature: MA Experiment 20000527 PARAMETER Experiment Name: At_10percent_PEG_P Parameter: Treatment Value: 10percent PEG vs. No Treatment
  misc_feature: MA Experiment ID: 20000794 Result: Up-regulated in Transcription
  misc_feature: MA Experiment 20000794 PARAMETER Experiment Name: At_Petals_P Parameter: Age (day) Value: 23-25 days
  misc_feature: MA Experiment 20000794 PARAMETER Experiment Name: At_Petals_P Parameter: Plant Line Value: WS
  misc_feature: MA Experiment 20000794 PARAMETER Experiment Name: At_Petals_P Parameter: Tissue Value: Petals vs. Whole plant
  misc_feature: MA Experiment ID: 20001450 Result: Up-regulated in Transcription
  misc_feature: MA Experiment 20001450 PARAMETER Experiment Name: At_Far-red-induction_P Parameter: Age (day) Value: 7
  misc_feature: MA Experiment 20001450 PARAMETER Experiment Name: At_Far-red-induction_P Parameter: Light Value: Far-red vs. White
  misc_feature: MA Experiment 20001450 PARAMETER Experiment Name: At_Far-red-induction_P Parameter: Organism Value: A. thaliana
  misc_feature: MA Experiment 20001450 PARAMETER Experiment Name: At_Far-red-induction_P Parameter: Plant Line Value: Columbia
  misc_feature: MA Experiment 20001450 PARAMETER Experiment Name: At_Far-red-induction_P Parameter: Timepoint (hr) Value: 8
  misc_feature: MA Experiment 20001450 PARAMETER Experiment Name: At_Far-red-induction_P Parameter: Tissue Value: Whole Plant
  misc_feature: MA Experiment ID: 20001554 Result: Down-regulated in Transcription
  misc_feature: MA Experiment 20001554 PARAMETER Experiment Name: At_Drought_Soil_Dry_P Parameter: Age (day) Value: 21
  misc_feature: MA Experiment 20001554 PARAMETER Experiment Name: At_Drought_Soil_Dry_P Parameter: Organism Value: A. thaliana
  misc_feature: MA Experiment 20001554 PARAMETER Experiment Name: At_Drought_Soil_Dry_P Parameter: Plant Line Value: WS
  misc_feature: MA Experiment 20001554 PARAMETER Experiment Name: At_Drought_Soil_Dry_P Parameter: Post Timepoint (hr) Value: None
  misc_feature: MA Experiment 20001554 PARAMETER Experiment Name: At_Drought_Soil_Dry_P Parameter: Post-Treatment Value: None
  misc_feature: MA Experiment 20001554 PARAMETER Experiment Name: At_Drought_Soil_Dry_P Parameter: Timepoint (day) Value: 7
  misc_feature: MA Experiment 20001554 PARAMETER Experiment Name: At_Drought_Soil_Dry_P Parameter: Treatment Value: Drought vs. No Drought
  misc_feature: MA Experiment ID: 20001555 Result: Down-regulated in Transcription
  misc_feature: MA Experiment 20001555 PARAMETER Experiment Name: At_Drought_Soil_Dry_P Parameter: Age (day) Value: 24
  misc_feature: MA Experiment 20001555 PARAMETER Experiment Name: At_Drought_Soil_Dry_P Parameter: Organism Value: A. thaliana
  misc_feature: MA Experiment 20001555 PARAMETER Experiment Name: At_Drought_Soil_Dry_P Parameter: Plant Line Value: WS
  misc_feature: MA Experiment 20001555 PARAMETER Experiment Name: At_Drought_Soil_Dry_P Parameter: Post Timepoint (hr) Value: None
  misc_feature: MA Experiment 20001555 PARAMETER Experiment Name: At_Drought_Soil_Dry_P Parameter: Post-Treatment Value: None
  misc_feature: MA Experiment 20001555 PARAMETER Experiment Name: At_Drought_Soil_Dry_P Parameter: Timepoint (day) Value: 10
  misc_feature: MA Experiment 20001555 PARAMETER Experiment Name: At_Drought_Soil_Dry_P Parameter: Treatment Value: Drought vs. No Drought
  misc_feature: MA Experiment ID: 20001556 Result: Down-regulated in Transcription
  misc_feature: MA Experiment 20001556 PARAMETER Experiment Name: At_Drought_Soil_Dry_P Parameter: Age (day) Value: 26
  misc_feature: MA Experiment 20001556 PARAMETER Experiment Name: At_Drought_Soil_Dry_P Parameter: Organism Value: A. thaliana
  misc_feature: MA Experiment 20001556 PARAMETER Experiment Name: At_Drought_Soil_Dry_P Parameter: Plant Line Value: WS
  misc_feature: MA Experiment 20001556 PARAMETER Experiment Name: At_Drought_Soil_Dry_P Parameter: Post Timepoint (hr) Value: None
  misc_feature: MA Experiment 20001556 PARAMETER Experiment Name: At_Drought_Soil_Dry_P Parameter: Post-Treatment Value: None
  misc_feature: MA Experiment 20001556 PARAMETER Experiment Name: At_Drought_Soil_Dry_P Parameter: Timepoint (day) Value: 12
  misc_feature: MA Experiment 20001556 PARAMETER Experiment Name: At_Drought_Soil_Dry_P Parameter: Treatment Value: Drought vs. No Drought
  misc_feature: MA Experiment ID: 20001559 Result: Down-regulated in Transcription
  misc_feature: MA Experiment 20001559 PARAMETER Experiment Name: At_Drought_Soil_Dry_P Parameter: Age (day) Value: 28
  misc_feature: MA Experiment 20001559 PARAMETER Experiment Name: At_Drought_Soil_Dry_P Parameter: Organism Value: A. thaliana
  misc_feature: MA Experiment 20001559 PARAMETER Experiment Name: At_Drought_Soil_Dry_P Parameter: Plant Line Value: WS
  misc_feature: MA Experiment 20001559 PARAMETER Experiment Name: At_Drought_Soil_Dry_P Parameter: Post Timepoint (hr) Value: 29
  misc_feature: MA Experiment 20001559 PARAMETER Experiment Name: At_Drought_Soil_Dry_P Parameter: Post-Treatment Value: Re-Water vs. No Drought
  misc_feature: MA Experiment 20001559 PARAMETER Experiment Name: At_Drought_Soil_Dry_P Parameter: Timepoint (day) Value: 14
  misc_feature: MA Experiment 20001559 PARAMETER Experiment Name: At_Drought_Soil_Dry_P Parameter: Treatment Value: Drought vs. No Drought
  misc_feature: MA Experiment ID: 20001757 Result: Up-regulated in Transcription
  misc_feature: MA Experiment 20001757 PARAMETER Experiment Name: At_50mM_NH4NO3_L-to-H_P Parameter: Timepoint (hr) Value: 6
  misc_feature: MA Experiment 20001757 PARAMETER Experiment Name: At_50mM_NH4NO3_L-to-H_P Parameter: Tissue Value: Leaf
  misc_feature: MA Experiment 20001757 PARAMETER Experiment Name: At_50mM_NH4NO3_L-to-H_P Parameter: Treatment Value: 50mM NH4NO3 vs 100mM Mannitol
  misc_feature: MA Experiment ID: 20001904 Result: Down-regulated in Transcription
  misc_feature: MA Experiment 20001904 PARAMETER Experiment Name: At_Drought_Reproduction_P Parameter: Age (day) Value: 37
  misc_feature: MA Experiment 20001904 PARAMETER Experiment Name: At_Drought_Reproduction_P Parameter: Organism Value: A. thaliana
  misc_feature: MA Experiment 20001904 PARAMETER Experiment Name: At_Drought_Reproduction_P Parameter: Plant Line Value: WS
  misc_feature: MA Experiment 20001904 PARAMETER Experiment Name: At_Drought_Reproduction_P Parameter: Timepoint (day) Value: 7
  misc_feature: MA Experiment 20001904 PARAMETER Experiment Name: At_Drought_Reproduction_P Parameter: Tissue Value: Rosettes
  misc_feature: MA Experiment 20001904 PARAMETER Experiment Name: At_Drought_Reproduction_P Parameter: Treatment Value: Drought vs. No Drought
  misc_feature: MA Experiment ID: 20001906 Result: Down-regulated in Transcription
  misc_feature: MA Experiment 20001906 PARAMETER Experiment Name: At_Drought_Reproduction_P Parameter: Age (day) Value: 35
  misc_feature: MA Experiment 20001906 PARAMETER Experiment Name: At_Drought_Reproduction_P Parameter: Organism Value: A. thaliana
  misc_feature: MA Experiment 20001906 PARAMETER Experiment Name: At_Drought_Reproduction_P Parameter: Plant Line Value: WS
  misc_feature: MA Experiment 20001906 PARAMETER Experiment Name: At_Drought_Reproduction_P Parameter: Timepoint (day) Value: 5
  misc_feature: MA Experiment 20001906 PARAMETER Experiment Name: At_Drought_Reproduction_P Parameter: Tissue Value: Siliques
  misc_feature: MA Experiment 20001906 PARAMETER Experiment Name: At_Drought_Reproduction_P Parameter: Treatment Value: Drought vs. No Drought
  misc_feature: MA Experiment ID: 20001908 Result: Down-regulated in Transcription
  misc_feature: MA Experiment 20001908 PARAMETER Experiment Name: At_Drought_Reproduction_P Parameter: Age (day) Value: 40
  misc_feature: MA Experiment 20001908 PARAMETER Experiment Name: At_Drought_Reproduction_P Parameter: Organism Value: A. thaliana
  misc_feature: MA Experiment 20001908 PARAMETER Experiment Name: At_Drought_Reproduction_P Parameter: Plant Line Value: WS
  misc_feature: MA Experiment 20001908 PARAMETER Experiment Name: At_Drought_Reproduction_P Parameter: Timepoint (day) Value: 10
  misc_feature: MA Experiment 20001908 PARAMETER Experiment Name: At_Drought_Reproduction_P Parameter: Tissue Value: Siliques
  misc_feature: MA Experiment 20001908 PARAMETER Experiment Name: At_Drought_Reproduction_P Parameter: Treatment Value: Drought vs. No Drought
  misc_feature: MA Experiment ID: 20001911 Result: Down-regulated in Transcription
  misc_feature: MA Experiment 20001911 PARAMETER Experiment Name: At_Drought_Reproduction_P Parameter: Age (day) Value: 40
  misc_feature: MA Experiment 20001911 PARAMETER Experiment Name: At_Drought_Reproduction_P Parameter: Organism Value: A. thaliana
  misc_feature: MA Experiment 20001911 PARAMETER Experiment Name: At_Drought_Reproduction_P Parameter: Plant Line Value: WS
  misc_feature: MA Experiment 20001911 PARAMETER Experiment Name: At_Drought_Reproduction_P Parameter: Timepoint (day) Value: 10
  misc_feature: MA Experiment 20001911 PARAMETER Experiment Name: At_Drought_Reproduction_P Parameter: Tissue Value: Flowers
  misc_feature: MA Experiment 20001911 PARAMETER Experiment Name: At_Drought_Reproduction_P Parameter: Treatment Value: Drought vs. No Drought
cactctatatcaaacatttcttttaaaaatgagaaagttgttggcatcgccgtttagttcattactcgccgtcgttttcatttccgtcatctccgtcgtcagatgctgctctcctaaagatcagacggctctcaatgctttcaagtcgtcactgagcgaaccaaacctcggtatcttcaacacttggtctgaaaacactgattgttgcaaggaatggtacggtatcagctgcgatcctgattcgggtcgggtcactgatatttctctccggggagaatctgaagacgccattttccaaaaggcaggccggtccggttatatgtccggttcgattgatccagcagtttgtgacttaaccgcactcacttccctcgttctcgccgactggaaaggaatcaccggagagattcctccgtgcattacttccctagcttcgctccgtatcctcgatctcgccggcaacaagatcaccggggagattcccgcggaaatcggcaaactctcgaaactcgctgttttaaacctcgccgagaatcaaatgtccggcgagattccggcgtcactgacgtcactcatcgagttgaagcatcttgaattgacggaaaatggaatcaccggcgtgatcccggccgatttcggatcgttgaagatgttgagcagagttttactgggccgtaacgaactaaccgggtcaattccagagtcgatctcgggtatggaacggttagcggatctggatctatccaaaaaccatatcgaaggtccgatacccgaatggatgggtaacatgaaggtactctcacttttgaatctcgattgcaattcgttaaccggtccaatccccggttcgcttcttagcaattccggtttagatgttgccaatttgagccgaaatgcgttggaaggaactatacccgacgttttcgggtcaaaaacgtatttagtttcgcttgatctgtcacacaatagtctatcgggtcggatcccggattcgttgtcgtcagctaagtttgtgggacatttggatattagccataacaagctttgtgggcgtattccaacgggttttccttttgatcaccttgaagctacgtcgtttagtgacaaccaatgtctctgcggtggccctttgacgacgtcatgttaataacaaggatatggtttctggttttactgaaccgggttattctttttgctgttgctcttgttcgttgtatcaaacttgtgatattttgcttttcatttcttcgtctttcagattttagtttctaaagctaagatatgttactggcaacggacaggtacaccgatccaatatggtttgcggtctatgtacaatgaatccggatgtaaaatcaaaagcaatgttatagaatttaatttcaagatc

SEQ ID NO: 101261 - protein, 381 aa, Arabidopsis thaliana; identical to SEQ ID NO: 21325
  peptide (1)..(381): Ceres Seq. ID no. 13607398
  misc_feature (241)..(264): Pfam Name: Leucine Rich Repeat Pfam Description: Leucine Rich Repeat
  misc_feature (10)..(381): Homolog of NCBI NO: 15230539 NR Description: DNA-damage-repair/toleration protein, putative
  misc_feature (62)..(381): Homolog of NCBI NO: 421844 NR Description: DRT100 protein precursor - Arabidopsis thaliana
  misc_feature (14)..(379): Homolog of NCBI NO: 38566726 NR Description: leucine rich repeat protein [Cicer arietinum]
  misc_feature (20)..(377): Homolog of NCBI NO: 15232373 NR Description: disease resistance protein family (LRR)
  misc_feature (24)..(377): Homolog of NCBI NO: 21593689 NR Description: leucine rich repeat protein, putative
  misc_feature (24)..(377): Homolog of NCBI NO: 14532722 NR Description: unknown protein [Arabidopsis thaliana]
  misc_feature (24)..(377): Homolog of NCBI NO: 15239943 NR Description: leucine rich repeat protein family [Arabidopsis
  misc_feature (59)..(377): Homolog of NCBI NO: 25004882 NR Description: polygalacturonase inhibitor-like protein [Cicer
  misc_feature (18)..(347): Homolog of NCBI NO: 15225296 NR Description: disease resistance protien-related (LRR) thaliana] >gi|7487889|pir||T00971 probable disease resistance
  misc_feature (24)..(347): Homolog of NCBI NO: 21536600 NR Description: putative disease resistance protein [Arabidopsis

SEQ ID NO: 101262 - protein, 372 aa, Arabidopsis thaliana; identical to SEQ ID NO: 21326
  peptide (1)..(372): Ceres Seq. ID no. 13607399
  misc_feature (232)..(255): Pfam Name: Leucine Rich Repeat Pfam Description: Leucine Rich Repeat
  misc_feature (1)..(372): Homolog of NCBI NO: 15230539 NR Description: DNA-damage-repair/toleration protein, putative
  misc_feature (53)..(372): Homolog of NCBI NO: 421844 NR Description: DRT100 protein precursor - Arabidopsis thaliana
  misc_feature (5)..(370): Homolog of NCBI NO: 38566726 NR Description: leucine rich repeat protein [Cicer arietinum]
  misc_feature (11)..(368): Homolog of NCBI NO: 15232373 NR Description: disease resistance protein family (LRR)
  misc_feature (15)..(368): Homolog of NCBI NO: 21593689 NR Description: leucine rich repeat protein, putative
  misc_feature (15)..(368): Homolog of NCBI NO: 14532722 NR Description: unknown protein [Arabidopsis thaliana]
  misc_feature (15)..(368): Homolog of NCBI NO: 15239943 NR Description: leucine rich repeat protein family [Arabidopsis
  misc_feature (50)..(368): Homolog of NCBI NO: 25004882 NR Description: polygalacturonase inhibitor-like protein [Cicer
  misc_feature (9)..(338): Homolog of NCBI NO: 15225296 NR Description: disease resistance protien-related (LRR) thaliana] >gi|7487889|pir||T00971 probable disease resistance
  misc_feature (15)..(338): Homolog of NCBI NO: 21536600 NR Description: putative disease resistance protein [Arabidopsis

SEQ ID NO: 101263 - protein, 275 aa, Arabidopsis thaliana; identical to SEQ ID NO: 21327
  peptide (1)..(275): Ceres Seq. ID no. 13607400
  misc_feature (135)..(158): Pfam Name: Leucine Rich Repeat Pfam Description: Leucine Rich Repeat
  misc_feature (1)..(275): Homolog of NCBI NO: 15230539 NR Description: DNA-damage-repair/toleration protein, putative
  misc_feature (1)..(275): Homolog of NCBI NO: 421844 NR Description: DRT100 protein precursor - Arabidopsis thaliana
  misc_feature (1)..(273): Homolog of NCBI NO: 38566726 NR Description: leucine rich repeat protein [Cicer arietinum]
  misc_feature (1)..(271): Homolog of NCBI NO: 15232373 NR Description: disease resistance protein family (LRR)
  misc_feature (1)..(271): Homolog of NCBI NO: 21593689 NR Description: leucine rich repeat protein, putative
  misc_feature (1)..(271): Homolog of NCBI NO: 14532722 NR Description: unknown protein [Arabidopsis thaliana]
  misc_feature (1)..(271): Homolog of NCBI NO: 15239943 NR Description: leucine rich repeat protein family [Arabidopsis
  misc_feature (1)..(271): Homolog of NCBI NO: 25004882 NR Description: polygalacturonase inhibitor-like protein [Cicer
  misc_feature (1)..(241): Homolog of NCBI NO: 15225296 NR Description: disease resistance protien-related (LRR) thaliana] >gi|7487889|pir||T00971 probable disease resistance
  misc_feature (1)..(241): Homolog of NCBI NO: 21536600 NR Description: putative disease resistance protein [Arabidopsis

SEQ ID NO: 101264 - DNA, 859 bp, Arabidopsis thaliana
  misc_feature (1)..(859): Ceres Seq. ID no. 13607405
  misc_feature: MA Experiment ID: 108434 Result: Up-regulated in Transcription
  misc_feature: MA Experiment 108434 PARAMETER Experiment Name: At_Root_Tips_cDNA_P Parameter: Tissue Value: Root Tips
  misc_feature: MA Experiment ID: 108461 Result: Down-regulated in Transcription
  misc_feature: MA Experiment 108461 PARAMETER Experiment Name: At_Germinating_Seeds_cDNA_P Parameter: Age (day) Value: 1 vs. 0
  misc_feature: MA Experiment 108461 PARAMETER Experiment Name: At_Germinating_Seeds_cDNA_P Parameter: Tissue Value: Germinating Seeds
  misc_feature: MA Experiment ID: 108462 Result: Down-regulated in Transcription
  misc_feature: MA Experiment 108462 PARAMETER Experiment Name: At_Germinating_Seeds_cDNA_P Parameter: Age (day) Value: 2 vs. 0
  misc_feature: MA Experiment 108462 PARAMETER Experiment Name: At_Germinating_Seeds_cDNA_P Parameter: Tissue Value: Germinating Seeds
  misc_feature: MA Experiment ID: 108463 Result: Down-regulated in Transcription
  misc_feature: MA Experiment 108463 PARAMETER Experiment Name: At_Germinating_Seeds_cDNA_P Parameter: Age (day) Value: 3 vs. 0
  misc_feature: MA Experiment 108463 PARAMETER Experiment Name: At_Germinating_Seeds_cDNA_P Parameter: Tissue Value: Germinating Seeds
  misc_feature: MA Experiment ID: 108464 Result: Down-regulated in Transcription
  misc_feature: MA Experiment 108464 PARAMETER Experiment Name: At_Germinating_Seeds_cDNA_P Parameter: Age (day) Value: 4 vs. 0
  misc_feature: MA Experiment 108464 PARAMETER Experiment Name: At_Germinating_Seeds_cDNA_P Parameter: Tissue Value: Germinating Seeds
  misc_feature: MA Experiment ID: 108488 Result: Up-regulated in Transcription
  misc_feature: MA Experiment ID: 108573 Result: Down-regulated in Transcription
  misc_feature: MA Experiment 108573 PARAMETER Experiment Name: At_Drought_cDNA_P Parameter: Timepoint (hr) Value: 6
  misc_feature: MA Experiment 108573 PARAMETER Experiment Name: At_Drought_cDNA_P Parameter: Tissue Value: Aerial
  misc_feature: MA Experiment 108573 PARAMETER Experiment Name: At_Drought_cDNA_P Parameter: Treatment Value: Drought vs. No Drought
  misc_feature: MA Experiment ID: 108595 Result: Down-regulated in Transcription
  misc_feature: MA Experiment 108595 PARAMETER Experiment Name: At_Ler-pi_Ovule_cDNA_P Parameter: Plant Line Value: null
attctagggttttagagtttccgcacgaatcacgaatctctctctctttcacacacttcacactttcaatatacactctcattatgactaccgaagagaaagagatcctcgccgccaaattggaagaacagaagatcgatctcgataagcccgaagttgaggacgatgatgataacgaagacgatgactctgatgacgatgataaggatgatgacgaggctgatggactagatggagaggcaggaggtaagtcaaaacaaagcagaagtgagaagaagagtcgcaaagccatgctcaagcttggcatgaaacccatcactggtgttagccgagtcaccgtcaaaaagagcaagaatatcttgtttgtcatatcaaagcctgatgtgttcaagagtccagcatcagacacatatgtgatctttggagaggcgaagatcgaggatttgagctctcagatccagtcgcaagcagcagagcaattcaaggcaccagatctcagcaatgtgatctcaaagggtgagtcatcgagcgctgcagtggttcaggatgatgaggaggttgacgaggaaggtgttgagccaaaggacattgagttggtgatgactcaagcaggagtgtctaggccaaatgctgtgaaggctctcaaggctgcagatggagatattgtctctgccatcatggagcttaccacctaaaccaaagtcttttctacttagatgtggtttaacctgagttatgtgccagagattgtccaaagaattcggaaatttttggtttcaatgtttttcatgaagtgattttcgatgttgtatcagtataaacctcataagtttttgattttcagtttgattttatattg

SEQ ID NO: 101265 - protein, 230 aa, Arabidopsis thaliana
  peptide (1)..(230): Ceres Seq. ID no. 13607406
  misc_feature (88)..(147): Pfam Name: NAC domain Pfam Description: NAC domain
  misc_feature (28)..(230): Homolog of NCBI NO: 15230476 NR Description: nascent polypeptide associated complex alpha -related [Arabidopsis thaliana] nascent polypeptide associated complex alpha chain, putative;
  misc_feature (28)..(229): Homolog of NCBI NO: 34907258 NR Description: putative nascent polypeptide associated complex
  misc_feature (31)..(230): Homolog of NCBI NO: 32352154 NR Description: nascent polypeptide associated complex alpha
  misc_feature (28)..(230): Homolog of NCBI NO: 6752882 NR Description: nascent polypeptide associated complex alpha
  misc_feature (37)..(229): Homolog of NCBI NO: 34902238 NR Description: Putative nascent polypeptide associated complex
  misc_feature (31)..(230): Homolog of NCBI NO: 13899101 NR Description: alpha NAC-like protein [Arabidopsis thaliana]
  misc_feature (31)..(230): Homolog of NCBI NO: 15229149 NR Description: alpha NAC-related protein [Arabidopsis thaliana]
  misc_feature (26)..(230): Homolog of NCBI NO: 15235122 NR Description: alpha NAC -related [Arabidopsis thaliana]
  misc_feature (28)..(171): Homolog of NCBI NO: 15240731 NR Description: expressed protein [Arabidopsis thaliana] contains similarity to nascent polypeptide associated complex
  misc_feature (39)..(230): Homolog of NCBI NO: 4115918 NR Description: similar to nascent polypeptide associated complex
SRVLEFPHESRISLSFTHFTLSIYTLIMTTEEKEILAAKLEEQKIDLDKPEVEDDDDNEDDDSDDDDKDDDEADGLDGEAGGKSKQSRSEKKSRKAMLKLGMKPITGVSRVTVKKSKNILFVISKPDVFKSPASDTYVIFGEAKIEDLSSQIQSQAAEQFKAPDLSNVISKGESSSAAVVQDDEEVDEEGVEPKDIELVMTQAGVSRPNAVKALKAADGDIVSAIMELTT

SEQ ID NO: 101266 - protein, 203 aa, Arabidopsis thaliana; identical to SEQ ID NO: 26528
  peptide (1)..(203): Ceres Seq. ID no. 13607407
  misc_feature (61)..(120): Pfam Name: NAC domain Pfam Description: NAC domain
  misc_feature (1)..(203): Homolog of NCBI NO: 15230476 NR Description: nascent polypeptide associated complex alpha -related [Arabidopsis thaliana] nascent polypeptide associated complex alpha chain, putative;
  misc_feature (1)..(202): Homolog of NCBI NO: 34907258 NR Description: putative nascent polypeptide associated complex
  misc_feature (4)..(203): Homolog of NCBI NO: 32352154 NR Description: nascent polypeptide associated complex alpha
  misc_feature (1)..(203): Homolog of NCBI NO: 6752882 NR Description: nascent polypeptide associated complex alpha
  misc_feature (10)..(202): Homolog of NCBI NO: 34902238 NR Description: Putative nascent polypeptide associated complex
  misc_feature (4)..(203): Homolog of NCBI NO: 13899101 NR Description: alpha NAC-like protein [Arabidopsis thaliana]
  misc_feature (4)..(203): Homolog of NCBI NO: 15229149 NR Description: alpha NAC-related protein [Arabidopsis thaliana]
  misc_feature (1)..(203): Homolog of NCBI NO: 15235122 NR Description: alpha NAC -related [Arabidopsis thaliana]
  misc_feature (1)..(144): Homolog of NCBI NO: 15240731 NR Description: expressed protein [Arabidopsis thaliana] contains similarity to nascent polypeptide associated complex
  misc_feature (12)..(203): Homolog of NCBI NO: 4115918 NR Description: similar to nascent polypeptide associated complex

SEQ ID NO: 101267 - protein, 134 aa, Arabidopsis thaliana; identical to SEQ ID NO: 26529
  peptide (1)..(134): Ceres Seq. ID no. 13607408
  misc_feature (1)..(51): Pfam Name: NAC domain Pfam Description: NAC domain
  misc_feature (1)..(134): Homolog of NCBI NO: 15230476 NR Description: nascent polypeptide associated complex alpha -related [Arabidopsis thaliana] nascent polypeptide associated complex alpha chain, putative;
  misc_feature (1)..(133): Homolog of NCBI NO: 34907258 NR Description: putative nascent polypeptide associated complex
  misc_feature (1)..(134): Homolog of NCBI NO: 32352154 NR Description: nascent polypeptide associated complex alpha
  misc_feature (1)..(134): Homolog of NCBI NO: 6752882 NR Description: nascent polypeptide associated complex alpha
  misc_feature (1)..(133): Homolog of NCBI NO: 34902238 NR Description: Putative nascent polypeptide associated complex
  misc_feature (1)..(134): Homolog of NCBI NO: 13899101 NR Description: alpha NAC-like protein [Arabidopsis thaliana]
  misc_feature (1)..(134): Homolog of NCBI NO: 15229149 NR Description: alpha NAC-related protein [Arabidopsis thaliana]
  misc_feature (1)..(134): Homolog of NCBI NO: 15235122 NR Description: alpha NAC -related [Arabidopsis thaliana]
  misc_feature (1)..(75): Homolog of NCBI NO: 15240731 NR Description: expressed protein [Arabidopsis thaliana] contains similarity to nascent polypeptide associated complex
  misc_feature (1)..(134): Homolog of NCBI NO: 4115918 NR Description: similar to nascent polypeptide associated complex

SEQ ID NO: 101268 - DNA, 944 bp, Arabidopsis thaliana
  misc_feature (1)..(944): Ceres Seq. ID no. 13607416
  misc_feature: MA Experiment ID: 20000185 Result: Up-regulated in Transcription
  misc_feature: MA Experiment 20000185 PARAMETER Experiment Name: At_Roots__P Parameter: Age (day) Value: 7 vs. 21
  misc_feature: MA Experiment 20000185 PARAMETER Experiment Name: At_Roots__P Parameter: Organism Value: A. thaliana
  misc_feature: MA Experiment 20000185 PARAMETER Experiment Name: At_Roots__P Parameter: Tissue Value: Roots vs. Whole Plant
  misc_feature: MA Experiment ID: 20000439 Result: Up-regulated in Transcription
  misc_feature: MA Experiment 20000439 PARAMETER Experiment Name: At_Roots__P Parameter: Age (day) Value: 14 vs. 21
  misc_feature: MA Experiment 20000439 PARAMETER Experiment Name: At_Roots__P Parameter: Organism Value: A. thaliana
  misc_feature: MA Experiment 20000439 PARAMETER Experiment Name: At_Roots__P Parameter: Tissue Value: Roots vs. Whole Plant
  misc_feature: MA Experiment ID: 20001451 Result: Up-regulated in Transcription
  misc_feature: MA Experiment 20001451 PARAMETER Experiment Name: At_Far-red-induction_P Parameter: Age (day) Value: 7
  misc_feature: MA Experiment 20001451 PARAMETER Experiment Name: At_Far-red-induction_P Parameter: Light Value: Far-red vs. White
  misc_feature: MA Experiment 20001451 PARAMETER Experiment Name: At_Far-red-induction_P Parameter: Organism Value: A. thaliana
  misc_feature: MA Experiment 20001451 PARAMETER Experiment Name: At_Far-red-induction_P Parameter: Plant Line Value: Columbia
  misc_feature: MA Experiment 20001451 PARAMETER Experiment Name: At_Far-red-induction_P Parameter: Timepoint (hr) Value: 24
  misc_feature: MA Experiment 20001451 PARAMETER Experiment Name: At_Far-red-induction_P Parameter: Tissue Value: Whole Plant
atggaggagacagaaaagaataagggcagcataagtatggttgaggctaatctacctcctggttttagattccatcctagagacgacgagctcgtctgtgactacttaatgagaagaaccgttcgcagcctctatcaaccagttgtcttgatcgacgtcgatcttaacaaatgcgagccttgggacattcctcaaacggcgagagtgggagggaaagaatggtacttttacagccaaaaagaccgtaaatacgcaacaggctacagaacaaaccgggctacggccaccggttattggaaagccaccgggaaagatagagcaatccaaagaaacggtggtcttgtgggtatgagaaagacacttgtgttttaccgaggtcgatcccctaaaggtcgtaaaactgattgggtcatgcatgagtttcgtctccaaggaaaacttcttcaccactcccctaattctctcgaggaagagtgggtattgtgtagagttttccacaagaacagcaacggagctgatatagacgacatcacaaggagctgctctgatgcaacagcttctgcattcatggactcttacatcaacttcgaccatcatcacatcatcaatcagcatgtaccctgcttctccaataatttgtcacataaccaaaccaaccaatccggtttaatctccaagaactccagcccattgtttaatgcttcccctgatcaaatgattctcagaactttgctaagtcaactcacaaaaaaagtcgaagaatcacagagtcgtggagacggaagctcagagagccaattgaccgacattggcatcccaagccatgcatggaattactgattatgaataaggcttaccagatatatcactatgtataagtatcatattcatgattcgaaacaatttattcaaccctcttatgtaaactgttataccattatatt

SEQ ID NO: 101269 - protein, 279 aa, Arabidopsis thaliana
  peptide (1)..(279): Ceres Seq. ID no. 13607417
  misc_feature (18)..(144): Pfam Name: No apical meristem (NAM) protein Pfam Description: No apical meristem (NAM) protein
  misc_feature (1)..(279): Homolog of NCBI NO: 15795128 NR Description: NAM (no apical meristem) protein-like
  misc_feature (1)..(228): Homolog of NCBI NO: 15222818 NR Description: NAC1 / No apical meristem (NAM) protein family thaliana] >gi|6649236|gb|AAF21437.1|AF198054_1 NAC1 [Arabidopsis >gi|8778319|gb|AAF79328.1|AC002304_21 F14J16.32 [Arabidopsis
  misc_feature (206)..(278): Homolog of NCBI NO: 15222818 NR Description: NAC1 / No apical meristem (NAM) protein family thaliana] >gi|6649236|gb|AAF21437.1|AF198054_1 NAC1 [Arabidopsis >gi|8778319|gb|AAF79328.1|AC002304_21 F14J16.32 [Arabidopsis
  misc_feature (10)..(219): Homolog of NCBI NO: 15148912 NR Description: NAC domain protein NAC1 [Phaseolus vulgaris]
  misc_feature (1)..(236): Homolog of NCBI NO: 25404083 NR Description: hypothetical protein T6H22.19 [imported] - thaliana >gi|6056383|gb|AAF02847.1|AC009894_18 Similar to NAM
  misc_feature (67)..(228): Homolog of NCBI NO: 30696045 NR Description: NAC1 / No apical meristem (NAM) protein family thaliana] >gi|29028858|gb|AAO64808.1| At1g56010 [Arabidopsis
  misc_feature (7)..(238): Homolog of NCBI NO: 9758909 NR Description: NAM (no apical meristem)-like protein thaliana] >gi|28973617|gb|AAO64133.1| putative NAM (no apical protein [Arabidopsis thaliana] >gi|29824189|gb|AAP04055.1|
  misc_feature (7)..(238): Homolog of NCBI NO: 30686737 NR Description: NAM (no apical meristem)-related protein
  misc_feature (15)..(257): Homolog of NCBI NO: 30682048 NR Description: NAM (no apical meristem)-related protein
  misc_feature (17)..(257): Homolog of NCBI NO: 30682054 NR Description: NAM (no apical meristem)-related protein
MEETEKNKGSISMVEANLPPGFRFHPRDDELVCDYLMRRTVRSLYQPVVLIDVDLNKCEPWDIPQTARVGGKEWYFYSQKDRKYATGYRTNRATATGYWKATGKDRAIQRNGGLVGMRKTLVFYRGRSPKGRKTDWVMHEFRLQGKLLHHSPNSLEEEWVLCRVFHKNSNGADIDDITRSCSDATASAFMDSYINFDHHHIINQHVPCFSNNLSHNQTNQSGLISKNSSPLFNASPDQMILRTLLSQLTKKVEESQSRGDGSSESQLTDIGIPSHAWNY

SEQ ID NO: 101270 - protein, 267 aa, Arabidopsis thaliana
  peptide (1)..(267): Ceres Seq. ID no. 13607418
  misc_feature (6)..(132): Pfam Name: No apical meristem (NAM) protein Pfam Description: No apical meristem (NAM) protein
  misc_feature (1)..(267): Homolog of NCBI NO: 15795128 NR Description: NAM (no apical meristem) protein-like
  misc_feature (1)..(216): Homolog of NCBI NO: 15222818 NR Description: NAC1 / No apical meristem (NAM) protein family thaliana] >gi|6649236|gb|AAF21437.1|AF198054_1 NAC1 [Arabidopsis >gi|8778319|gb|AAF79328.1|AC002304_21 F14J16.32 [Arabidopsis
  misc_feature (194)..(266): Homolog of NCBI NO: 15222818 NR Description: NAC1 / No apical meristem (NAM) protein family thaliana] >gi|6649236|gb|AAF21437.1|AF198054_1 NAC1 [Arabidopsis >gi|8778319|gb|AAF79328.1|AC002304_21 F14J16.32 [Arabidopsis
  misc_feature (1)..(207): Homolog of NCBI NO: 15148912 NR Description: NAC domain protein NAC1 [Phaseolus vulgaris]
  misc_feature (1)..(224): Homolog of NCBI NO: 25404083 NR Description: hypothetical protein T6H22.19 [imported] - thaliana >gi|6056383|gb|AAF02847.1|AC009894_18 Similar to NAM
  misc_feature (55)..(216): Homolog of NCBI NO: 30696045 NR Description: NAC1 / No apical meristem (NAM) protein family thaliana] >gi|29028858|gb|AAO64808.1| At1g56010 [Arabidopsis
  misc_feature (1)..(226): Homolog of NCBI NO: 9758909 NR Description: NAM (no apical meristem)-like protein thaliana] >gi|28973617|gb|AAO64133.1| putative NAM (no apical protein [Arabidopsis thaliana] >gi|29824189|gb|AAP04055.1|
  misc_feature (1)..(226): Homolog of NCBI NO: 30686737 NR Description: NAM (no apical meristem)-related protein
  misc_feature (3)..(245): Homolog of NCBI NO: 30682048 NR Description: NAM (no apical meristem)-related protein
  misc_feature (5)..(245): Homolog of NCBI NO: 30682054 NR Description: NAM (no apical meristem)-related protein
MVEANLPPGFRFHPRDDELVCDYLMRRTVRSLYQPVVLIDVDLNKCEPWDIPQTARVGGKEWYFYSQKDRKYATGYRTNRATATGYWKATGKDRAIQRNGGLVGMRKTLVFYRGRSPKGRKTDWVMHEFRLQGKLLHHSPNSLEEEWVLCRVFHKNSNGADIDDITRSCSDATASAFMDSYINFDHHHIINQHVPCFSNNLSHNQTNQSGLISKNSSPLFNASPDQMILRTLLSQLTKKVEESQSRGDGSSESQLTDIGIPSHAWNY

SEQ ID NO: 101271 - protein, 243 aa, Arabidopsis thaliana
  peptide (1)..(243): Ceres Seq. ID no. 13607419
  misc_feature (1)..(108): Pfam Name: No apical meristem (NAM) protein Pfam Description: No apical meristem (NAM) protein
  misc_feature (1)..(243): Homolog of NCBI NO: 15795128 NR Description: NAM (no apical meristem) protein-like
  misc_feature (1)..(192): Homolog of NCBI NO: 15222818 NR Description: NAC1 / No apical meristem (NAM) protein family thaliana] >gi|6649236|gb|AAF21437.1|AF198054_1 NAC1 [Arabidopsis >gi|8778319|gb|AAF79328.1|AC002304_21 F14J16.32 [Arabidopsis
  misc_feature (170)..(242): Homolog of NCBI NO: 15222818 NR Description: NAC1 / No apical meristem (NAM) protein family thaliana] >gi|6649236|gb|AAF21437.1|AF198054_1 NAC1 [Arabidopsis >gi|8778319|gb|AAF79328.1|AC002304_21 F14J16.32 [Arabidopsis
  misc_feature (1)..(183): Homolog of NCBI NO: 15148912 NR Description: NAC domain protein NAC1 [Phaseolus vulgaris]
  misc_feature (1)..(200): Homolog of NCBI NO: 25404083 NR Description: hypothetical protein T6H22.19 [imported] - thaliana >gi|6056383|gb|AAF02847.1|AC009894_18 Similar to NAM
  misc_feature (31)..(192): Homolog of NCBI NO: 30696045 NR Description: NAC1 / No apical meristem (NAM) protein family thaliana] >gi|29028858|gb|AAO64808.1| At1g56010 [Arabidopsis
  misc_feature (1)..(202): Homolog of NCBI NO: 9758909 NR Description: NAM (no apical meristem)-like protein thaliana] >gi|28973617|gb|AAO64133.1| putative NAM (no apical protein [Arabidopsis thaliana] >gi|29824189|gb|AAP04055.1|
  misc_feature (1)..(202): Homolog of NCBI NO: 30686737 NR Description: NAM (no apical meristem)-related protein
  misc_feature (1)..(221): Homolog of NCBI NO: 30682048 NR Description: NAM (no apical meristem)-related protein
  misc_feature (1)..(221): Homolog of NCBI NO: 30682054 NR Description: NAM (no apical meristem)-related protein
MRRTVRSLYQPVVLIDVDLNKCEPWDIPQTARVGGKEWYFYSQKDRKYATGYRTNRATATGYWKATGKDRAIQRNGGLVGMRKTLVFYRGRSPKGRKTDWVMHEFRLQGKLLHHSPNSLEEEWVLCRVFHKNSNGADIDDITRSCSDATASAFMDSYINFDHHHIINQHVPCFSNNLSHNQTNQSGLISKNSSPLFNASPDQMILRTLLSQLTKKVEESQSRGDGSSESQLTDIGIPSHAWNY

SEQ ID NO: 101272 - DNA, 1317 bp, Arabidopsis thaliana
  misc_feature (1)..(1317): Ceres Seq. ID no. 13607426
  misc_feature: MA Experiment ID: 108434 Result: Down-regulated in Transcription
  misc_feature: MA Experiment 108434 PARAMETER Experiment Name: At_Root_Tips_cDNA_P Parameter: Tissue Value: Root Tips
  misc_feature: MA Experiment ID: 108572 Result: Up-regulated in Transcription
  misc_feature: MA Experiment 108572 PARAMETER Experiment Name: At_Drought_cDNA_P Parameter: Timepoint (hr) Value: 1
  misc_feature: MA Experiment 108572 PARAMETER Experiment Name: At_Drought_cDNA_P Parameter: Tissue Value: Aerial
  misc_feature: MA Experiment 108572 PARAMETER Experiment Name: At_Drought_cDNA_P Parameter: Treatment Value: Drought vs. No Drought
  misc_feature: MA Experiment ID: 108573 Result: Up-regulated in Transcription
  misc_feature: MA Experiment 108573 PARAMETER Experiment Name: At_Drought_cDNA_P Parameter: Timepoint (hr) Value: 6
  misc_feature: MA Experiment 108573 PARAMETER Experiment Name: At_Drought_cDNA_P Parameter: Tissue Value: Aerial
  misc_feature: MA Experiment 108573 PARAMETER Experiment Name: At_Drought_cDNA_P Parameter: Treatment Value: Drought vs. No Drought
  misc_feature: MA Experiment ID: 108579 Result: Up-regulated in Transcription
  misc_feature: MA Experiment 108579 PARAMETER Experiment Name: At_4deg_Cold_cDNA_P Parameter: Temperature (deg C) Value: 4 vs. 22
  misc_feature: MA Experiment 108579 PARAMETER Experiment Name: At_4deg_Cold_cDNA_P Parameter: Timepoint (hr) Value: 6
  misc_feature: MA Experiment 108579 PARAMETER Experiment Name: At_4deg_Cold_cDNA_P Parameter: Tissue Value: Aerial
  misc_feature: MA Experiment ID: 20000093 Result: Up-regulated in Transcription
  misc_feature: MA Experiment 20000093 PARAMETER Experiment Name: At_42deg_Heat_cDNA_P Parameter: Temperature (deg C) Value: 42 vs. 22
  misc_feature: MA Experiment 20000093 PARAMETER Experiment Name: At_42deg_Heat_cDNA_P Parameter: Timepoint (hr) Value: 0.5
  misc_feature: MA Experiment 20000093 PARAMETER Experiment Name: At_42deg_Heat_cDNA_P Parameter: Tissue Value: Aerial
  misc_feature: MA Experiment ID: 20000111 Result: Up-regulated in Transcription
  misc_feature: MA Experiment 20000111 PARAMETER Experiment Name: At_42deg_Heat_cDNA_P Parameter: Temperature (deg C) Value: 42 vs. 22
  misc_feature: MA Experiment 20000111 PARAMETER Experiment Name: At_42deg_Heat_cDNA_P Parameter: Timepoint (hr) Value: 6
  misc_feature: MA Experiment 20000111 PARAMETER Experiment Name: At_42deg_Heat_cDNA_P Parameter: Tissue Value: Aerial
  misc_feature: MA Experiment ID: 20000144 Result: Up-regulated in Transcription
  misc_feature: MA Experiment 20000144 PARAMETER Experiment Name: At_42deg_Heat_cDNA_P Parameter: Temperature (deg C) Value: 42 vs. 22
  misc_feature: MA Experiment 20000144 PARAMETER Experiment Name: At_42deg_Heat_cDNA_P Parameter: Timepoint (hr) Value: 1
  misc_feature: MA Experiment 20000144 PARAMETER Experiment Name: At_42deg_Heat_cDNA_P Parameter: Tissue Value: Aerial
  misc_feature: MA Experiment ID: 20000327 Result: Up-regulated in Transcription
  misc_feature: MA Experiment 20000327 PARAMETER Experiment Name: At_42deg_Heat_Sub_P Parameter: Age (day) Value: 14
  misc_feature: MA Experiment 20000327 PARAMETER Experiment Name: At_42deg_Heat_Sub_P Parameter: Organism Value: A. thaliana
  misc_feature: MA Experiment 20000327 PARAMETER Experiment Name: At_42deg_Heat_Sub_P Parameter: Plant Line Value: WS
  misc_feature: MA Experiment 20000327 PARAMETER Experiment Name: At_42deg_Heat_Sub_P Parameter: Temperature (deg C) Value: 42 vs. 22
  misc_feature: MA Experiment 20000327 PARAMETER Experiment Name: At_42deg_Heat_Sub_P Parameter: Timepoint (hr) Value: 1
  misc_feature: MA Experiment 20000327 PARAMETER Experiment Name: At_42deg_Heat_Sub_P Parameter: Tissue Value: Aerial
  misc_feature: MA Experiment ID: 20000328 Result: Up-regulated in Transcription
  misc_feature: MA Experiment 20000328 PARAMETER Experiment Name: At_42deg_Heat_Sub_P Parameter: Age (day) Value: 14
  misc_feature: MA Experiment 20000328 PARAMETER Experiment Name: At_42deg_Heat_Sub_P Parameter: Organism Value: A. thaliana
  misc_feature: MA Experiment 20000328 PARAMETER Experiment Name: At_42deg_Heat_Sub_P Parameter: Plant Line Value: WS
  misc_feature: MA Experiment 20000328 PARAMETER Experiment Name: At_42deg_Heat_Sub_P Parameter: Temperature (deg C) Value: 42 vs. 22
  misc_feature: MA Experiment 20000328 PARAMETER Experiment Name: At_42deg_Heat_Sub_P Parameter: Timepoint (hr) Value: 6
  misc_feature: MA Experiment 20000328 PARAMETER Experiment Name: At_42deg_Heat_Sub_P Parameter: Tissue Value: Aerial
acaattcagatttcaatttctcaaaatcttaaaaactttctctcaattctctctaccgtgatcaagatgcagatctttgttaagactctcaccggaaagacaatcaccctcgaggtggaaagctccgacaccatcgacaacgttaaggccaagatccaggataaggagggcattcctccggatcagcagaggcttattttcgccggcaagcagctagaggatggccgtacgttggctgattacaatatccagaaggaatccaccctccacttggtcctcaggctccgtggtggtatgcagattttcgttaaaaccctaacgggaaagacgattactcttgaggtggagagttctgacaccatcgacaacgtcaaggccaagatccaagacaaagagggtattcctccggaccagcagagattgatcttcgccggaaaacaacttgaagatggcagaactttggccgactacaacattcagaaggagtccacactccacttggtcttgcgtctgcgtggaggtatgcagatcttcgtgaagactctcaccggaaagaccatcactttggaggtggagagttctgacaccattgataacgtgaaagccaagatccaggacaaagagggtatcccaccggaccagcagagattgatcttcgccggaaagcaacttgaagatggaagaactttggctgactacaacattcagaaggagtccacacttcacttggtcttgcgtctgcgtggaggtatgcagatcttcgtgaagactctcaccggaaagactatcactttggaggtagagagctctgacaccattgacaacgtgaaggccaagatccaggataaggaaggaatccctccggaccagcagaggttgatctttgccggaaaacaattggaggatggtcgtactttggcggattacaacatccagaaggagtcgacccttcacttggtgttgcgtctgcgtggaggtatgcagatcttcgtcaagactttgaccggaaagaccatcacccttgaagtggaaagctccgacaccattgacaacgtcaaggccaagatccaggacaaggaggtattcctccggaccagcagcgtctcatcttcgctggaaagcagcttgaggatggacgtactttggccgactacaacatccagaaggagtctactcttcacttggtcctgcgtcttcgtggtggtttctaaatctcgtctctgttatgcttaagaagttcaatgtttcgtttcatgtaaaactttggtggtttgtgttttggggccttgtataatccctgatgaataagtgttctac

SEQ ID NO: 101273 - protein, 410 aa, Arabidopsis thaliana; identical to SEQ ID NO: 100816
  peptide (1)..(410): Ceres Seq. ID no. 13607427
  misc_feature (23)..(410): Homolog of NCBI NO: 18412930 NR Description: polyubiquitin UBQ10/SEN3 [Arabidopsis thaliana]
  misc_feature (23)..(410): Homolog of NCBI NO: 30680052 NR Description: polyubiquitin UBQ10/SEN3 [Arabidopsis thaliana] polyubiquitin UBQ10/SEN3 [Arabidopsis thaliana]
  misc_feature (23)..(410): Homolog of NCBI NO: 23397122 NR Description: putative polyubiquitin (UBQ10) [Arabidopsis
  misc_feature (23)..(360): Homolog of NCBI NO: 70644 NR Description: ubiquitin precursor - common sunflower (fragment)
  misc_feature (23)..(360): Homolog of NCBI NO: 70645 NR Description: polyubiquitin 5 - garden pea
  misc_feature (23)..(360): Homolog of NCBI NO: 170352 NR Description: hexameric polyubiquitin >gi|870792|gb|AAA68878.1| >gi|4115333|gb|AAD03341.1| ubiquitin [Pisum sativum] ubiquitin [Pisum sativum] >gi|22655101|gb|AAM98141.1|
  misc_feature (23)..(360): Homolog of NCBI NO: 170352 NR Description: hexameric polyubiquitin >gi|870792|gb|AAA68878.1| >gi|4115333|gb|AAD03341.1| ubiquitin [Pisum sativum] ubiquitin [Pisum sativum] >gi|22655101|gb|AAM98141.1|
  misc_feature (23)..(360): Homolog of NCBI NO: 902586 NR Description: ubiquitin
  misc_feature (23)..(360): Homolog of NCBI NO: 100934 NR Description: polyubiquitin - maize >gi|248337|gb|AAB21993.1|
  misc_feature (23)..(360): Homolog of NCBI NO: 902584 NR Description: polyubiquitin containing 7 ubiquitin monomers

SEQ ID NO: 101274 - protein, 388 aa, Arabidopsis thaliana; identical to SEQ ID NO: 100817
  peptide (1)..(388): Ceres Seq. ID no. 13607428
  misc_feature (1)..(388): Homolog of NCBI NO: 18412930 NR Description: polyubiquitin UBQ10/SEN3 [Arabidopsis thaliana]
  misc_feature (1)..(388): Homolog of NCBI NO: 30680052 NR Description: polyubiquitin UBQ10/SEN3 [Arabidopsis thaliana] polyubiquitin UBQ10/SEN3 [Arabidopsis thaliana]
  misc_feature (1)..(388): Homolog of NCBI NO: 23397122 NR Description: putative polyubiquitin (UBQ10) [Arabidopsis
  misc_feature (1)..(338): Homolog of NCBI NO: 70644 NR Description: ubiquitin precursor - common sunflower (fragment)
  misc_feature (1)..(338): Homolog of NCBI NO: 70645 NR Description: polyubiquitin 5 - garden pea
  misc_feature (1)..(338): Homolog of NCBI NO: 170352 NR Description: hexameric polyubiquitin >gi|870792|gb|AAA68878.1| >gi|4115333|gb|AAD03341.1| ubiquitin [Pisum sativum] ubiquitin [Pisum sativum] >gi|22655101|gb|AAM98141.1|
  misc_feature (1)..(338): Homolog of NCBI NO: 170352 NR Description: hexameric polyubiquitin >gi|870792|gb|AAA68878.1| >gi|4115333|gb|AAD03341.1| ubiquitin [Pisum sativum] ubiquitin [Pisum sativum] >gi|22655101|gb|AAM98141.1|
  misc_feature (1)..(338): Homolog of NCBI NO: 902586 NR Description: ubiquitin
  misc_feature (1)..(338): Homolog of NCBI NO: 100934 NR Description: polyubiquitin - maize >gi|248337|gb|AAB21993.1|
  misc_feature (1)..(338): Homolog of NCBI NO: 902584 NR Description: polyubiquitin containing 7 ubiquitin monomers

SEQ ID NO: 101275 - protein, 312 aa, Arabidopsis thaliana; identical to SEQ ID NO: 100818
  peptide (1)..(312): Ceres Seq. ID no. 13607429
  misc_feature (1)..(312): Homolog of NCBI NO: 18412930 NR Description: polyubiquitin UBQ10/SEN3 [Arabidopsis thaliana]
  misc_feature (1)..(312): Homolog of NCBI NO: 30680052 NR Description: polyubiquitin UBQ10/SEN3 [Arabidopsis thaliana] polyubiquitin UBQ10/SEN3 [Arabidopsis thaliana]
  misc_feature (1)..(312): Homolog of NCBI NO: 23397122 NR Description: putative polyubiquitin (UBQ10) [Arabidopsis
  misc_feature (1)..(262): Homolog of NCBI NO: 70644 NR Description: ubiquitin precursor - common sunflower (fragment)
  misc_feature (1)..(262): Homolog of NCBI NO: 70645 NR Description: polyubiquitin 5 - garden pea
  misc_feature (1)..(262): Homolog of NCBI NO: 170352 NR Description: hexameric polyubiquitin >gi|870792|gb|AAA68878.1| >gi|4115333|gb|AAD03341.1| ubiquitin [Pisum sativum] ubiquitin [Pisum sativum] >gi|22655101|gb|AAM98141.1|
  misc_feature (1)..(262): Homolog of NCBI NO: 170352 NR Description: hexameric polyubiquitin >gi|870792|gb|AAA68878.1| >gi|4115333|gb|AAD03341.1| ubiquitin [Pisum sativum] ubiquitin [Pisum sativum] >gi|22655101|gb|AAM98141.1|
  misc_feature (1)..(262): Homolog of NCBI NO: 902586 NR Description: ubiquitin
  misc_feature (1)..(262): Homolog of NCBI NO: 100934 NR Description: polyubiquitin - maize >gi|248337|gb|AAB21993.1|
  misc_feature (1)..(262): Homolog of NCBI NO: 100934 NR Description: polyubiquitin - maize >gi|248337|gb|AAB21993.1|

SEQ ID NO: 101276 - DNA, 2984 bp, Arabidopsis thaliana
  misc_feature (1)..(2984): Ceres Seq. ID no. 13607434
  misc_feature: MA Experiment ID: 20000184 Result: Down-regulated in Transcription
  misc_feature: MA Experiment 20000184 PARAMETER Experiment Name: At_Shoots__P Parameter: Age (day) Value: 7
  misc_feature: MA Experiment 20000184 PARAMETER Experiment Name: At_Shoots__P Parameter: Tissue Value: Shoots vs. Whole Plant
  misc_feature: MA Experiment ID: 20000794 Result: Up-regulated in Transcription
  misc_feature: MA Experiment 20000794 PARAMETER Experiment Name: At_Petals_P Parameter: Age (day) Value: 23-25 days
  misc_feature: MA Experiment 20000794 PARAMETER Experiment Name: At_Petals_P Parameter: Plant Line Value: WS
  misc_feature: MA Experiment 20000794 PARAMETER Experiment Name: At_Petals_P Parameter: Tissue Value: Petals vs. Whole plant
  misc_feature: MA Experiment ID: 20001905 Result: Up-regulated in Transcription
  misc_feature: MA Experiment 20001905 PARAMETER Experiment Name: At_Drought_Reproduction_P Parameter: Age (day) Value: 40
  misc_feature: MA Experiment 20001905 PARAMETER Experiment Name: At_Drought_Reproduction_P Parameter: Organism Value: A. thaliana
  misc_feature: MA Experiment 20001905 PARAMETER Experiment Name: At_Drought_Reproduction_P Parameter: Plant Line Value: WS
  misc_feature: MA Experiment 20001905 PARAMETER Experiment Name: At_Drought_Reproduction_P Parameter: Timepoint (day) Value: 10
  misc_feature: MA Experiment 20001905 PARAMETER Experiment Name: At_Drought_Reproduction_P Parameter: Tissue Value: Rosettes
  misc_feature: MA Experiment 20001905 PARAMETER Experiment Name: At_Drought_Reproduction_P Parameter: Treatment Value: Drought vs. No Drought
tttaacgaaaaaaaaaaaaactttggcctctccggtgactcttccttcttctgctaccgaacttttcgcttccttctctgaccaatttttttcaacaacctctcttcttcaacaaattctcttctcaaatcctccaaatcctctctgccatgaacgctactttcttcctcctctccaccaccgtctccaccgtcacaatcaccggattcaacggtctcgatttctcatcttagaaccacatgcatcccttctgttgcgttacaactgtctccgatcactctccttcgatgcctccgttacctgaaccacaaccgcctctaccgaattacgccgccgattttggttcggcgagatccgaaccgattataactcgatctgcttctcaaagttataatcattcaggtcaattcaataacaatcttattcatagtctctcgtttaatcatcaccagagtgatgtaacggatcgattggggcaacgcgttttagctttgccggcggcggttagagaaccaccggttgatgttaagattaacgatatcgttgggaatggaattgctgggattttgtataagtgggtgaattatggtagaggatggagacctaggtggtttgttttgcaagatggtgttctttcttattataagattcatggacctgataagatctttgttagtcctgaaactgagaaaggatctaaagtcattggagatgagtctgctcgtatgatctctaggcataatcgccgtggcggtagcagtagtagttgccagcttcgtcgcaagccattcggagaagtccatctcaaggtttcttcagttagagagagtagatcagatgataagaggttttccatttttactggtaccaagaggcttcatttgcgtgcggagacgcgagaggaccgaacaacttgggttgaggctttacaagctgttaaagatatgtttccaaggatgtctaatagtgagttgatggctccgactaacaatttggctatgtcgacggagaagattaggttaaggttgattgaggaaggagtaagtgagttagctattcaggactgtgagcaaattatgaagtctgagttctcagcacttcagagccagctggtgcttcttaaacagaagcagtggcttctcattgatactcttaggcagttggagacagaaaaggtagatcttgagaacacagttgtagatgaaagtcaaagacaggctgataatggatgttccggtgaattaagacacgagaagttcagtgaaggcactgccactgagtctgatgatgataatgaacgaggtgatgccgccgaggaggaatttgatgaggaagaaaataccttttttgatacacgtgattttctttcttcaagttctttcaagagtagtggttctggttttcgtacatcatcattttcgtccgatgaagatggctttgagtctgaagatgatattgatccttccatcaagtctattggatgcaattatcctcgcgtcaaaaggaggaagaatttacctgatccggttgaaaaagagaaaagtgttagcctttggtcaatgatcaaagacaatatagggaaggatctcacaaaagtctgtcttcctgtttacttcaacgagccactttcttctttacagaaatgttttgaggatttggaatattcgtaccttcttgaccgagcatttgaatatggcaaaaggggaaatagcctcatgaggatacttaatgtagctgcttttgctgtatctgggtatgcatcaactgaaggaagaatttgcaaaccttttaatccattgttaggtgaaacatacgaggcagactatccagacaaaggccttcgatttttttcagaaaaggtcagtcatcatcctatggttgtcgcatgccattgtgatggcaccggatggaaattctggggagacagcaatcttaggagcaaattctggggtcgatctattcagcttgatcctgttggtgtattgactttgcaatttgatgatggagaaatccttcagtggagtaaggtgactacatcaatatacaatctcatacttggtaaactatactgtgatcactatggtactatgcgtattgagggtagtgcagaatactcatgtaaacttaaattcaaggagcagtccatcatagaccgaaatcctcatcaggttcatggtatagttcaaaacaagagtgggaagacagtggcaactatgtttgggaaatgggatgagagcatacactttgtgacgggtgattgttctggaaaagggaaattgagtgaagatatgtcaggagctcaacttctctggaaacggagcaaacctcctggaaacgcaacaaagtataatctaacacgttttgcaatcacattgaatgagcttacacctgggcttaaggagaggctgccaccaacggattcaaggctgcgaccggaccagaggtatctcgagaacggagagtttgaaatggccaacacagaaaagttgcggctggaacagcgacaacgtcaggcgaggaagatgcaggagagaggatggaagccgaggtggttcatgaaggagaaaggaagcgagtcttaccgatacaaaggaggttactgggaagcccgagaggatggatcatgggtagactgtccagacatcttcggccacatcgattccgatcaacaaatgatagagtaaaacgaaattaccattcacatcgattcttgaatcacgaagtattaaattcctcctatcttcctttctaattacgttttcgtttcttctattatttttcttcctttttcatctcattattctttactcgccatttcacgttacaggacctttacctttagtctctttttttcttttcttctttgtatatcatgaaatagtttcgcgtcatacccaaatttgtccaatccttgtaagtggaagaatgtgctccaaatcatacatggctatattgaataagcaaaaggaagaaagttacttatg

SEQ ID NO: 101277 - protein, 814 aa, Arabidopsis thaliana
  peptide (1)..(814): Ceres Seq. ID no. 13607435
  misc_feature (397)..(793): Pfam Name: Oxysterol-binding protein Pfam Description: Oxysterol-binding protein
  misc_feature (103)..(803): Homolog of NCBI NO: 15222204 NR Description: oxysterol-binding protein -related [Arabidopsis
  misc_feature (396)..(809): Homolog of NCBI NO: 18415950 NR Description: expressed protein [Arabidopsis thaliana] AT4g22540/F7K2_120 [Arabidopsis thaliana]
  misc_feature (106)..(386): Homolog of NCBI NO: 18415950 NR Description: expressed protein [Arabidopsis thaliana] AT4g22540/F7K2_120 [Arabidopsis thaliana]
  misc_feature (359)..(809): Homolog of NCBI NO: 15235381 NR Description: SWH1 protein -related [Arabidopsis thaliana]
  misc_feature (103)..(374): Homolog of NCBI NO: 15235381 NR Description: SWH1 protein -related [Arabidopsis thaliana]
  misc_feature (374)..(757): Homolog of NCBI NO: 7486604 NR Description: hypothetical protein F7K2.120 - Arabidopsis >gi|3892709|emb|CAA22159.1| putative protein [Arabidopsis >gi|7269100|emb|CAB79209.1| putative protein [Arabidopsis
  misc_feature (106)..(386): Homolog of NCBI NO: 7486604 NR Description: hypothetical protein F7K2.120 - Arabidopsis >gi|3892709|emb|CAA22159.1| putative protein [Arabidopsis >gi|7269100|emb|CAB79209.1| putative protein [Arabidopsis
  misc_feature (341)..(806): Homolog of NCBI NO: 15224598 NR Description: oxysterol-binding protein -related [Arabidopsis
  misc_feature (92)..(540): Homolog of NCBI NO: 29371981 NR Description: putative oxysterol-binding protein [Oryza sativa
  misc_feature (351)..(809): Homolog of NCBI NO: 22450593 NR Description: putative oxysterol binding protein [Oryza sativa
MHPFCCVTTVSDHSPSMPPLPEPQPPLPNYAADFGSARSEPIITRSASQSYNHSGQFNNNLIHSLSFNHHQSDVTDRLGQRVLALPAAVREPPVDVKINDIVGNGIAGILYKWVNYGRGWRPRWFVLQDGVLSYYKIHGPDKIFVSPETEKGSKVIGDESARMISRHNRRGGSSSSCQLRRKPFGEVHLKVSSVRESRSDDKRFSIFTGTKRLHLRAETREDRTTWVEALQAVKDMFPRMSNSELMAPTNNLAMSTEKIRLRLIEEGVSELAIQDCEQIMKSEFSALQSQLVLLKQKQWLLIDTLRQLETEKVDLENTVVDESQRQADNGCSGELRHEKFSEGTATESDDDNERGDAAEEEFDEEENTFFDTRDFLSSSSFKSSGSGFRTSSFSSDEDGFESEDDIDPSIKSIGCNYPRVKRRKNLPDPVEKEKSVSLWSMIKDNIGKDLTKVCLPVYFNEPLSSLQKCFEDLEYSYLLDRAFEYGKRGNSLMRILNVAAFAVSGYASTEGRICKPFNPLLGETYEADYPDKGLRFFSEKVSHHPMVVACHCDGTGWKFWGDSNLRSKFWGRSIQLDPVGVLTLQFDDGEILQWSKVTTSIYNLILGKLYCDHYGTMRIEGSAEYSCKLKFKEQSIIDRNPHQVHGIVQNKSGKTVATMFGKWDESIHFVTGDCSGKGKLSEDMSGAQLLWKRSKPPGNATKYNLTRFAITLNELTPGLKERLPPTDSRLRPDQRYLENGEFEMANTEKLRLEQRQRQARKMQERGWKPRWFMKEKGSESYRYKGGYWEAREDGSWVDCPDIFGHIDSDQQMIE

SEQ ID NO: 101278 - protein, 798 aa, Arabidopsis thaliana
  peptide (1)..(798): Ceres Seq. ID no. 13607436
  misc_feature (381)..(777): Pfam Name: Oxysterol-binding protein Pfam Description: Oxysterol-binding protein
  misc_feature (87)..(787): Homolog of NCBI NO: 15222204 NR Description: oxysterol-binding protein -related [Arabidopsis
  misc_feature (380)..(793): Homolog of NCBI NO: 18415950 NR Description: expressed protein [Arabidopsis thaliana] AT4g22540/F7K2_120 [Arabidopsis thaliana]
  misc_feature (90)..(370): Homolog of NCBI NO: 18415950 NR Description: expressed protein [Arabidopsis thaliana] AT4g22540/F7K2_120 [Arabidopsis thaliana]
  misc_feature (343)..(793): Homolog of NCBI NO: 15235381 NR Description: SWH1 protein -related [Arabidopsis thaliana]
  misc_feature (87)..(358): Homolog of NCBI NO: 15235381 NR Description: SWH1 protein -related [Arabidopsis thaliana]
  misc_feature (358)..(741): Homolog of NCBI NO: 7486604 NR Description: hypothetical protein F7K2.120 - Arabidopsis >gi|3892709|emb|CAA22159.1| putative protein [Arabidopsis >gi|7269100|emb|CAB79209.1| putative protein [Arabidopsis
  misc_feature (90)..(370): Homolog of NCBI NO: 7486604 NR Description: hypothetical protein F7K2.120 - Arabidopsis >gi|3892709|emb|CAA22159.1| putative protein [Arabidopsis >gi|7269100|emb|CAB79209.1| putative protein [Arabidopsis
  misc_feature (325)..(790): Homolog of NCBI NO: 15224598 NR Description: oxysterol-binding protein -related [Arabidopsis
  misc_feature (76)..(524): Homolog of NCBI NO: 29371981 NR Description: putative oxysterol-binding protein [Oryza sativa
  misc_feature (335)..(793): Homolog of NCBI NO: 22450593 NR Description: putative oxysterol binding protein [Oryza sativa
MPPLPEPQPPLPNYAADFGSARSEPIITRSASQSYNHSGQFNNNLIHSLSFNHHQSDVTDRLGQRVLALPAAVREPPVDVKINDIVGNGIAGILYKWVNYGRGWRPRWFVLQDGVLSYYKIHGPDKIFVSPETEKGSKVIGDESARMISRHNRRGGSSSSCQLRRKPFGEVHLKVSSVRESRSDDKRFSIFTGTKRLHLRAETREDRTTWVEALQAVKDMFPRMSNSELMAPTNNLAMSTEKIRLRLIEEGVSELAIQDCEQIMKSEFSALQSQLVLLKQKQWLLIDTLRQLETEKVDLENTVVDESQRQADNGCSGELRHEKFSEGTATESDDDNERGDAAEEEFDEEENTFFDTRDFLSSSSFKSSGSGFRTSSFSSDEDGFESEDDIDPSIKSIGCNYPRVKRRKNLPDPVEKEKSVSLWSMIKDNIGKDLTKVCLPVYFNEPLSSLQKCFEDLEYSYLLDRAFEYGKRGNSLMRILNVAAFAVSGYASTEGRICKPFNPLLGETYEADYPDKGLRFFSEKVSHHPMVVACHCDGTGWKFWGDSNLRSKFWGRSIQLDPVGVLTLQFDDGEILQWSKVTTSIYNLILGKLYCDHYGTMRIEGSAEYSCKLKFKEQSIIDRNPHQVHGIVQNKSGKTVATMFGKWDESIHFVTGDCSGKGKLSEDMSGAQLLWKRSKPPGNATKYNLTRFAITLNELTPGLKERLPPTDSRLRPDQRYLENGEFEMANTEKLRLEQRQRQARKMQERGWKPRWFMKEKGSESYRYKGGYWEAREDGSWVDCPDIFGHIDSDQQMIE

SEQ ID NO: 101279 - protein, 652 aa, Arabidopsis thaliana
  peptide (1)..(652): Ceres Seq. ID no. 13607437
  misc_feature (235)..(631): Pfam Name: Oxysterol-binding protein Pfam Description: Oxysterol-binding protein
  misc_feature (1)..(641): Homolog of NCBI NO: 15222204 NR Description: oxysterol-binding protein -related [Arabidopsis
  misc_feature (234)..(647): Homolog of NCBI NO: 18415950 NR Description: expressed protein [Arabidopsis thaliana] AT4g22540/F7K2_120 [Arabidopsis thaliana]
  misc_feature (1)..(224): Homolog of NCBI NO: 18415950 NR Description: expressed protein [Arabidopsis thaliana] AT4g22540/F7K2_120 [Arabidopsis thaliana]
  misc_feature (197)..(647): Homolog of NCBI NO: 15235381 NR Description: SWH1 protein -related [Arabidopsis thaliana]
  misc_feature (1)..(212): Homolog of NCBI NO: 15235381 NR Description: SWH1 protein -related [Arabidopsis thaliana]
  misc_feature (212)..(595): Homolog of NCBI NO: 7486604 NR Description: hypothetical protein F7K2.120 - Arabidopsis >gi|3892709|emb|CAA22159.1| putative protein [Arabidopsis >gi|7269100|emb|CAB79209.1| putative protein [Arabidopsis
  misc_feature (1)..(224): Homolog of NCBI NO: 7486604 NR Description: hypothetical protein F7K2.120 - Arabidopsis >gi|3892709|emb|CAA22159.1| putative protein [Arabidopsis >gi|7269100|emb|CAB79209.1| putative protein [Arabidopsis
  misc_feature (179)..(644): Homolog of NCBI NO: 15224598 NR Description: oxysterol-binding protein -related [Arabidopsis
  misc_feature (1)..(378): Homolog of NCBI NO: 29371981 NR Description: putative oxysterol-binding protein [Oryza sativa
  misc_feature (189)..(647): Homolog of NCBI NO: 22450593 NR Description: putative oxysterol binding protein [Oryza sativa
MISRHNRRGGSSSSCQLRRKPFGEVHLKVSSVRESRSDDKRFSIFTGTKRLHLRAETREDRTTWVEALQAVKDMFPRMSNSELMAPTNNLAMSTEKIRLRLIEEGVSELAIQDCEQIMKSEFSALQSQLVLLKQKQWLLIDTLRQLETEKVDLENTVVDESQRQADNGCSGELRHEKFSEGTATESDDDNERGDAAEEEFDEEENTFFDTRDFLSSSSFKSSGSGFRTSSFSSDEDGFESEDDIDPSIKSIGCNYPRVKRRKNLPDPVEKEKSVSLWSMIKDNIGKDLTKVCLPVYFNEPLSSLQKCFEDLEYSYLLDRAFEYGKRGNSLMRILNVAAFAVSGYASTEGRICKPFNPLLGETYEADYPDKGLRFFSEKVSHHPMVVACHCDGTGWKFWGDSNLRSKFWGRSIQLDPVGVLTLQFDDGEILQWSKVTTSIYNLILGKLYCDHYGTMRIEGSAEYSCKLKFKEQSIIDRNPHQVHGIVQNKSGKTVATMFGKWDESIHFVTGDCSGKGKLSEDMSGAQLLWKRSKPPGNATKYNLTRFAITLNELTPGLKERLPPTDSRLRPDQRYLENGEFEMANTEKLRLEQRQRQARKMQERGWKPRWFMKEKGSESYRYKGGYWEAREDGSWVDCPDIFGHIDSDQQMIE

SEQ ID NO: 101280 - DNA, 626 bp, Arabidopsis thaliana
  misc_feature (1)..(626): Ceres Seq. ID no. 13607450
  misc_feature: MA Experiment ID: 108434 Result: Up-regulated in Transcription
  misc_feature: MA Experiment 108434 PARAMETER Experiment Name: At_Root_Tips_cDNA_P Parameter: Tissue Value: Root Tips
  misc_feature: MA Experiment ID: 108462 Result: Down-regulated in Transcription
  misc_feature: MA Experiment 108462 PARAMETER Experiment Name: At_Germinating_Seeds_cDNA_P Parameter: Age (day) Value: 2 vs. 0
  misc_feature: MA Experiment 108462 PARAMETER Experiment Name: At_Germinating_Seeds_cDNA_P Parameter: Tissue Value: Germinating Seeds
  misc_feature: MA Experiment ID: 108463 Result: Down-regulated in Transcription
  misc_feature: MA Experiment 108463 PARAMETER Experiment Name: At_Germinating_Seeds_cDNA_P Parameter: Age (day) Value: 3 vs. 0
  misc_feature: MA Experiment 108463 PARAMETER Experiment Name: At_Germinating_Seeds_cDNA_P Parameter: Tissue Value: Germinating Seeds
  misc_feature: MA Experiment ID: 108573 Result: Down-regulated in Transcription
  misc_feature: MA Experiment 108573 PARAMETER Experiment Name: At_Drought_cDNA_P Parameter: Timepoint (hr) Value: 6
  misc_feature: MA Experiment 108573 PARAMETER Experiment Name: At_Drought_cDNA_P Parameter: Tissue Value: Aerial
  misc_feature: MA Experiment 108573 PARAMETER Experiment Name: At_Drought_cDNA_P Parameter: Treatment Value: Drought vs. No Drought
  misc_feature: MA Experiment ID: 20000113 Result: Down-regulated in Transcription
  misc_feature: MA Experiment 20000113 PARAMETER Experiment Name: At_42deg_Heat_cDNA_P Parameter: Temperature (deg C) Value: 42 vs. 22
  misc_feature: MA Experiment 20000113 PARAMETER Experiment Name: At_42deg_Heat_cDNA_P Parameter: Timepoint (hr) Value: 8
  misc_feature: MA Experiment 20000113 PARAMETER Experiment Name: At_42deg_Heat_cDNA_P Parameter: Tissue Value: Aerial
  misc_feature: MA Experiment ID: 20000180 Result: Down-regulated in Transcription
  misc_feature: MA Experiment 20000180 PARAMETER Experiment Name: At_Germinating_Seeds_P Parameter: Age (hr) Value: 24 vs. 0
  misc_feature: MA Experiment 20000180 PARAMETER Experiment Name: At_Germinating_Seeds_P Parameter: Tissue Value: Germinating Seeds
  misc_feature: MA Experiment ID: 20000184 Result: Up-regulated in Transcription
  misc_feature: MA Experiment 20000184 PARAMETER Experiment Name: At_Shoots__P Parameter: Age (day) Value: 7
  misc_feature: MA Experiment 20000184 PARAMETER Experiment Name: At_Shoots__P Parameter: Tissue Value: Shoots vs. Whole Plant
  misc_feature: MA Experiment ID: 20000437 Result: Down-regulated in Transcription
  misc_feature: MA Experiment 20000437 PARAMETER Experiment Name: At_Drought_P Parameter: Age (day) Value: 8
  misc_feature: MA Experiment 20000437 PARAMETER Experiment Name: At_Drought_P Parameter: Organism Value: A. thaliana
  misc_feature: MA Experiment 20000437 PARAMETER Experiment Name: At_Drought_P Parameter: Plant Line Value: WS
  misc_feature: MA Experiment 20000437 PARAMETER Experiment Name: At_Drought_P Parameter: Timepoint (hr) Value: 24
  misc_feature: MA Experiment 20000437 PARAMETER Experiment Name: At_Drought_P Parameter: Tissue Value: Whole Plant
  misc_feature: MA Experiment 20000437 PARAMETER Experiment Name: At_Drought_P Parameter: Treatment Value: Drought vs. No Drought
  misc_feature: MA Experiment ID: 20001558 Result: Up-regulated in Transcription
  misc_feature: MA Experiment 20001558 PARAMETER Experiment Name: At_Drought_Soil_Dry_P Parameter: Age (day) Value: 27
  misc_feature: MA Experiment 20001558 PARAMETER Experiment Name: At_Drought_Soil_Dry_P Parameter: Organism Value: A. thaliana
  misc_feature: MA Experiment 20001558 PARAMETER Experiment Name: At_Drought_Soil_Dry_P Parameter: Plant Line Value: WS
  misc_feature: MA Experiment 20001558 PARAMETER Experiment Name: At_Drought_Soil_Dry_P Parameter: Post Timepoint (hr) Value: 6
  misc_feature: MA Experiment 20001558 PARAMETER Experiment Name: At_Drought_Soil_Dry_P Parameter: Post-Treatment Value: Re-Water vs. No Drought
  misc_feature: MA Experiment 20001558 PARAMETER Experiment Name: At_Drought_Soil_Dry_P Parameter: Timepoint (day) Value: 13
  misc_feature: MA Experiment 20001558 PARAMETER Experiment Name: At_Drought_Soil_Dry_P Parameter: Treatment Value: Drought vs. No Drought
  misc_feature: MA Experiment ID: 20001757 Result: Up-regulated in Transcription
  misc_feature: MA Experiment 20001757 PARAMETER Experiment Name: At_50mM_NH4NO3_L-to-H_P Parameter: Timepoint (hr) Value: 6
  misc_feature: MA Experiment 20001757 PARAMETER Experiment Name: At_50mM_NH4NO3_L-to-H_P Parameter: Tissue Value: Leaf
  misc_feature: MA Experiment 20001757 PARAMETER Experiment Name: At_50mM_NH4NO3_L-to-H_P Parameter: Treatment Value: 50mM NH4NO3 vs 100mM Mannitol
attcttcaacagaattagggttacatgtgcggactctatataaatcttttttgcctcctacgaatcacaagtaataagaaaacaatggagcaaacttttattatgatcaagcctgacggcgtccagagaggactcatcggtgaagtcatctgcaggtttgagaagaagggtttcactttgaaaggtctgaagttgatcagtgtagagagatcttttgctgagaagcactacgaagacttatcttcaaagtctttcttcagtggactcgttgactacattgtatccggccctgttgttgctatgatctgggaaggaaagaatgttgtcttgaccggaagaaagatcattggagctaccaacccagcagcttctgagcctggaactatccgtggggactttgctattgacattggcaggaacgtgatccatggtagtgactctgtcgagagtgcaagaaaggagattgctttgtggttccctgatggacctgtcaactggcagagcagcgttcacccttgggtctatgaaacttgatgatctgttgctttttcagtagtgtgttttcgacattgcttgtcttttgaacaagacttctatatttaagttgagtttgattatccttctct

SEQ ID NO: 101281 - protein, 169 aa, Arabidopsis thaliana
  peptide (1)..(169): Ceres Seq. ID no. 13607451
  misc_feature (22)..(158): Pfam Name: Nucleoside diphosphate kinase Pfam Description: Nucleoside diphosphate kinase
  misc_feature (1)..(169): Homolog of NCBI NO: 18413214 NR Description: nucleoside-diphosphate kinase [Arabidopsis
  misc_feature (21)..(169): Homolog of NCBI NO: 730129 NR Description: Nucleoside diphosphate kinase I (NDK I) (NDP
  misc_feature (23)..(169): Homolog of NCBI NO: 322552 NR Description: nucleoside-diphosphate kinase (EC 2.7.4.6) - thaliana (fragment) >gi|16396|emb|CAA49170.1| nucleoside
  misc_feature (27)..(169): Homolog of NCBI NO: 13899069 NR Description: Unknown protein [Arabidopsis thaliana]
  misc_feature (21)..(168): Homolog of NCBI NO: 19570344 NR Description: nucleoside diphosphate kinase 1 [Brassica rapa]
  misc_feature (22)..(168): Homolog of NCBI NO: 1389640 NR Description: PNDKN1 [Pisum sativum]
  misc_feature (22)..(168): Homolog of NCBI NO: 1346672 NR Description: Nucleoside diphosphate kinase I (NDK I) (NDP
  misc_feature (21)..(169): Homolog of NCBI NO: 322551 NR Description: nucleoside-diphosphate kinase (EC 2.7.4.6) - thaliana >gi|16398|emb|CAA49173.1| nucleoside diphosphate kinase
  misc_feature (21)..(168): Homolog of NCBI NO: 2498076 NR Description: NUCLEOSIDE DIPHOSPHATE KINASE (NDK) (NDP KINASE)
MCGLYINLFCLLRITSNKKTMEQTFIMIKPDGVQRGLIGEVICRFEKKGFTLKGLKLISVERSFAEKHYEDLSSKSFFSGLVDYIVSGPVVAMIWEGKNVVLTGRKIIGATNPAASEPGTIRGDFAIDIGRNVIHGSDSVESARKEIALWFPDGPVNWQSSVHPWVYET

SEQ ID NO: 101282 - protein, 149 aa, Arabidopsis thaliana; identical to SEQ ID NO: 21514
  peptide (1)..(149): Ceres Seq. ID no. 13607452
  misc_feature (2)..(138): Pfam Name: Nucleoside diphosphate kinase Pfam Description: Nucleoside diphosphate kinase
  misc_feature (1)..(149): Homolog of NCBI NO: 18413214 NR Description: nucleoside-diphosphate kinase [Arabidopsis
  misc_feature (1)..(149): Homolog of NCBI NO: 730129 NR Description: Nucleoside diphosphate kinase I (NDK I) (NDP
  misc_feature (3)..(149): Homolog of NCBI NO: 322552 NR Description: nucleoside-diphosphate kinase (EC 2.7.4.6) - thaliana (fragment) >gi|16396|emb|CAA49170.1| nucleoside
  misc_feature (7)..(149): Homolog of NCBI NO: 13899069 NR Description: Unknown protein [Arabidopsis thaliana]
  misc_feature (1)..(148): Homolog of NCBI NO: 19570344 NR Description: nucleoside diphosphate kinase 1 [Brassica rapa]
  misc_feature (2)..(148): Homolog of NCBI NO: 1389640 NR Description: PNDKN1 [Pisum sativum]
  misc_feature (2)..(148): Homolog of NCBI NO: 1346672 NR Description: Nucleoside diphosphate kinase I (NDK I) (NDP
  misc_feature (1)..(149): Homolog of NCBI NO: 322551 NR Description: nucleoside-diphosphate kinase (EC 2.7.4.6) - thaliana >gi|16398|emb|CAA49173.1| nucleoside diphosphate kinase
  misc_feature (1)..(148): Homolog of NCBI NO: 2498076 NR Description: NUCLEOSIDE DIPHOSPHATE KINASE (NDK) (NDP KINASE)

SEQ ID NO: 101283 - protein, 143 aa, Arabidopsis thaliana; identical to SEQ ID NO: 21515
  peptide (1)..(143): Ceres Seq. ID no. 13607453
  misc_feature (1)..(132): Pfam Name: Nucleoside diphosphate kinase Pfam Description: Nucleoside diphosphate kinase
  misc_feature (1)..(143): Homolog of NCBI NO: 18413214 NR Description: nucleoside-diphosphate kinase [Arabidopsis
  misc_feature (1)..(143): Homolog of NCBI NO: 730129 NR Description: Nucleoside diphosphate kinase I (NDK I) (NDP
  misc_feature (1)..(143): Homolog of NCBI NO: 322552 NR Description: nucleoside-diphosphate kinase (EC 2.7.4.6) - thaliana (fragment) >gi|16396|emb|CAA49170.1| nucleoside
  misc_feature (1)..(143): Homolog of NCBI NO: 13899069 NR Description: Unknown protein [Arabidopsis thaliana]
  misc_feature (1)..(142): Homolog of NCBI NO: 19570344 NR Description: nucleoside diphosphate kinase 1 [Brassica rapa]
  misc_feature (1)..(142): Homolog of NCBI NO: 1389640 NR Description: PNDKN1 [Pisum sativum]
  misc_feature (1)..(142): Homolog of NCBI NO: 1346672 NR Description: Nucleoside diphosphate kinase I (NDK I) (NDP
  misc_feature (1)..(143): Homolog of NCBI NO: 322551 NR Description: nucleoside-diphosphate kinase (EC 2.7.4.6) - thaliana >gi|16398|emb|CAA49173.1| nucleoside diphosphate kinase
  misc_feature (1)..(142): Homolog of NCBI NO: 2498076 NR Description: NUCLEOSIDE DIPHOSPHATE KINASE (NDK) (NDP KINASE)

SEQ ID NO: 101284 - DNA, 1265 bp, Arabidopsis thaliana
  misc_feature (1)..(1265): Ceres Seq. ID no. 13607454
  misc_feature: MA Experiment ID: 108501 Result: Up-regulated in Transcription
  misc_feature: MA Experiment 108501 PARAMETER Experiment Name: At_ap2_floral_buds_cDNA_P Parameter: Plant Line Value: ap2 (Ler.)
  misc_feature: MA Experiment 108501 PARAMETER Experiment Name: At_ap2_floral_buds_cDNA_P Parameter: Tissue Value: Closed Flower
  misc_feature: MA Experiment ID: 20000235 Result: Up-regulated in Transcription
  misc_feature: MA Experiment 20000235 PARAMETER Experiment Name: At_Siliques_P Parameter: Age (day) Value: 21
  misc_feature: MA Experiment 20000235 PARAMETER Experiment Name: At_Siliques_P Parameter: Organism Value: A. thaliana
  misc_feature: MA Experiment 20000235 PARAMETER Experiment Name: At_Siliques_P Parameter: Plant Line Value: WS
  misc_feature: MA Experiment 20000235 PARAMETER Experiment Name: At_Siliques_P Parameter: Tissue Value: 5-10mm Siliques vs. Whole Plant
agatctgaccaaagcaagaagggcttttactaagagtaaaacagaggaatatggagaccaccgtgaaaaacaagcaagtgatactgagaaattatgtgaagggtatccctaaagaatctgacctaatgattatcacagcttcagaccccgtggaactcaaggttaagcccggatcagcggcggttatggtgaggaatctttacttgtcttgtgacccttacatggggattctcatgagagaaccaactccttccactctagcacttttggatgccttcatccccggaaagcctatagctggaattggagtgtctcaagtaatagattctgatgatccatcttttacgaaaggcgatatgatttggggaattgtgaactgggaggagtttagtactatcaacccggctgctatattcaaaatcgacgtcaatatcaatgttcctctcagctactatactggaatcctcggtatgataggtttaactgcttacgccgggtttttcgagatatgttcacctaagaaaggagacacagtgttcgtgtctgctgcttctggcgcggttggacagctcgtgggtcagtttgcaaagttgatgggctgctatgttgttggaagtgccggaagtaaacaaaaggtcgatctcctgctgaacaaattcggttacgatgatgcattcaattataaggaagagcctgaccttgactccgccttgaagaggtgtgtaccaaaaggtattgacatatactttgagaacgtgggaggcaaaatgcttgacgcggttctacttaacatgaaaacgtatggacgaatcgctgtatgtgggatgatatctcagtaccatcttgaaaccagagacaggttacaaaatctacctgacatcatattcaagaagataaggatgcaagggtttgcttcttatgactttatagatagattcccaaagttcttggagtttgttcttccctacataaaagaagagaaattagcgtacgtggaagacattgttgaaggactcgagaatggtcctgctgctcttgtaggacttcttcatggaaaaaacgttggtaagcaagttctcaaggttgcttgagagtaaagaaatctatccatgtatggatatatgtaaaattacaaaaaaactaccttgtatgtcgtattttaagggtatgggttctaattggaatttatatgaaataaaagggcatatagttaaattccatattttcgtgtttaaatgggcccaagtgaagcgcagcttaataat

SEQ ID NO: 101285 - protein, 346 aa, Arabidopsis thaliana; identical to SEQ ID NO: 21097
  peptide (1)..(346): Ceres Seq. ID no. 13607455
  misc_feature (110)..(345): Pfam Name: Zinc-binding dehydrogenase Pfam Description: Zinc-binding dehydrogenase
  misc_feature (1)..(346): Homolog of NCBI NO: 18411352 NR Description: NADP-dependent oxidoreductase, putative
  misc_feature (1)..(346): Homolog of NCBI NO: 21555641 NR Description: allyl alcohol dehydrogenase-like protein
  misc_feature (1)..(344): Homolog of NCBI NO: 11357163 NR Description: allyl alcohol dehydrogenase-like protein -
  misc_feature (4)..(346): Homolog of NCBI NO: 15228456 NR Description: NADP-dependent oxidoreductase (P2), putative
  misc_feature (4)..(346): Homolog of NCBI NO: 22326861 NR Description: NADP-dependent oxidoreductase, putative thaliana] >gi|16604344|gb|AAL24178.1| AT5g16970/F2K13_120 thaliana] >gi|23297366|gb|AAN12951.1| putative quinone
  misc_feature (4)..(346): Homolog of NCBI NO: 17529140 NR Description: putative quinone oxidoreductase [Arabidopsis
  misc_feature (7)..(346): Homolog of NCBI NO: 15237890 NR Description: allyl alcohol dehydrogenase, putative
  misc_feature (4)..(346): Homolog of NCBI NO: 15237888 NR Description: NADP-dependent oxidoreductase (P1), putative
  misc_feature (3)..(346): Homolog of NCBI NO: 21536967 NR Description: quinone oxidoreductase-like protein [Arabidopsis
  misc_feature (7)..(346): Homolog of NCBI NO: 21554121 NR Description: quinone oxidoreductase-like protein [Arabidopsis

SEQ ID NO: 101286 - protein, 321 aa, Arabidopsis thaliana; identical to SEQ ID NO: 21098
  peptide (1)..(321): Ceres Seq. ID no. 13607456
  misc_feature (85)..(320): Pfam Name: Zinc-binding dehydrogenase Pfam Description: Zinc-binding dehydrogenase
  misc_feature (1)..(321): Homolog of NCBI NO: 18411352 NR Description: NADP-dependent oxidoreductase, putative
  misc_feature (1)..(321): Homolog of NCBI NO: 21555641 NR Description: allyl alcohol dehydrogenase-like protein
  misc_feature (1)..(319): Homolog of NCBI NO: 11357163 NR Description: allyl alcohol dehydrogenase-like protein -
  misc_feature (1)..(321): Homolog of NCBI NO: 15228456 NR Description: NADP-dependent oxidoreductase (P2), putative
  misc_feature (1)..(321): Homolog of NCBI NO: 22326861 NR Description: NADP-dependent oxidoreductase, putative thaliana] >gi|16604344|gb|AAL24178.1| AT5g16970/F2K13_120 thaliana] >gi|23297366|gb|AAN12951.1| putative quinone
  misc_feature (1)..(321): Homolog of NCBI NO: 17529140 NR Description: putative quinone oxidoreductase [Arabidopsis
  misc_feature (1)..(321): Homolog of NCBI NO: 15237890 NR Description: allyl alcohol dehydrogenase, putative
  misc_feature (1)..(321): Homolog of NCBI NO: 15237888 NR Description: NADP-dependent oxidoreductase (P1), putative
  misc_feature (1)..(321): Homolog of NCBI NO: 21536967 NR Description: quinone oxidoreductase-like protein [Arabidopsis
  misc_feature (1)..(321): Homolog of NCBI NO: 21554121 NR Description: quinone oxidoreductase-like protein [Arabidopsis

SEQ ID NO: 101287 - protein, 301 aa, Arabidopsis thaliana; identical to SEQ ID NO: 21099
  peptide (1)..(301): Ceres Seq. ID no. 13607457
  misc_feature (65)..(300): Pfam Name: Zinc-binding dehydrogenase Pfam Description: Zinc-binding dehydrogenase
  misc_feature (1)..(301): Homolog of NCBI NO: 18411352 NR Description: NADP-dependent oxidoreductase, putative
  misc_feature (1)..(301): Homolog of NCBI NO: 21555641 NR Description: allyl alcohol dehydrogenase-like protein
  misc_feature (1)..(299): Homolog of NCBI NO: 11357163 NR Description: allyl alcohol dehydrogenase-like protein -
  misc_feature (1)..(301): Homolog of NCBI NO: 15228456 NR Description: NADP-dependent oxidoreductase (P2), putative
  misc_feature (1)..(301): Homolog of NCBI NO: 22326861 NR Description: NADP-dependent oxidoreductase, putative thaliana] >gi|16604344|gb|AAL24178.1| AT5g16970/F2K13_120 thaliana] >gi|23297366|gb|AAN12951.1| putative quinone
  misc_feature (1)..(301): Homolog of NCBI NO: 17529140 NR Description: putative quinone oxidoreductase [Arabidopsis
  misc_feature (1)..(301): Homolog of NCBI NO: 15237890 NR Description: allyl alcohol dehydrogenase, putative
  misc_feature (1)..(301): Homolog of NCBI NO: 15237888 NR Description: NADP-dependent oxidoreductase (P1), putative
  misc_feature (1)..(301): Homolog of NCBI NO: 21536967 NR Description: quinone oxidoreductase-like protein [Arabidopsis
  misc_feature (1)..(301): Homolog of NCBI NO: 21554121 NR Description: quinone oxidoreductase-like protein [Arabidopsis

SEQ ID NO: 101288 - DNA, 653 bp, Arabidopsis thaliana
  misc_feature (1)..(653): Ceres Seq. ID no. 13607482
  misc_feature: MA Experiment ID: 108579 Result: Down-regulated in Transcription
  misc_feature: MA Experiment 108579 PARAMETER Experiment Name: At_4deg_Cold_cDNA_P Parameter: Temperature (deg C) Value: 4 vs. 22
  misc_feature: MA Experiment 108579 PARAMETER Experiment Name: At_4deg_Cold_cDNA_P Parameter: Timepoint (hr) Value: 6
  misc_feature: MA Experiment 108579 PARAMETER Experiment Name: At_4deg_Cold_cDNA_P Parameter: Tissue Value: Aerial
  misc_feature: MA Experiment ID: 20000224 Result: Down-regulated in Transcription
  misc_feature: MA Experiment ID: 20000227 Result: Down-regulated in Transcription
  misc_feature: MA Experiment 20000227 PARAMETER Experiment Name: At_Root-Tips-vs-Tops_P Parameter: Tissue Value: Root Tips vs. Root Tops
ctggaactagccactgcgatcggagaagaaaaagctcgagagacgccatggaaatttcccaagctcgttcaagcttcgtttgtcttcttcttctgttactctccatgtgtttcgttccctgcgtcttttccaaatctcctcgtcctatctccgatgtggagatcaggcagaagaagagcgaatgctacggtgatatagagagtgggttatggggttggcaatgcaaatcttctgcaatagcgaaagagaattgtgcgctgcgatgcctttctccggtttgctatcaactcatttatgagagtgatccgcttgaagaaggtgaaaaagatttgattaggagccaagagtacaagtattgtatgtacaagtcatcactcggggaaagcttagagggtgttcgaggcatcttttgatggtatcaaataagactttctcagtgaagacatttgccaaaatctgagctaagctcttgaatttctgatcagtagtattctgctctgtcgcgtttgaagccatgtaaggcttcttttattataaacctcaatttttgggttaatggttgtttatatgaaacgtttacgtttatgattggcaaatccactgaatcttgaaaccattgtacaaatcagtcttaatacgcacagattggtccc

SEQ ID NO: 101289 - protein, 136 aa, Arabidopsis thaliana
  peptide (1)..(136): Ceres Seq. ID no. 13607483
  misc_feature (16)..(136): Homolog of NCBI NO: 18418364 NR Description: expressed protein [Arabidopsis thaliana]
  misc_feature (16)..(136): Homolog of NCBI NO: 21618076 NR Description: unknown [Arabidopsis thaliana]
  misc_feature (16)..(123): Homolog of NCBI NO: 11346183 NR Description: hypothetical protein K10A8_90 - Arabidopsis >gi|9755786|emb|CAC01905.1| hypothetical protein [Arabidopsis
  misc_feature (113)..(136): Homolog of NCBI NO: 11346183 NR Description: hypothetical protein K10A8_90 - Arabidopsis >gi|9755786|emb|CAC01905.1| hypothetical protein [Arabidopsis
  misc_feature (51)..(136): Homolog of NCBI NO: 34902472 NR Description: Putative DNAJ protein [Oryza sativa (japonica group)] >gi|22748333|gb|AAN05335.1| Putative DNAJ protein [Oryza
GTSHCDRRRKSSRDAMEISQARSSFVCLLLLLLSMCFVPCVFSKSPRPISDVEIRQKKSECYGDIESGLWGWQCKSSAIAKENCALRCLSPVCYQLIYESDPLEEGEKDLIRSQEYKYCMYKSSLGESLEGVRGIF

SEQ ID NO: 101290 - protein, 121 aa, Arabidopsis thaliana
  peptide (1)..(121): Ceres Seq. ID no. 13607484
  misc_feature (1)..(121): Homolog of NCBI NO: 18418364 NR Description: expressed protein [Arabidopsis thaliana]
  misc_feature (1)..(121): Homolog of NCBI NO: 21618076 NR Description: unknown [Arabidopsis thaliana]
  misc_feature (1)..(108): Homolog of NCBI NO: 11346183 NR Description: hypothetical protein K10A8_90 - Arabidopsis >gi|9755786|emb|CAC01905.1| hypothetical protein [Arabidopsis
  misc_feature (98)..(121): Homolog of NCBI NO: 11346183 NR Description: hypothetical protein K10A8_90 - Arabidopsis >gi|9755786|emb|CAC01905.1| hypothetical protein [Arabidopsis
  misc_feature (36)..(121): Homolog of NCBI NO: 34902472 NR Description: Putative DNAJ protein [Oryza sativa (japonica group)] >gi|22748333|gb|AAN05335.1| Putative DNAJ protein [Oryza
MEISQARSSFVCLLLLLLSMCFVPCVFSKSPRPISDVEIRQKKSECYGDIESGLWGWQCKSSAIAKENCALRCLSPVCYQLIYESDPLEEGEKDLIRSQEYKYCMYKSSLGESLEGVRGIF

SEQ ID NO: 101291 - protein, 102 aa, Arabidopsis thaliana
  peptide (1)..(102): Ceres Seq. ID no. 13607485
  misc_feature (1)..(102): Homolog of NCBI NO: 18418364 NR Description: expressed protein [Arabidopsis thaliana]
  misc_feature (1)..(102): Homolog of NCBI NO: 21618076 NR Description: unknown [Arabidopsis thaliana]
  misc_feature (1)..(89): Homolog of NCBI NO: 11346183 NR Description: hypothetical protein K10A8_90 - Arabidopsis >gi|9755786|emb|CAC01905.1| hypothetical protein [Arabidopsis
  misc_feature (79)..(102): Homolog of NCBI NO: 11346183 NR Description: hypothetical protein K10A8_90 - Arabidopsis >gi|9755786|emb|CAC01905.1| hypothetical protein [Arabidopsis
  misc_feature (17)..(102): Homolog of NCBI NO: 34902472 NR Description: Putative DNAJ protein [Oryza sativa (japonica group)] >gi|22748333|gb|AAN05335.1| Putative DNAJ protein [Oryza
MCFVPCVFSKSPRPISDVEIRQKKSECYGDIESGLWGWQCKSSAIAKENCALRCLSPVCYQLIYESDPLEEGEKDLIRSQEYKYCMYKSSLGESLEGVRGIF

SEQ ID NO: 101292 - DNA, 1209 bp, Arabidopsis thaliana
  misc_feature (1)..(1209): Ceres Seq. ID no. 13607494
  misc_feature: MA Experiment ID: 108434 Result: Up-regulated in Transcription
  misc_feature: MA Experiment 108434 PARAMETER Experiment Name: At_Root_Tips_cDNA_P Parameter: Tissue Value: Root Tips
  misc_feature: MA Experiment ID: 108461 Result: Up-regulated in Transcription
  misc_feature: MA Experiment 108461 PARAMETER Experiment Name: At_Germinating_Seeds_cDNA_P Parameter: Age (day) Value: 1 vs. 0
  misc_feature: MA Experiment 108461 PARAMETER Experiment Name: At_Germinating_Seeds_cDNA_P Parameter: Tissue Value: Germinating Seeds
  misc_feature: MA Experiment ID: 108462 Result: Up-regulated in Transcription
  misc_feature: MA Experiment 108462 PARAMETER Experiment Name: At_Germinating_Seeds_cDNA_P Parameter: Age (day) Value: 2 vs. 0
  misc_feature: MA Experiment 108462 PARAMETER Experiment Name: At_Germinating_Seeds_cDNA_P Parameter: Tissue Value: Germinating Seeds
  misc_feature: MA Experiment ID: 108579 Result: Down-regulated in Transcription
  misc_feature: MA Experiment 108579 PARAMETER Experiment Name: At_4deg_Cold_cDNA_P Parameter: Temperature (deg C) Value: 4 vs. 22
  misc_feature: MA Experiment 108579 PARAMETER Experiment Name: At_4deg_Cold_cDNA_P Parameter: Timepoint (hr) Value: 6
  misc_feature: MA Experiment 108579 PARAMETER Experiment Name: At_4deg_Cold_cDNA_P Parameter: Tissue Value: Aerial
  misc_feature: MA Experiment ID: 20000112 Result: Down-regulated in Transcription
  misc_feature: MA Experiment 20000112 PARAMETER Experiment Name: At_42deg_Heat_cDNA_P Parameter: Temperature (deg C) Value: 42 vs. 22
  misc_feature: MA Experiment 20000112 PARAMETER Experiment Name: At_42deg_Heat_cDNA_P Parameter: Timepoint (hr) Value: 2
  misc_feature: MA Experiment 20000112 PARAMETER Experiment Name: At_42deg_Heat_cDNA_P Parameter: Tissue Value: Aerial
  misc_feature: MA Experiment ID: 20000113 Result: Down-regulated in Transcription
  misc_feature: MA Experiment 20000113 PARAMETER Experiment Name: At_42deg_Heat_cDNA_P Parameter: Temperature (deg C) Value: 42 vs. 22
  misc_feature: MA Experiment 20000113 PARAMETER Experiment Name: At_42deg_Heat_cDNA_P Parameter: Timepoint (hr) Value: 8
  misc_feature: MA Experiment 20000113 PARAMETER Experiment Name: At_42deg_Heat_cDNA_P Parameter: Tissue Value: Aerial
  misc_feature: MA Experiment ID: 20000144 Result: Down-regulated in Transcription
  misc_feature: MA Experiment 20000144 PARAMETER Experiment Name: At_42deg_Heat_cDNA_P Parameter: Temperature (deg C) Value: 42 vs. 22
  misc_feature: MA Experiment 20000144 PARAMETER Experiment Name: At_42deg_Heat_cDNA_P Parameter: Timepoint (hr) Value: 1
  misc_feature: MA Experiment 20000144 PARAMETER Experiment Name: At_42deg_Heat_cDNA_P Parameter: Tissue Value: Aerial
  misc_feature: MA Experiment ID: 20000171 Result: Down-regulated in Transcription
  misc_feature: MA Experiment 20000171 PARAMETER Experiment Name: At_42deg_Heat_P Parameter: Age (day) Value: 14
  misc_feature: MA Experiment 20000171 PARAMETER Experiment Name: At_42deg_Heat_P Parameter: Organism Value: A. thaliana
  misc_feature: MA Experiment 20000171 PARAMETER Experiment Name: At_42deg_Heat_P Parameter: Plant Line Value: WS
  misc_feature: MA Experiment 20000171 PARAMETER Experiment Name: At_42deg_Heat_P Parameter: Temperature (deg C) Value: 42 vs. 22
  misc_feature: MA Experiment 20000171 PARAMETER Experiment Name: At_42deg_Heat_P Parameter: Timepoint (hr) Value: 1
  misc_feature: MA Experiment 20000171 PARAMETER Experiment Name: At_42deg_Heat_P Parameter: Tissue Value: Aerial
  misc_feature: MA Experiment ID: 20000179 Result: Up-regulated in Transcription
  misc_feature: MA Experiment 20000179 PARAMETER Experiment Name: At_Germinating_Seeds_P Parameter: Age (hr) Value: 6 vs. 0
  misc_feature: MA Experiment 20000179 PARAMETER Experiment Name: At_Germinating_Seeds_P Parameter: Tissue Value: Germinating Seeds
  misc_feature: MA Experiment ID: 20000180 Result: Up-regulated in Transcription
  misc_feature: MA Experiment 20000180 PARAMETER Experiment Name: At_Germinating_Seeds_P Parameter: Age (hr) Value: 24 vs. 0
  misc_feature: MA Experiment 20000180 PARAMETER Experiment Name: At_Germinating_Seeds_P Parameter: Tissue Value: Germinating Seeds
  misc_feature: MA Experiment ID: 20000184 Result: Up-regulated in Transcription
  misc_feature: MA Experiment 20000184 PARAMETER Experiment Name: At_Shoots__P Parameter: Age (day) Value: 7
  misc_feature: MA Experiment 20000184 PARAMETER Experiment Name: At_Shoots__P Parameter: Tissue Value: Shoots vs. Whole Plant
  misc_feature: MA Experiment ID: 20000227 Result: Up-regulated in Transcription
  misc_feature: MA Experiment 20000227 PARAMETER Experiment Name: At_Root-Tips-vs-Tops_P Parameter: Tissue Value: Root Tips vs. Root Tops
  misc_feature: MA Experiment ID: 20000451 Result: Up-regulated in Transcription
  misc_feature: MA Experiment 20000451 PARAMETER Experiment Name: At_CS6879_Shoots-Roots_P Parameter: Age (day) Value: 14
  misc_feature: MA Experiment 20000451 PARAMETER Experiment Name: At_CS6879_Shoots-Roots_P Parameter: Organism Value: A. thaliana
  misc_feature: MA Experiment 20000451 PARAMETER Experiment Name: At_CS6879_Shoots-Roots_P Parameter: Plant Line Value: CS6879 vs. WS
  misc_feature: MA Experiment 20000451 PARAMETER Experiment Name: At_CS6879_Shoots-Roots_P Parameter: Tissue Value: Roots
  misc_feature: MA Experiment ID: 20000794 Result: Down-regulated in Transcription
  misc_feature: MA Experiment 20000794 PARAMETER Experiment Name: At_Petals_P Parameter: Age (day) Value: 23-25 days
  misc_feature: MA Experiment 20000794 PARAMETER Experiment Name: At_Petals_P Parameter: Plant Line Value: WS
  misc_feature: MA Experiment 20000794 PARAMETER Experiment Name: At_Petals_P Parameter: Tissue Value: Petals vs. Whole plant
  misc_feature: MA Experiment ID: 20001555 Result: Down-regulated in Transcription
  misc_feature: MA Experiment 20001555 PARAMETER Experiment Name: At_Drought_Soil_Dry_P Parameter: Age (day) Value: 24
  misc_feature: MA Experiment 20001555 PARAMETER Experiment Name: At_Drought_Soil_Dry_P Parameter: Organism Value: A. thaliana
  misc_feature: MA Experiment 20001555 PARAMETER Experiment Name: At_Drought_Soil_Dry_P Parameter: Plant Line Value: WS
  misc_feature: MA Experiment 20001555 PARAMETER Experiment Name: At_Drought_Soil_Dry_P Parameter: Post Timepoint (hr) Value: None
  misc_feature: MA Experiment 20001555 PARAMETER Experiment Name: At_Drought_Soil_Dry_P Parameter: Post-Treatment Value: None
  misc_feature: MA Experiment 20001555 PARAMETER Experiment Name: At_Drought_Soil_Dry_P Parameter: Timepoint (day) Value: 10
  misc_feature: MA Experiment 20001555 PARAMETER Experiment Name: At_Drought_Soil_Dry_P Parameter: Treatment Value: Drought vs. No Drought
  misc_feature: MA Experiment ID: 20001560 Result: Up-regulated in Transcription
  misc_feature: MA Experiment 20001560 PARAMETER Experiment Name: At_Drought_Soil_Dry_P Parameter: Age (day) Value: 28
  misc_feature: MA Experiment 20001560 PARAMETER Experiment Name: At_Drought_Soil_Dry_P Parameter: Organism Value: A. thaliana
  misc_feature: MA Experiment 20001560 PARAMETER Experiment Name: At_Drought_Soil_Dry_P Parameter: Plant Line Value: WS
  misc_feature: MA Experiment 20001560 PARAMETER Experiment Name: At_Drought_Soil_Dry_P Parameter: Post Timepoint (hr) Value: None
  misc_feature: MA Experiment 20001560 PARAMETER Experiment Name: At_Drought_Soil_Dry_P Parameter: Post-Treatment Value: None
  misc_feature: MA Experiment 20001560 PARAMETER Experiment Name: At_Drought_Soil_Dry_P Parameter: Timepoint (day) Value: 14
  misc_feature: MA Experiment 20001560 PARAMETER Experiment Name: At_Drought_Soil_Dry_P Parameter: Treatment Value: Drought vs. No Drought
  misc_feature: MA Experiment ID: 20001911 Result: Down-regulated in Transcription
  misc_feature: MA Experiment 20001911 PARAMETER Experiment Name: At_Drought_Reproduction_P Parameter: Age (day) Value: 40
  misc_feature: MA Experiment 20001911 PARAMETER Experiment Name: At_Drought_Reproduction_P Parameter: Organism Value: A. thaliana
  misc_feature: MA Experiment 20001911 PARAMETER Experiment Name: At_Drought_Reproduction_P Parameter: Plant Line Value: WS
  misc_feature: MA Experiment 20001911 PARAMETER Experiment Name: At_Drought_Reproduction_P Parameter: Timepoint (day) Value: 10
  misc_feature: MA Experiment 20001911 PARAMETER Experiment Name: At_Drought_Reproduction_P Parameter: Tissue Value: Flowers
  misc_feature: MA Experiment 20001911 PARAMETER Experiment Name: At_Drought_Reproduction_P Parameter: Treatment Value: Drought vs. No Drought
aacagatttcgtaacggacaaagttcccaattctttttttttgcataataagatctgaaatcggagatagaaaaaaaaatcacatttttatttccgccggaacaaaaagcgatggttcagtgtagcaacaatctcctcggaatcctcaatttcttcacattcctcctctcaatcccaattctctccgccgggatctggctcggcaaaaatgcagcaaccgaatgcgaacgtttcctcgacaaaccaatggtcgtactcggaatcttcctcatgttcgtctcaatcgccggactcgtcggtgcttgttgccgtgtctcttgcctcctctggctttacctcttcgctatgttcctcctcattctcctcggcttctgtttcacaatcttcgctttcgcagtcacaaaccgcggcgccggtgaggttatatcggatcgagggtataaagagtatcatgtcgccgattactctaattggttgcagaaacgtgtcaacaatgctaagaattgggaacggatcaggagttgtttgatgtactctgacgtttgctccacttatcgtactcgttatgccagcattaacgttgaagatttctacaaatctaatcttaatgctcttcagtctggttgttgtaagccgtccaatgactgtaacttcacctatgtgaacccgactacttggacaaagactcctggtccatacaaaaacgaggactgtaatgtgtgggacaacaaaccaggaactctctgctacgactgtgaagcctgcaaggctggtctgcttgacaacatcaagaactcatggaaaaaggtggctaaggtcaacattgtcttcctcatattcctcattatcgtctactctgttggttgttgtgcgttcaggaacaacaggaaacgcagttggtaatagattctaatgcgttgaaaccaagactaaggccagagaagatatctgaagtgtcatcatcttactgtcaagtaagttaaagcagcatttaagacaactcgttgatcgcttgtcttgtgtgtgggggattgcaatttcaatgtattttctctcttaaatttgcaacataatgagttacaaaagcacttgcttgtgcttctatttcgactcttttgtgtgttgagtagcttatacatctgttgagacgagtgagatttgtaaaagaagttccatttcactttgcgttattatcattttcatattctt

SEQ ID NO: 101293 - protein, 263 aa, Arabidopsis thaliana; identical to SEQ ID NO: 25093
  peptide (1)..(263): Ceres Seq. ID no. 13607495
  misc_feature (4)..(244): Pfam Name: Tetraspanin family Pfam Description: Tetraspanin family
  misc_feature (1)..(263): Homolog of NCBI NO: 15234374 NR Description: senescence-associated protein, putative
  misc_feature (1)..(260): Homolog of NCBI NO: 20197174 NR Description: hypothetical protein [Arabidopsis thaliana]
  misc_feature (1)..(260): Homolog of NCBI NO: 15234743 NR Description: senescence-associated protein family [Arabidopsis
  misc_feature (1)..(260): Homolog of NCBI NO: 21537169 NR Description: senescence-associated protein-like protein
  misc_feature (1)..(260): Homolog of NCBI NO: 3551954 NR Description: senescence-associated protein 5 [Hemerocallis
  misc_feature (5)..(260): Homolog of NCBI NO: 29367553 NR Description: senescence-associated protein-like protein [Oryza
  misc_feature (79)..(260): Homolog of NCBI NO: 30682205 NR Description: senescence-associated protein family [Arabidopsis
  misc_feature (2)..(260): Homolog of NCBI NO: 15231187 NR Description: senescence-associated protein family [Arabidopsis
  misc_feature (6)..(260): Homolog of NCBI NO: 15238641 NR Description: senescence-associated protein family [Arabidopsis
  misc_feature (5)..(257): Homolog of NCBI NO: 17979386 NR Description: putative senescence-associated protein 5

SEQ ID NO: 101294 - protein, 218 aa, Arabidopsis thaliana; identical to SEQ ID NO: 25094
  peptide (1)..(218): Ceres Seq. ID no. 13607496
  misc_feature (1)..(199): Pfam Name: Tetraspanin family Pfam Description: Tetraspanin family
  misc_feature (1)..(218): Homolog of NCBI NO: 15234374 NR Description: senescence-associated protein, putative
  misc_feature (1)..(215): Homolog of NCBI NO: 20197174 NR Description: hypothetical protein [Arabidopsis thaliana]
  misc_feature (1)..(215): Homolog of NCBI NO: 15234743 NR Description: senescence-associated protein family [Arabidopsis
  misc_feature (1)..(215): Homolog of NCBI NO: 21537169 NR Description: senescence-associated protein-like protein
  misc_feature (1)..(215): Homolog of NCBI NO: 3551954 NR Description: senescence-associated protein 5 [Hemerocallis
  misc_feature (1)..(215): Homolog of NCBI NO: 29367553 NR Description: senescence-associated protein-like protein [Oryza
  misc_feature (34)..(215): Homolog of NCBI NO: 30682205 NR Description: senescence-associated protein family [Arabidopsis
  misc_feature (1)..(215): Homolog of NCBI NO: 15231187 NR Description: senescence-associated protein family [Arabidopsis
  misc_feature (1)..(215): Homolog of NCBI NO: 15238641 NR Description: senescence-associated protein family [Arabidopsis
  misc_feature (1)..(212): Homolog of NCBI NO: 17979386 NR Description: putative senescence-associated protein 5

SEQ ID NO: 101295 - protein, 210 aa, Arabidopsis thaliana; identical to SEQ ID NO: 25095
  peptide (1)..(210): Ceres Seq. ID no. 13607497
  misc_feature (1)..(191): Pfam Name: Tetraspanin family Pfam Description: Tetraspanin family
  misc_feature (1)..(210): Homolog of NCBI NO: 15234374 NR Description: senescence-associated protein, putative
  misc_feature (1)..(207): Homolog of NCBI NO: 20197174 NR Description: hypothetical protein [Arabidopsis thaliana]
  misc_feature (1)..(207): Homolog of NCBI NO: 15234743 NR Description: senescence-associated protein family [Arabidopsis
  misc_feature (1)..(207): Homolog of NCBI NO: 21537169 NR Description: senescence-associated protein-like protein
  misc_feature (1)..(207): Homolog of NCBI NO: 3551954 NR Description: senescence-associated protein 5 [Hemerocallis
  misc_feature (1)..(207): Homolog of NCBI NO: 29367553 NR Description: senescence-associated protein-like protein [Oryza
  misc_feature (26)..(207): Homolog of NCBI NO: 30682205 NR Description: senescence-associated protein family [Arabidopsis
  misc_feature (1)..(207): Homolog of NCBI NO: 15231187 NR Description: senescence-associated protein family [Arabidopsis
  misc_feature (1)..(207): Homolog of NCBI NO: 15238641 NR Description: senescence-associated protein family [Arabidopsis
  misc_feature (1)..(204): Homolog of NCBI NO: 17979386 NR Description: putative senescence-associated protein 5

SEQ ID NO: 101296 - DNA, 769 bp, Arabidopsis thaliana
  misc_feature (1)..(769): Ceres Seq. ID no. 13607498
  misc_feature: MA Experiment ID: 108435 Result: Down-regulated in Transcription
  misc_feature: MA Experiment 108435 PARAMETER Experiment Name: At_stm_Mutants_cDNA_P Parameter: Plant Line Value: wt Landsburg vs stm
  misc_feature: MA Experiment 108435 PARAMETER Experiment Name: At_stm_Mutants_cDNA_P Parameter: Tissue Value: Shoot Apical Meristem Region
  misc_feature: MA Experiment ID: 108461 Result: Up-regulated in Transcription
  misc_feature: MA Experiment 108461 PARAMETER Experiment Name: At_Germinating_Seeds_cDNA_P Parameter: Age (day) Value: 1 vs. 0
  misc_feature: MA Experiment 108461 PARAMETER Experiment Name: At_Germinating_Seeds_cDNA_P Parameter: Tissue Value: Germinating Seeds
  misc_feature: MA Experiment ID: 108462 Result: Up-regulated in Transcription
  misc_feature: MA Experiment 108462 PARAMETER Experiment Name: At_Germinating_Seeds_cDNA_P Parameter: Age (day) Value: 2 vs. 0
  misc_feature: MA Experiment 108462 PARAMETER Experiment Name: At_Germinating_Seeds_cDNA_P Parameter: Tissue Value: Germinating Seeds
  misc_feature: MA Experiment ID: 108464 Result: Up-regulated in Transcription
  misc_feature: MA Experiment 108464 PARAMETER Experiment Name: At_Germinating_Seeds_cDNA_P Parameter: Age (day) Value: 4 vs. 0
  misc_feature: MA Experiment 108464 PARAMETER Experiment Name: At_Germinating_Seeds_cDNA_P Parameter: Tissue Value: Germinating Seeds
  misc_feature: MA Experiment ID: 108488 Result: Up-regulated in Transcription
  misc_feature: MA Experiment ID: 108561 Result: Down-regulated in Transcription
  misc_feature: MA Experiment 108561 PARAMETER Experiment Name: At_100uM_ABA_cDNA_P Parameter: Timepoint (hr) Value: 6
  misc_feature: MA Experiment 108561 PARAMETER Experiment Name: At_100uM_ABA_cDNA_P Parameter: Tissue Value: Aerial
  misc_feature: MA Experiment 108561 PARAMETER Experiment Name: At_100uM_ABA_cDNA_P Parameter: Treatment Value: 100uM ABA vs. No Treatment
  misc_feature: MA Experiment ID: 108573 Result: Down-regulated in Transcription
  misc_feature: MA Experiment 108573 PARAMETER Experiment Name: At_Drought_cDNA_P Parameter: Timepoint (hr) Value: 6
  misc_feature: MA Experiment 108573 PARAMETER Experiment Name: At_Drought_cDNA_P Parameter: Tissue Value: Aerial
  misc_feature: MA Experiment 108573 PARAMETER Experiment Name: At_Drought_cDNA_P Parameter: Treatment Value: Drought vs. No Drought
  misc_feature: MA Experiment ID: 108579 Result: Up-regulated in Transcription
  misc_feature: MA Experiment 108579 PARAMETER Experiment Name: At_4deg_Cold_cDNA_P Parameter: Temperature (deg C) Value: 4 vs. 22
  misc_feature: MA Experiment 108579 PARAMETER Experiment Name: At_4deg_Cold_cDNA_P Parameter: Timepoint (hr) Value: 6
  misc_feature: MA Experiment 108579 PARAMETER Experiment Name: At_4deg_Cold_cDNA_P Parameter: Tissue Value: Aerial
  misc_feature: MA Experiment ID: 108595 Result: Down-regulated in Transcription
  misc_feature: MA Experiment 108595 PARAMETER Experiment Name: At_Ler-pi_Ovule_cDNA_P Parameter: Plant Line Value: null
  misc_feature: MA Experiment ID: 108605 Result: Down-regulated in Transcription
  misc_feature: MA Experiment 108605 PARAMETER Experiment Name: At_100uM_ABA_cDNA_P Parameter: Timepoint (hr) Value: 6
  misc_feature: MA Experiment 108605 PARAMETER Experiment Name: At_100uM_ABA_cDNA_P Parameter: Tissue Value: Aerial
  misc_feature: MA Experiment 108605 PARAMETER Experiment Name: At_100uM_ABA_cDNA_P Parameter: Treatment Value: 100uM ABA vs. No Treatment
  misc_feature: MA Experiment ID: 20000069 Result: Down-regulated in Transcription
  misc_feature: MA Experiment 20000069 PARAMETER Experiment Name: At_100uM_ABA_Mutants_cDNA_P Parameter: Plant Line Value: CS23
  misc_feature: MA Experiment 20000069 PARAMETER Experiment Name: At_100uM_ABA_Mutants_cDNA_P Parameter: Timepoint (hr) Value: 6
  misc_feature: MA Experiment 20000069 PARAMETER Experiment Name: At_100uM_ABA_Mutants_cDNA_P Parameter: Tissue Value: Aerial
  misc_feature: MA Experiment 20000069 PARAMETER Experiment Name: At_100uM_ABA_Mutants_cDNA_P Parameter: Treatment Value: 100uM ABA vs. No Treatment
  misc_feature: MA Experiment ID: 20000070 Result: Down-regulated in Transcription
  misc_feature: MA Experiment 20000070 PARAMETER Experiment Name: At_100uM_ABA_Mutants_cDNA_P Parameter: Plant Line Value: CS24
  misc_feature: MA Experiment 20000070 PARAMETER Experiment Name: At_100uM_ABA_Mutants_cDNA_P Parameter: Timepoint (hr) Value: 6
  misc_feature: MA Experiment 20000070 PARAMETER Experiment Name: At_100uM_ABA_Mutants_cDNA_P Parameter: Tissue Value: Aerial
  misc_feature: MA Experiment 20000070 PARAMETER Experiment Name: At_100uM_ABA_Mutants_cDNA_P Parameter: Treatment Value: 100uM ABA vs. No Treatment
  misc_feature: MA Experiment ID: 20000071 Result: Down-regulated in Transcription
  misc_feature: MA Experiment 20000071 PARAMETER Experiment Name: At_100uM_ABA_Mutants_cDNA_P Parameter: Plant Line Value: CS8104
  misc_feature: MA Experiment 20000071 PARAMETER Experiment Name: At_100uM_ABA_Mutants_cDNA_P Parameter: Timepoint (hr) Value: 6
  misc_feature: MA Experiment 20000071 PARAMETER Experiment Name: At_100uM_ABA_Mutants_cDNA_P Parameter: Tissue Value: Aerial
  misc_feature: MA Experiment 20000071 PARAMETER Experiment Name: At_100uM_ABA_Mutants_cDNA_P Parameter: Treatment Value: 100uM ABA vs. No Treatment
  misc_feature: MA Experiment ID: 20000072 Result: Down-regulated in Transcription
  misc_feature: MA Experiment 20000072 PARAMETER Experiment Name: At_100uM_ABA_Mutants_cDNA_P Parameter: Plant Line Value: CS8105
  misc_feature: MA Experiment 20000072 PARAMETER Experiment Name: At_100uM_ABA_Mutants_cDNA_P Parameter: Timepoint (hr) Value: 6
  misc_feature: MA Experiment 20000072 PARAMETER Experiment Name: At_100uM_ABA_Mutants_cDNA_P Parameter: Tissue Value: Aerial
  misc_feature: MA Experiment 20000072 PARAMETER Experiment Name: At_100uM_ABA_Mutants_cDNA_P Parameter: Treatment Value: 100uM ABA vs. No Treatment
  misc_feature: MA Experiment ID: 20000086 Result: Down-regulated in Transcription
  misc_feature: MA Experiment 20000086 PARAMETER Experiment Name: At_100uM_ABA_Mutants_cDNA_P Parameter: Plant Line Value: CS22
  misc_feature: MA Experiment 20000086 PARAMETER Experiment Name: At_100uM_ABA_Mutants_cDNA_P Parameter: Timepoint (hr) Value: 6
  misc_feature: MA Experiment 20000086 PARAMETER Experiment Name: At_100uM_ABA_Mutants_cDNA_P Parameter: Tissue Value: Aerial
  misc_feature: MA Experiment 20000086 PARAMETER Experiment Name: At_100uM_ABA_Mutants_cDNA_P Parameter: Treatment Value: 100uM ABA vs. No Treatment
  misc_feature: MA Experiment ID: 20000087 Result: Down-regulated in Transcription
  misc_feature: MA Experiment 20000087 PARAMETER Experiment Name: At_100uM_ABA_Mutants_cDNA_P Parameter: Plant Line Value: WS
  misc_feature: MA Experiment 20000087 PARAMETER Experiment Name: At_100uM_ABA_Mutants_cDNA_P Parameter: Timepoint (hr) Value: 6
  misc_feature: MA Experiment 20000087 PARAMETER Experiment Name: At_100uM_ABA_Mutants_cDNA_P Parameter: Tissue Value: Aerial
  misc_feature: MA Experiment 20000087 PARAMETER Experiment Name: At_100uM_ABA_Mutants_cDNA_P Parameter: Treatment Value: 100uM ABA vs. No Treatment
  misc_feature: MA Experiment ID: 20000088 Result: Down-regulated in Transcription
  misc_feature: MA Experiment 20000088 PARAMETER Experiment Name: At_100uM_ABA_Mutants_cDNA_P Parameter: Plant Line Value: Landsberg
  misc_feature: MA Experiment 20000088 PARAMETER Experiment Name: At_100uM_ABA_Mutants_cDNA_P Parameter: Timepoint (hr) Value: 6
  misc_feature: MA Experiment 20000088 PARAMETER Experiment Name: At_100uM_ABA_Mutants_cDNA_P Parameter: Tissue Value: Aerial
  misc_feature: MA Experiment 20000088 PARAMETER Experiment Name: At_100uM_ABA_Mutants_cDNA_P Parameter: Treatment Value: 100uM ABA vs. No Treatment
  misc_feature: MA Experiment ID: 20000090 Result: Down-regulated in Transcription
  misc_feature: MA Experiment ID: 20000117 Result: Down-regulated in Transcription
  misc_feature: MA Experiment 20000117 PARAMETER Experiment Name: At_100uM_ABA_Mutants_cDNA_P Parameter: Plant Line Value: Columbia
  misc_feature: MA Experiment 20000117 PARAMETER Experiment Name: At_100uM_ABA_Mutants_cDNA_P Parameter: Timepoint (hr) Value: 6
  misc_feature: MA Experiment 20000117 PARAMETER Experiment Name: At_100uM_ABA_Mutants_cDNA_P Parameter: Tissue Value: Aerial
  misc_feature: MA Experiment 20000117 PARAMETER Experiment Name: At_100uM_ABA_Mutants_cDNA_P Parameter: Treatment Value: 100uM ABA vs. No Treatment
  misc_feature: MA Experiment ID: 20000180 Result: Up-regulated in Transcription
  misc_feature: MA Experiment 20000180 PARAMETER Experiment Name: At_Germinating_Seeds_P Parameter: Age (hr) Value: 24 vs. 0
  misc_feature: MA Experiment 20000180 PARAMETER Experiment Name: At_Germinating_Seeds_P Parameter: Tissue Value: Germinating Seeds
  misc_feature: MA Experiment ID: 20000184 Result: Up-regulated in Transcription
  misc_feature: MA Experiment 20000184 PARAMETER Experiment Name: At_Shoots__P Parameter: Age (day) Value: 7
  misc_feature: MA Experiment 20000184 PARAMETER Experiment Name: At_Shoots__P Parameter: Tissue Value: Shoots vs. Whole Plant
  misc_feature: MA Experiment ID: 20000185 Result: Down-regulated in Transcription
  misc_feature: MA Experiment 20000185 PARAMETER Experiment Name: At_Roots__P Parameter: Age (day) Value: 7 vs. 21
  misc_feature: MA Experiment 20000185 PARAMETER Experiment Name: At_Roots__P Parameter: Organism Value: A. thaliana
  misc_feature: MA Experiment 20000185 PARAMETER Experiment Name: At_Roots__P Parameter: Tissue Value: Roots vs. Whole Plant
  misc_feature: MA Experiment ID: 20000234 Result: Up-regulated in Transcription
  misc_feature: MA Experiment 20000234 PARAMETER Experiment Name: At_Siliques_P Parameter: Age (day) Value: 21
  misc_feature: MA Experiment 20000234 PARAMETER Experiment Name: At_Siliques_P Parameter: Organism Value: A. thaliana
  misc_feature: MA Experiment 20000234 PARAMETER Experiment Name: At_Siliques_P Parameter: Plant Line Value: WS
  misc_feature: MA Experiment 20000234 PARAMETER Experiment Name: At_Siliques_P Parameter: Tissue Value: Less Than 5mm Siliques vs. Whole Plant
  misc_feature: MA Experiment ID: 20000235 Result: Up-regulated in Transcription
  misc_feature: MA Experiment 20000235 PARAMETER Experiment Name: At_Siliques_P Parameter: Age (day) Value: 21
  misc_feature: MA Experiment 20000235 PARAMETER Experiment Name: At_Siliques_P Parameter: Organism Value: A. thaliana
  misc_feature: MA Experiment 20000235 PARAMETER Experiment Name: At_Siliques_P Parameter: Plant Line Value: WS
  misc_feature: MA Experiment 20000235 PARAMETER Experiment Name: At_Siliques_P Parameter: Tissue Value: 5-10mm Siliques vs. Whole Plant
  misc_feature: MA Experiment ID: 20000436 Result: Down-regulated in Transcription
  misc_feature: MA Experiment 20000436 PARAMETER Experiment Name: At_Drought_P Parameter: Age (day) Value: 7
  misc_feature: MA Experiment 20000436 PARAMETER Experiment Name: At_Drought_P Parameter: Organism Value: A. thaliana
  misc_feature: MA Experiment 20000436 PARAMETER Experiment Name: At_Drought_P Parameter: Plant Line Value: WS
  misc_feature: MA Experiment 20000436 PARAMETER Experiment Name: At_Drought_P Parameter: Timepoint (hr) Value: 12
  misc_feature: MA Experiment 20000436 PARAMETER Experiment Name: At_Drought_P Parameter: Tissue Value: Whole Plant
  misc_feature: MA Experiment 20000436 PARAMETER Experiment Name: At_Drought_P Parameter: Treatment Value: Drought vs. No Drought
  misc_feature: MA Experiment ID: 20000437 Result: Down-regulated in Transcription
  misc_feature: MA Experiment 20000437 PARAMETER Experiment Name: At_Drought_P Parameter: Age (day) Value: 8
  misc_feature: MA Experiment 20000437 PARAMETER Experiment Name: At_Drought_P Parameter: Organism Value: A. thaliana
  misc_feature: MA Experiment 20000437 PARAMETER Experiment Name: At_Drought_P Parameter: Plant Line Value: WS
  misc_feature: MA Experiment 20000437 PARAMETER Experiment Name: At_Drought_P Parameter: Timepoint (hr) Value: 24
  misc_feature: MA Experiment 20000437 PARAMETER Experiment Name: At_Drought_P Parameter: Tissue Value: Whole Plant
  misc_feature: MA Experiment 20000437 PARAMETER Experiment Name: At_Drought_P Parameter: Treatment Value: Drought vs. No Drought
  misc_feature: MA Experiment ID: 20000438 Result: Up-regulated in Transcription
  misc_feature: MA Experiment 20000438 PARAMETER Experiment Name: At_Shoots__P Parameter: Age (day) Value: 14
  misc_feature: MA Experiment 20000438 PARAMETER Experiment Name: At_Shoots__P Parameter: Tissue Value: Shoots vs. Whole Plant
  misc_feature: MA Experiment ID: 20000439 Result: Down-regulated in Transcription
  misc_feature: MA Experiment 20000439 PARAMETER Experiment Name: At_Roots__P Parameter: Age (day) Value: 14 vs. 21
  misc_feature: MA Experiment 20000439 PARAMETER Experiment Name: At_Roots__P Parameter: Organism Value: A. thaliana
  misc_feature: MA Experiment 20000439 PARAMETER Experiment Name: At_Roots__P Parameter: Tissue Value: Roots vs. Whole Plant
  misc_feature: MA Experiment ID: 20000495 Result: Down-regulated in Transcription
  misc_feature: MA Experiment 20000495 PARAMETER Experiment Name: At_Guard_Cells_P Parameter: Harvest Date Value: 8/2/2002
  misc_feature: MA Experiment 20000495 PARAMETER Experiment Name: At_Guard_Cells_P Parameter: Organism Value: A. thaliana
  misc_feature: MA Experiment 20000495 PARAMETER Experiment Name: At_Guard_Cells_P Parameter: Tissue Value: Guard Cells vs. Leaves
  misc_feature: MA Experiment ID: 20000527 Result: Up-regulated in Transcription
  misc_feature: MA Experiment 20000527 PARAMETER Experiment Name: At_10percent_PEG_P Parameter: Age (day) Value: 20
  misc_feature: MA Experiment 20000527 PARAMETER Experiment Name: At_10percent_PEG_P Parameter: Organism Value: A. thaliana
  misc_feature: MA Experiment 20000527 PARAMETER Experiment Name: At_10percent_PEG_P Parameter: Plant Line Value: WS
  misc_feature: MA Experiment 20000527 PARAMETER Experiment Name: At_10percent_PEG_P Parameter: Timepoint (day) Value: 20
  misc_feature: MA Experiment 20000527 PARAMETER Experiment Name: At_10percent_PEG_P Parameter: Tissue Value: Whole Plant
  misc_feature: MA Experiment 20000527 PARAMETER Experiment Name: At_10percent_PEG_P Parameter: Treatment Value: 10percent PEG vs. No Treatment
  misc_feature: MA Experiment ID: 20001248 Result: Down-regulated in Transcription
  misc_feature: MA Experiment 20001248 PARAMETER Experiment Name: At_Far-red-induction_P Parameter: Age (day) Value: 7
  misc_feature: MA Experiment 20001248 PARAMETER Experiment Name: At_Far-red-induction_P Parameter: Light Value: Far-red vs. White
  misc_feature: MA Experiment 20001248 PARAMETER Experiment Name: At_Far-red-induction_P Parameter: Organism Value: A. thaliana
  misc_feature: MA Experiment 20001248 PARAMETER Experiment Name: At_Far-red-induction_P Parameter: Plant Line Value: Columbia
  misc_feature: MA Experiment 20001248 PARAMETER Experiment Name: At_Far-red-induction_P Parameter: Timepoint (hr) Value: 4
  misc_feature: MA Experiment 20001248 PARAMETER Experiment Name: At_Far-red-induction_P Parameter: Tissue Value: Whole Plant
  misc_feature: MA Experiment ID: 20001450 Result: Down-regulated in Transcription
  misc_feature: MA Experiment 20001450 PARAMETER Experiment Name: At_Far-red-induction_P Parameter: Age (day) Value: 7
  misc_feature: MA Experiment 20001450 PARAMETER Experiment Name: At_Far-red-induction_P Parameter: Light Value: Far-red vs. White
  misc_feature: MA Experiment 20001450 PARAMETER Experiment Name: At_Far-red-induction_P Parameter: Organism Value: A. thaliana
  misc_feature: MA Experiment 20001450 PARAMETER Experiment Name: At_Far-red-induction_P Parameter: Plant Line Value: Columbia
  misc_feature: MA Experiment 20001450 PARAMETER Experiment Name: At_Far-red-induction_P Parameter: Timepoint (hr) Value: 8
  misc_feature: MA Experiment 20001450 PARAMETER Experiment Name: At_Far-red-induction_P Parameter: Tissue Value: Whole Plant
  misc_feature: MA Experiment ID: 20001560 Result: Up-regulated in Transcription
  misc_feature: MA Experiment 20001560 PARAMETER Experiment Name: At_Drought_Soil_Dry_P Parameter: Age (day) Value: 28
  misc_feature: MA Experiment 20001560 PARAMETER Experiment Name: At_Drought_Soil_Dry_P Parameter: Organism Value: A. thaliana
  misc_feature: MA Experiment 20001560 PARAMETER Experiment Name: At_Drought_Soil_Dry_P Parameter: Plant Line Value: WS
  misc_feature: MA Experiment 20001560 PARAMETER Experiment Name: At_Drought_Soil_Dry_P Parameter: Post Timepoint (hr) Value: None
  misc_feature: MA Experiment 20001560 PARAMETER Experiment Name: At_Drought_Soil_Dry_P Parameter: Post-Treatment Value: None
  misc_feature: MA Experiment 20001560 PARAMETER Experiment Name: At_Drought_Soil_Dry_P Parameter: Timepoint (day) Value: 14
  misc_feature: MA Experiment 20001560 PARAMETER Experiment Name: At_Drought_Soil_Dry_P Parameter: Treatment Value: Drought vs. No Drought
  misc_feature: MA Experiment ID: 20001905 Result: Down-regulated in Transcription
  misc_feature: MA Experiment 20001905 PARAMETER Experiment Name: At_Drought_Reproduction_P Parameter: Age (day) Value: 40
  misc_feature: MA Experiment 20001905 PARAMETER Experiment Name: At_Drought_Reproduction_P Parameter: Organism Value: A. thaliana
  misc_feature: MA Experiment 20001905 PARAMETER Experiment Name: At_Drought_Reproduction_P Parameter: Plant Line Value: WS
  misc_feature: MA Experiment 20001905 PARAMETER Experiment Name: At_Drought_Reproduction_P Parameter: Timepoint (day) Value: 10
  misc_feature: MA Experiment 20001905 PARAMETER Experiment Name: At_Drought_Reproduction_P Parameter: Tissue Value: Rosettes
  misc_feature: MA Experiment 20001905 PARAMETER Experiment Name: At_Drought_Reproduction_P Parameter: Treatment Value: Drought vs. No Drought
  misc_feature: MA Experiment ID: 20001911 Result: Down-regulated in Transcription
  misc_feature: MA Experiment 20001911 PARAMETER Experiment Name: At_Drought_Reproduction_P Parameter: Age (day) Value: 40
  misc_feature: MA Experiment 20001911 PARAMETER Experiment Name: At_Drought_Reproduction_P Parameter: Organism Value: A. thaliana
  misc_feature: MA Experiment 20001911 PARAMETER Experiment Name: At_Drought_Reproduction_P Parameter: Plant Line Value: WS
  misc_feature: MA Experiment 20001911 PARAMETER Experiment Name: At_Drought_Reproduction_P Parameter: Timepoint (day) Value: 10
  misc_feature: MA Experiment 20001911 PARAMETER Experiment Name: At_Drought_Reproduction_P Parameter: Tissue Value: Flowers
  misc_feature: MA Experiment 20001911 PARAMETER Experiment Name: At_Drought_Reproduction_P Parameter: Treatment Value: Drought vs. No Drought
acgattctcccgccaccacaccacagctttttgcttcatctccttcttactctctgtgtctctaactcctcgtgcactcagacatcacagatatggcttgtgttcggtcgattggttctttaacttctgtcaaccattctcaacgaaatgttcctcgctcaggcattgtcttatcttcatgctctgttcttcccatcaaaagctcatctttcactggatcccctgtttctctcccgcgggctcaaccatcatcccgaacagctctaagaccgatgaaacccgtctctatcacgatgatggtaaagccggcgctccaattcatccaagggacggatgagatgacaatccctgatgttaagctgactcgatcaagagacggaagcaacggaatggcactgttctctttcgaccaaccatccgttttcgactcgagcggtgaagtcggagagattacaggattgtacatgattgatgaggaaggtgtgattcagtcgacggatgtgaacgcgagattcgtgaatgggaaaccggaagggattgtggcgaagcacataatgcgatcgccgaaagaatgggacaggttcatgaggtttatggagcgatactcggaccagaatggcttgcagtttgttaagaagcaatgaggttggagagaattttcaatgagcaaaacaaaatgtgtatgttacattaaattttttcactcttttgatttataatcttgtactctcctagttttgatctttacttgagtttcaacttacaatgg

SEQ ID NO: 101297 - protein, 183 aa, Arabidopsis thaliana; identical to SEQ ID NO: 26298
  peptide (1)..(183): Ceres Seq. ID no. 13607499
  misc_feature (71)..(183): Pfam Name: Photosystem II reaction centre W protein, PsbW Pfam Description: Photosystem II reaction centre W protein, PsbW
  misc_feature (1)..(183): Homolog of NCBI NO: 7488014 NR Description: photosystem II protein W homolog T5F17.110 -
  misc_feature (1)..(183): Homolog of NCBI NO: 18417239 NR Description: photosystem II protein W - like [Arabidopsis >gi|18087645|gb|AAL58951.1|AF462867_1 AT4g28660/T5F17_110 thaliana] >gi|21360421|gb|AAM47326.1| AT4g28660/T5F17_110
  misc_feature (66)..(182): Homolog of NCBI NO: 34907246 NR Description: photosystem II protein W-like protein [Oryza
  misc_feature (85)..(182): Homolog of NCBI NO: 19880501 NR Description: saline responsive OSSRII protein [Oryza sativa]
  misc_feature (74)..(181): Homolog of NCBI NO: 11467474 NR Description: photosystem II protein W [Odontella sinensis]
  misc_feature (74)..(181): Homolog of NCBI NO: 11467617 NR Description: photosystem II protein W [Guillardia theta] PHOTOSYSTEM II REACTION CENTER W PROTEIN
  misc_feature (74)..(181): Homolog of NCBI NO: 11465813 NR Description: photosystem II protein W [Porphyra purpurea]
  misc_feature (74)..(181): Homolog of NCBI NO: 11467376 NR Description: photosystem II protein W [Cyanophora paradoxa]
  misc_feature (74)..(183): Homolog of NCBI NO: 22298036 NR Description: photosystem II reaction center W protein
  misc_feature (74)..(183): Homolog of NCBI NO: 23126196 NR Description: hypothetical protein [Nostoc punctiforme]

SEQ ID NO: 101298 - protein, 123 aa, Arabidopsis thaliana; identical to SEQ ID NO: 26299
  peptide (1)..(123): Ceres Seq. ID no. 13607500
  misc_feature (11)..(123): Pfam Name: Photosystem II reaction centre W protein, PsbW Pfam Description: Photosystem II reaction centre W protein, PsbW
  misc_feature (1)..(123): Homolog of NCBI NO: 7488014 NR Description: photosystem II protein W homolog T5F17.110 -
  misc_feature (1)..(123): Homolog of NCBI NO: 18417239 NR Description: photosystem II protein W - like [Arabidopsis >gi|18087645|gb|AAL58951.1|AF462867_1 AT4g28660/T5F17_110 thaliana] >gi|21360421|gb|AAM47326.1| AT4g28660/T5F17_110
  misc_feature (6)..(122): Homolog of NCBI NO: 34907246 NR Description: photosystem II protein W-like protein [Oryza
  misc_feature (25)..(122): Homolog of NCBI NO: 19880501 NR Description: saline responsive OSSRII protein [Oryza sativa]
  misc_feature (14)..(121): Homolog of NCBI NO: 11467474 NR Description: photosystem II protein W [Odontella sinensis]
  misc_feature (14)..(121): Homolog of NCBI NO: 11467617 NR Description: photosystem II protein W [Guillardia theta] PHOTOSYSTEM II REACTION CENTER W PROTEIN
  misc_feature (14)..(121): Homolog of NCBI NO: 11465813 NR Description: photosystem II protein W [Porphyra purpurea]
  misc_feature (14)..(121): Homolog of NCBI NO: 11467376 NR Description: photosystem II protein W [Cyanophora paradoxa]
  misc_feature (14)..(123): Homolog of NCBI NO: 22298036 NR Description: photosystem II reaction center W protein
  misc_feature (14)..(123): Homolog of NCBI NO: 23126196 NR Description: hypothetical protein [Nostoc punctiforme]

SEQ ID NO: 101299 - protein, 116 aa, Arabidopsis thaliana; identical to SEQ ID NO: 26300
  peptide (1)..(116): Ceres Seq. ID no. 13607501
  misc_feature (4)..(116): Pfam Name: Photosystem II reaction centre W protein, PsbW Pfam Description: Photosystem II reaction centre W protein, PsbW
  misc_feature (1)..(116): Homolog of NCBI NO: 7488014 NR Description: photosystem II protein W homolog T5F17.110 -
  misc_feature (1)..(116): Homolog of NCBI NO: 18417239 NR Description: photosystem II protein W - like [Arabidopsis >gi|18087645|gb|AAL58951.1|AF462867_1 AT4g28660/T5F17_110 thaliana] >gi|21360421|gb|AAM47326.1| AT4g28660/T5F17_110
  misc_feature (1)..(115): Homolog of NCBI NO: 34907246 NR Description: photosystem II protein W-like protein [Oryza
  misc_feature (18)..(115): Homolog of NCBI NO: 19880501 NR Description: saline responsive OSSRII protein [Oryza sativa]
  misc_feature (7)..(114): Homolog of NCBI NO: 11467474 NR Description: photosystem II protein W [Odontella sinensis]
  misc_feature (7)..(114): Homolog of NCBI NO: 11467617 NR Description: photosystem II protein W [Guillardia theta] PHOTOSYSTEM II REACTION CENTER W PROTEIN
  misc_feature (7)..(114): Homolog of NCBI NO: 11465813 NR Description: photosystem II protein W [Porphyra purpurea]
  misc_feature (7)..(114): Homolog of NCBI NO: 11467376 NR Description: photosystem II protein W [Cyanophora paradoxa]
  misc_feature (7)..(116): Homolog of NCBI NO: 22298036 NR Description: photosystem II reaction center W protein
  misc_feature (7)..(116): Homolog of NCBI NO: 23126196 NR Description: hypothetical protein [Nostoc punctiforme]

SEQ ID NO: 101300 - DNA, 1158 bp, Arabidopsis thaliana
  misc_feature (1)..(1158): Ceres Seq. ID no. 13607502
  misc_feature: MA Experiment ID: 108434 Result: Up-regulated in Transcription
  misc_feature: MA Experiment 108434 PARAMETER Experiment Name: At_Root_Tips_cDNA_P Parameter: Tissue Value: Root Tips
  misc_feature: MA Experiment ID: 108435 Result: Up-regulated in Transcription
  misc_feature: MA Experiment 108435 PARAMETER Experiment Name: At_stm_Mutants_cDNA_P Parameter: Plant Line Value: wt Landsburg vs stm
  misc_feature: MA Experiment 108435 PARAMETER Experiment Name: At_stm_Mutants_cDNA_P Parameter: Tissue Value: Shoot Apical Meristem Region
  misc_feature: MA Experiment ID: 108461 Result: Down-regulated in Transcription
  misc_feature: MA Experiment 108461 PARAMETER Experiment Name: At_Germinating_Seeds_cDNA_P Parameter: Age (day) Value: 1 vs. 0
  misc_feature: MA Experiment 108461 PARAMETER Experiment Name: At_Germinating_Seeds_cDNA_P Parameter: Tissue Value: Germinating Seeds
  misc_feature: MA Experiment ID: 108462 Result: Down-regulated in Transcription
  misc_feature: MA Experiment 108462 PARAMETER Experiment Name: At_Germinating_Seeds_cDNA_P Parameter: Age (day) Value: 2 vs. 0
  misc_feature: MA Experiment 108462 PARAMETER Experiment Name: At_Germinating_Seeds_cDNA_P Parameter: Tissue Value: Germinating Seeds
  misc_feature: MA Experiment ID: 108463 Result: Down-regulated in Transcription
  misc_feature: MA Experiment 108463 PARAMETER Experiment Name: At_Germinating_Seeds_cDNA_P Parameter: Age (day) Value: 3 vs. 0
  misc_feature: MA Experiment 108463 PARAMETER Experiment Name: At_Germinating_Seeds_cDNA_P Parameter: Tissue Value: Germinating Seeds
  misc_feature: MA Experiment ID: 108464 Result: Down-regulated in Transcription
  misc_feature: MA Experiment 108464 PARAMETER Experiment Name: At_Germinating_Seeds_cDNA_P Parameter: Age (day) Value: 4 vs. 0
  misc_feature: MA Experiment 108464 PARAMETER Experiment Name: At_Germinating_Seeds_cDNA_P Parameter: Tissue Value: Germinating Seeds
  misc_feature: MA Experiment ID: 108573 Result: Down-regulated in Transcription
  misc_feature: MA Experiment 108573 PARAMETER Experiment Name: At_Drought_cDNA_P Parameter: Timepoint (hr) Value: 6
  misc_feature: MA Experiment 108573 PARAMETER Experiment Name: At_Drought_cDNA_P Parameter: Tissue Value: Aerial
  misc_feature: MA Experiment 108573 PARAMETER Experiment Name: At_Drought_cDNA_P Parameter: Treatment Value: Drought vs. No Drought
  misc_feature: MA Experiment ID: 20000069 Result: Up-regulated in Transcription
  misc_feature: MA Experiment 20000069 PARAMETER Experiment Name: At_100uM_ABA_Mutants_cDNA_P Parameter: Plant Line Value: CS23
  misc_feature: MA Experiment 20000069 PARAMETER Experiment Name: At_100uM_ABA_Mutants_cDNA_P Parameter: Timepoint (hr) Value: 6
  misc_feature: MA Experiment 20000069 PARAMETER Experiment Name: At_100uM_ABA_Mutants_cDNA_P Parameter: Tissue Value: Aerial
  misc_feature: MA Experiment 20000069 PARAMETER Experiment Name: At_100uM_ABA_Mutants_cDNA_P Parameter: Treatment Value: 100uM ABA vs. No Treatment
  misc_feature: MA Experiment ID: 20000088 Result: Up-regulated in Transcription
  misc_feature: MA Experiment 20000088 PARAMETER Experiment Name: At_100uM_ABA_Mutants_cDNA_P Parameter: Plant Line Value: Landsberg
  misc_feature: MA Experiment 20000088 PARAMETER Experiment Name: At_100uM_ABA_Mutants_cDNA_P Parameter: Timepoint (hr) Value: 6
  misc_feature: MA Experiment 20000088 PARAMETER Experiment Name: At_100uM_ABA_Mutants_cDNA_P Parameter: Tissue Value: Aerial
  misc_feature: MA Experiment 20000088 PARAMETER Experiment Name: At_100uM_ABA_Mutants_cDNA_P Parameter: Treatment Value: 100uM ABA vs. No Treatment
  misc_feature: MA Experiment ID: 20000111 Result: Up-regulated in Transcription
  misc_feature: MA Experiment 20000111 PARAMETER Experiment Name: At_42deg_Heat_cDNA_P Parameter: Temperature (deg C) Value: 42 vs. 22
  misc_feature: MA Experiment 20000111 PARAMETER Experiment Name: At_42deg_Heat_cDNA_P Parameter: Timepoint (hr) Value: 6
  misc_feature: MA Experiment 20000111 PARAMETER Experiment Name: At_42deg_Heat_cDNA_P Parameter: Tissue Value: Aerial
  misc_feature: MA Experiment ID: 20000113 Result: Up-regulated in Transcription
  misc_feature: MA Experiment 20000113 PARAMETER Experiment Name: At_42deg_Heat_cDNA_P Parameter: Temperature (deg C) Value: 42 vs. 22
  misc_feature: MA Experiment 20000113 PARAMETER Experiment Name: At_42deg_Heat_cDNA_P Parameter: Timepoint (hr) Value: 8
  misc_feature: MA Experiment 20000113 PARAMETER Experiment Name: At_42deg_Heat_cDNA_P Parameter: Tissue Value: Aerial
  misc_feature: MA Experiment ID: 20000173 Result: Up-regulated in Transcription
  misc_feature: MA Experiment 20000173 PARAMETER Experiment Name: At_42deg_Heat_P Parameter: Age (day) Value: 14
  misc_feature: MA Experiment 20000173 PARAMETER Experiment Name: At_42deg_Heat_P Parameter: Organism Value: A. thaliana
  misc_feature: MA Experiment 20000173 PARAMETER Experiment Name: At_42deg_Heat_P Parameter: Plant Line Value: WS
  misc_feature: MA Experiment 20000173 PARAMETER Experiment Name: At_42deg_Heat_P Parameter: Temperature (deg C) Value: 42 vs. 22
  misc_feature: MA Experiment 20000173 PARAMETER Experiment Name: At_42deg_Heat_P Parameter: Timepoint (hr) Value: 6
  misc_feature: MA Experiment 20000173 PARAMETER Experiment Name: At_42deg_Heat_P Parameter: Tissue Value: Aerial
  misc_feature: MA Experiment ID: 20000180 Result: Down-regulated in Transcription
  misc_feature: MA Experiment 20000180 PARAMETER Experiment Name: At_Germinating_Seeds_P Parameter: Age (hr) Value: 24 vs. 0
  misc_feature: MA Experiment 20000180 PARAMETER Experiment Name: At_Germinating_Seeds_P Parameter: Tissue Value: Germinating Seeds
  misc_feature: MA Experiment ID: 20001247 Result: Down-regulated in Transcription
  misc_feature: MA Experiment 20001247 PARAMETER Experiment Name: At_Far-red-induction_P Parameter: Age (day) Value: 7
  misc_feature: MA Experiment 20001247 PARAMETER Experiment Name: At_Far-red-induction_P Parameter: Light Value: Far-red vs. White
  misc_feature: MA Experiment 20001247 PARAMETER Experiment Name: At_Far-red-induction_P Parameter: Organism Value: A. thaliana
  misc_feature: MA Experiment 20001247 PARAMETER Experiment Name: At_Far-red-induction_P Parameter: Plant Line Value: Columbia
  misc_feature: MA Experiment 20001247 PARAMETER Experiment Name: At_Far-red-induction_P Parameter: Timepoint (hr) Value: 1
  misc_feature: MA Experiment 20001247 PARAMETER Experiment Name: At_Far-red-induction_P Parameter: Tissue Value: Whole Plant
ctaaacccctttctccacgatcttccttttcctctctctgcgacttgaagcaaagtttccagaaaaagagatgaacaacgtcaaagttccaaagataccaggtggtggtgccatttcgacgttgcttaaggttgggattattggtgggcttggtctctatggtgctacgcacagtctctacaatgttgaaggaggacatcgagccatcatgttcaatcgtttagtcggtattaaagataaggtttaccctgagggtacacaccttatgattccttggtttgaaaggccggtcatctatgacgttcgtgctcgaccttaccttgttgagagtacatccggaagccgtgatcttcagatggtgaaaattgggcttagggttctcacacgtcccatggcagaccagttacctgaaatctacagaagccttggtgagaactacagcgagagagttctaccttctataatcaacgagactttgaaagctgtggttgctcagtacaatgcaagccagcttattactcagagagaggcggtcagtagggagatcaggaagattctgactgaacgagcagcaaacttcaatgttgcgcttgacgatgtgtccatcacaaacctgacattcgggaaggagttcacagctgccattgaagcaaagcaggtggcggctcaagaggctgagcgggctaagttcattgttgagaaggccgaacaagacaagagaagtgctgttatccgcgcccagggagaagccaagagtgctcagctcattggtcaagcaattgcaaacaaccaagcgtttatcacgctcaggaagatcgaggctgcaagagagattgcacagaccatagcaaactcggcgaacaaggtttacttgagctcagacgatcttttgcttaacctacaagggatgaatttggatgttgatgcaaagaactagagaggtttcttaagtaaaactgcatgtgggtcatttcgtcttttaagttcctagaatccgttggaacaaaagcttgatttgtactactaaatactacttttaaaattcttgggatcagtctatctcaaggtgaaagttgaaaaagaagatactgtcttgctgaatgagttaattgtaataaacttgtcgtttgggggagaaaaacacttgcatttggattt

SEQ ID NO: 101301 - protein, 288 aa, Arabidopsis thaliana; identical to SEQ ID NO: 25453
  peptide (1)..(288): Ceres Seq. ID no. 13607503
  misc_feature (1)..(288): Homolog of NCBI NO: 15235317 NR Description: prohibitin-related protein [Arabidopsis thaliana]
  misc_feature (1)..(288): Homolog of NCBI NO: 21593626 NR Description: prohibitin-like protein [Arabidopsis thaliana]
  misc_feature (1)..(287): Homolog of NCBI NO: 12751303 NR Description: prohibitin 1-like protein [Brassica napus]
  misc_feature (3)..(287): Homolog of NCBI NO: 15225374 NR Description: prohibitin -related [Arabidopsis thaliana]
  misc_feature (5)..(283): Homolog of NCBI NO: 15219569 NR Description: prohibitin 2 -related [Arabidopsis thaliana]
  misc_feature (1)..(282): Homolog of NCBI NO: 7716462 NR Description: prohibitin [Zea mays]
  misc_feature (1)..(278): Homolog of NCBI NO: 15241424 NR Description: prohibitin [Arabidopsis thaliana]
  misc_feature (5)..(282): Homolog of NCBI NO: 34394832 NR Description: putative prohibitin [Oryza sativa (japonica
  misc_feature (5)..(287): Homolog of NCBI NO: 7716456 NR Description: prohibitin [Zea mays]
  misc_feature (1)..(276): Homolog of NCBI NO: 6321670 NR Description: Possible role in aging; Phb2p [Saccharomyces

SEQ ID NO: 101302 - protein, 242 aa, Arabidopsis thaliana; identical to SEQ ID NO: 25454
  peptide (1)..(242): Ceres Seq. ID no. 13607504
  misc_feature (1)..(242): Homolog of NCBI NO: 15235317 NR Description: prohibitin-related protein [Arabidopsis thaliana]
  misc_feature (1)..(242): Homolog of NCBI NO: 21593626 NR Description: prohibitin-like protein [Arabidopsis thaliana]
  misc_feature (1)..(241): Homolog of NCBI NO: 12751303 NR Description: prohibitin 1-like protein [Brassica napus]
  misc_feature (1)..(241): Homolog of NCBI NO: 15225374 NR Description: prohibitin -related [Arabidopsis thaliana]
  misc_feature (1)..(237): Homolog of NCBI NO: 15219569 NR Description: prohibitin 2 -related [Arabidopsis thaliana]
  misc_feature (1)..(236): Homolog of NCBI NO: 7716462 NR Description: prohibitin [Zea mays]
  misc_feature (1)..(232): Homolog of NCBI NO: 15241424 NR Description: prohibitin [Arabidopsis thaliana]
  misc_feature (1)..(236): Homolog of NCBI NO: 34394832 NR Description: putative prohibitin [Oryza sativa (japonica
  misc_feature (1)..(241): Homolog of NCBI NO: 7716456 NR Description: prohibitin [Zea mays]
  misc_feature (1)..(230): Homolog of NCBI NO: 6321670 NR Description: Possible role in aging; Phb2p [Saccharomyces

SEQ ID NO: 101303 - protein, 223 aa, Arabidopsis thaliana; identical to SEQ ID NO: 25455
  peptide (1)..(223): Ceres Seq. ID no. 13607505
  misc_feature (1)..(223): Homolog of NCBI NO: 15235317 NR Description: prohibitin-related protein [Arabidopsis thaliana]
  misc_feature (1)..(223): Homolog of NCBI NO: 21593626 NR Description: prohibitin-like protein [Arabidopsis thaliana]
  misc_feature (1)..(222): Homolog of NCBI NO: 12751303 NR Description: prohibitin 1-like protein [Brassica napus]
  misc_feature (1)..(222): Homolog of NCBI NO: 15225374 NR Description: prohibitin -related [Arabidopsis thaliana]
  misc_feature (1)..(218): Homolog of NCBI NO: 15219569 NR Description: prohibitin 2 -related [Arabidopsis thaliana]
  misc_feature (1)..(217): Homolog of NCBI NO: 7716462 NR Description: prohibitin [Zea mays]
  misc_feature (1)..(213): Homolog of NCBI NO: 15241424 NR Description: prohibitin [Arabidopsis thaliana]
  misc_feature (1)..(217): Homolog of NCBI NO: 34394832 NR Description: putative prohibitin [Oryza sativa (japonica
  misc_feature (1)..(222): Homolog of NCBI NO: 7716456 NR Description: prohibitin [Zea mays]
  misc_feature (1)..(211): Homolog of NCBI NO: 6321670 NR Description: Possible role in aging; Phb2p [Saccharomyces

SEQ ID NO: 101304 - DNA, 722 bp, Arabidopsis thaliana
  misc_feature (1)..(722): Ceres Seq. ID no. 13607506
  misc_feature: MA Experiment ID: 108434 Result: Up-regulated in Transcription
  misc_feature: MA Experiment 108434 PARAMETER Experiment Name: At_Root_Tips_cDNA_P Parameter: Tissue Value: Root Tips
  misc_feature: MA Experiment ID: 108462 Result: Down-regulated in Transcription
  misc_feature: MA Experiment 108462 PARAMETER Experiment Name: At_Germinating_Seeds_cDNA_P Parameter: Age (day) Value: 2 vs. 0
  misc_feature: MA Experiment 108462 PARAMETER Experiment Name: At_Germinating_Seeds_cDNA_P Parameter: Tissue Value: Germinating Seeds
  misc_feature: MA Experiment ID: 108463 Result: Down-regulated in Transcription
  misc_feature: MA Experiment 108463 PARAMETER Experiment Name: At_Germinating_Seeds_cDNA_P Parameter: Age (day) Value: 3 vs. 0
  misc_feature: MA Experiment 108463 PARAMETER Experiment Name: At_Germinating_Seeds_cDNA_P Parameter: Tissue Value: Germinating Seeds
  misc_feature: MA Experiment ID: 20000184 Result: Up-regulated in Transcription
  misc_feature: MA Experiment 20000184 PARAMETER Experiment Name: At_Shoots__P Parameter: Age (day) Value: 7
  misc_feature: MA Experiment 20000184 PARAMETER Experiment Name: At_Shoots__P Parameter: Tissue Value: Shoots vs. Whole Plant
ctagtttaatgtcttggtataaaagcctatattttgcatttttcatccgactctctgcgttaggtttcattttagcggcagacgagagagcaaaagcaaggagaaaccctaaccatggcgacacaaccagctactgaatctgtgcaatgcttcggaaggaagaagaccgcagtggccgtcactcactgcaagcgtggatctggtttaattaagctcaacggttgcccaatcgagcttttccagccagagatcctccgattcaagatcttcgagccgattcttctcctcggaaagcaccgtttcgcaggtgtgaacatgaggatccgtgtcaacggtggtggtcacacatcacaggtttacgccatccgtcagagtatcgcgaaggctcttgttgcgtactaccagaagtatgtggatgagcagtcgaagaaggagattaaagatatcttggtgaggtatgataggactctgcttgtggcggatccgaggaggtgtgagccgaagaagtttggtggtcgtggtgctcgttctcgttaccagaagagttaccgttaaacaaagctgggttttttttttttcaatttcgattcatctcaaggtttttggagtttttgattatggacttgtgagactcttagaatttctgttttatgatttattggataactgtgattctccaagaacttatgtcttatatgattttgtcttcatttcgttgcttc

SEQ ID NO: 101305 - protein, 146 aa, Arabidopsis thaliana [sequence omitted]

SEQ ID NO: 101306 - protein, 88 aa, Arabidopsis thaliana
  peptide (1)..(88): Ceres Seq. ID no. 13607508
MIGLCLWRIRGGVSRRSLVVVVLVLVTRRVTVKQSWVFFFSISIHLKVFGVFDYGLVRLLEFLFYDLLDNCDSPRTYVLYDFVFISLL

SEQ ID NO: 101307 - protein, 79 aa, Arabidopsis thaliana; identical to SEQ ID NO: 21210
  peptide (1)..(79): Ceres Seq. ID no. 13607509
  misc_feature (1)..(79): Pfam Name: Ribosomal protein S9/S16 Pfam Description: Ribosomal protein S9/S16
  misc_feature (1)..(79): Homolog of NCBI NO: 15226676 NR Description: 40S ribosomal protein S16 (RPS16A) [Arabidopsis
  misc_feature (1)..(79): Homolog of NCBI NO: 15238809 NR Description: 40S ribosomal protein S16 (RPS16C) [Arabidopsis >gi|2500430|sp|Q42340|RS16_ARATH 40S ribosomal protein S16 putative 40S ribosomal protein S16 [Arabidopsis thaliana]
  misc_feature (1)..(79): Homolog of NCBI NO: 6984222 NR Description: 40S ribosomal protein S16 [Euphorbia esula]
  misc_feature (1)..(79): Homolog of NCBI NO: 15229252 NR Description: 40S ribosomal protein S16 (RPS16B) [Arabidopsis >gi|6721162|gb|AAF26790.1|AC016829_14 putative 40S ribosomal S16 [Arabidopsis thaliana] >gi|28466835|gb|AAO44026.1| At3g04230
  misc_feature (1)..(79): Homolog of NCBI NO: 3122800 NR Description: 40S RIBOSOMAL PROTEIN S16
  misc_feature (1)..(79): Homolog of NCBI NO: 1173209 NR Description: 40S RIBOSOMAL PROTEIN S16 >gi|541835|pir||S41193
  misc_feature (1)..(79): Homolog of NCBI NO: 17369864 NR Description: 40S ribosomal protein S16
  misc_feature (1)..(79): Homolog of NCBI NO: 39850096 NR Description: Unknown (protein for IMAGE:6887619) [Rattus
  misc_feature (1)..(79): Homolog of NCBI NO: 4506691 NR Description: ribosomal protein S16; 40S ribosomal protein S16 sapiens] >gi|27676542|ref|XP_214829.1| similar to ribosomal
  misc_feature (1)..(79): Homolog of NCBI NO: 15294045 NR Description: 40S ribosomal protein S16 [Ictalurus punctatus]

SEQ ID NO: 101308 - DNA, 1975 bp, Arabidopsis thaliana
  misc_feature (1)..(1975): Ceres Seq. ID no. 13607514
  misc_feature: MA Experiment ID: 20000328 Result: Down-regulated in Transcription
  misc_feature: MA Experiment 20000328 PARAMETER Experiment Name: At_42deg_Heat_Sub_P Parameter: Age (day) Value: 14
  misc_feature: MA Experiment 20000328 PARAMETER Experiment Name: At_42deg_Heat_Sub_P Parameter: Organism Value: A. thaliana
  misc_feature: MA Experiment 20000328 PARAMETER Experiment Name: At_42deg_Heat_Sub_P Parameter: Plant Line Value: WS
  misc_feature: MA Experiment 20000328 PARAMETER Experiment Name: At_42deg_Heat_Sub_P Parameter: Temperature (deg C) Value: 42 vs. 22
  misc_feature: MA Experiment 20000328 PARAMETER Experiment Name: At_42deg_Heat_Sub_P Parameter: Timepoint (hr) Value: 6
  misc_feature: MA Experiment 20000328 PARAMETER Experiment Name: At_42deg_Heat_Sub_P Parameter: Tissue Value: Aerial
  misc_feature: MA Experiment ID: 20000346 Result: Up-regulated in Transcription
  misc_feature: MA Experiment 20000346 PARAMETER Experiment Name: At_2mM_SA_Sub_P Parameter: Age (day) Value: 14
  misc_feature: MA Experiment 20000346 PARAMETER Experiment Name: At_2mM_SA_Sub_P Parameter: Organism Value: A. thaliana
  misc_feature: MA Experiment 20000346 PARAMETER Experiment Name: At_2mM_SA_Sub_P Parameter: Plant Line Value: WS
  misc_feature: MA Experiment 20000346 PARAMETER Experiment Name: At_2mM_SA_Sub_P Parameter: Timepoint (hr) Value: 1
  misc_feature: MA Experiment 20000346 PARAMETER Experiment Name: At_2mM_SA_Sub_P Parameter: Tissue Value: Aerial
  misc_feature: MA Experiment 20000346 PARAMETER Experiment Name: At_2mM_SA_Sub_P Parameter: Treatment Value: 2mM SA vs. No Treatment
  misc_feature: MA Experiment ID: 20000347 Result: Up-regulated in Transcription
  misc_feature: MA Experiment 20000347 PARAMETER Experiment Name: At_2mM_SA_Sub_P Parameter: Age (day) Value: 14
  misc_feature: MA Experiment 20000347 PARAMETER Experiment Name: At_2mM_SA_Sub_P Parameter: Organism Value: A. thaliana
  misc_feature: MA Experiment 20000347 PARAMETER Experiment Name: At_2mM_SA_Sub_P Parameter: Plant Line Value: WS
  misc_feature: MA Experiment 20000347 PARAMETER Experiment Name: At_2mM_SA_Sub_P Parameter: Timepoint (hr) Value: 6
  misc_feature: MA Experiment 20000347 PARAMETER Experiment Name: At_2mM_SA_Sub_P Parameter: Tissue Value: Aerial
  misc_feature: MA Experiment 20000347 PARAMETER Experiment Name: At_2mM_SA_Sub_P Parameter: Treatment Value: 2mM SA vs. No Treatment
  misc_feature: MA Experiment ID: 20000355 Result: Down-regulated in Transcription
  misc_feature: MA Experiment 20000355 PARAMETER Experiment Name: At_Siliques_Sub_P Parameter: Age (day) Value: 21
  misc_feature: MA Experiment 20000355 PARAMETER Experiment Name: At_Siliques_Sub_P Parameter: Organism Value: A. thaliana
  misc_feature: MA Experiment 20000355 PARAMETER Experiment Name: At_Siliques_Sub_P Parameter: Plant Line Value: WS
  misc_feature: MA Experiment 20000355 PARAMETER Experiment Name: At_Siliques_Sub_P Parameter: Tissue Value: Less Than 5mm Siliques vs. Whole Plant
  misc_feature: MA Experiment ID: 20000440 Result: Down-regulated in Transcription
  misc_feature: MA Experiment 20000440 PARAMETER Experiment Name: At_Closed-Flower__Sub_P Parameter: Tissue Value: Closed Flower vs. Whole Plant
atggaacatggatcatcccgtggctttatttggctgattctatttctcgattttgtttccagagtcaccggaaaaacacaagttgatgctctcattgctctaagaagcagtttatcatcaggtgaccatacaaacaatatactccaaagctggaatgccactcacgttactccatgttcatggtttcatgttacttgcaatactgaaaacagtgttactcgtcttgacctggggagtgctaatctatctggagaactggtgccacagcttgctcagcttccaaatttgcagtacttggaactttttaacaataatattactggggagatacctgaggagcttggcgacttgatggaactagtaagcttggacctttttgcaaacaacataagcggtcccatcccttcctctcttggcaaactaggaaaactccgcttcttgcgtctttataacaacagcttatctggagaaattccaaggtctttgactgctctgccgctggatgttcttgatatctcaaacaatcggctcagtggagatattcctgttaatggttccttttcgcagttcacttctatgagttttgccaataataaattaaggccgcgacctgcatctccttcaccatcaccttcaggaacgtctgcagcaatagtagtgggagttgctgcgggtgcagcacttctatttgcgcttgcttggtggctgagaagaaaactgcagggtcactttcttgatgtacctgctgaagaagacccagaggtttatttaggacaatttaaaaggttctccttgcgtgaactgctagttgctacagagaaatttagcaaaagaaatgtattgggcaaaggacgttttggtatattgtataaaggacgtttagctgatgacactctagtggctgtgaaacggctaaatgaagaacgtaccaagggtggggaactgcagtttcaaaccgaagttgagatgatcagtatggccgttcataggaacttgcttcggcttcgtggcttttgcatgactccaactgaaagattacttgtttatccctacatggctaatggaagtgttgcttcttgtttaagagagcgtcctgaaggcaatccagcccttgactggccaaaaagaaagcatattgctctgggatcagcaagggggctcgcatatttacacgatcattgcgaccaaaagatcattcacctggatgtgaaagctgcaaatatactgttagatgaagagtttgaagctgttgttggagattttgggctagcaaaattaatgaattataacgactcccatgtgacaactgctgtacggggtacgattggccatatagcgcccgagtacctctcgacaggaaaatcttctgagaagactgatgtttttgggtacggggtcatgcttctcgagctcatcactggacaaaaggctttcgatcttgctcggcttgcaaatgatgatgatatcatgttactcgactgggtgaaagaggttttgaaagagaagaagttggaaagccttgtggatgcagaactcgaaggaaagtacgtggaaacagaagtggagcagctgatacaaatggctctgctctgcactcaaagttctgcaatggaacgtccaaagatgtcagaagtagtgagaatgctggaaggagatggtttagctgagagatgggaagaatggcaaaaggaggagatgccaatacatgattttaactatcaagcctatcctcatgctggcactgactggctcatcccctattccaattcccttatcgaaaacgattacccctcggggccaagataaccttttagaaagggtcatttcttgtgggttcttcaacaagtatatatataggtagtgaagttgtaagaagcaaaaccccacattcacctttgaatatcactactctataatactaatcatatctactatactttctctccacttccattaagcaataaaaactattctt

SEQ ID NO: 101309 - protein, 601 aa, Arabidopsis thaliana
  peptide (1)..(601): Ceres Seq. ID no. 13607515
  misc_feature (1)..(601): Homolog of NCBI NO: 30678986 NR Description: leucine-rich repeat protein kinase family thaliana] >gi|15810409|gb|AAL07092.1| unknown protein
  misc_feature (118)..(601): Homolog of NCBI NO: 22325667 NR Description: receptor-related protein kinase [Arabidopsis >gi|20453088|gb|AAM19787.1| At2g13800/F13J11.15 [Arabidopsis >gi|24796990|gb|AAN64507.1| At2g13800/F13J11.15 [Arabidopsis
  misc_feature (9)..(601): Homolog of NCBI NO: 18418211 NR Description: somatic embryogenesis receptor-related kinase protein [Arabidopsis thaliana] >gi|29427920|sp|Q94F62|BAK1_ARATH
  misc_feature (9)..(601): Homolog of NCBI NO: 14573459 NR Description: somatic embryogenesis receptor-like kinase 3
  misc_feature (100)..(601): Homolog of NCBI NO: 25411516 NR Description: probable receptor-like protein kinase [imported] -
  misc_feature (29)..(601): Homolog of NCBI NO: 25406123 NR Description: hypothetical protein F14O23.21 [imported] - thaliana >gi|7239510|gb|AAF43236.1|AC012654_20 Contains
  misc_feature (147)..(601): Homolog of NCBI NO: 25411517 NR Description: probable receptor-like protein kinase [imported] -
  misc_feature (147)..(601): Homolog of NCBI NO: 7488244 NR Description: protein kinase homolog F17M5.190 - Arabidopsis
  misc_feature (29)..(107): Homolog of NCBI NO: 7488244 NR Description: protein kinase homolog F17M5.190 - Arabidopsis
  misc_feature (75)..(601): Homolog of NCBI NO: 24935324 NR Description: somatic embryogenesis receptor kinase 1 [Medicago >gi|24935326|gb|AAN64294.1| somatic embryogenesis receptor kinase
MEHGSSRGFIWLILFLDFVSRVTGKTQVDALIALRSSLSSGDHTNNILQSWNATHVTPCSWFHVTCNTENSVTRLDLGSANLSGELVPQLAQLPNLQYLELFNNNITGEIPEELGDLMELVSLDLFANNISGPIPSSLGKLGKLRFLRLYNNSLSGEIPRSLTALPLDVLDISNNRLSGDIPVNGSFSQFTSMSFANNKLRPRPASPSPSPSGTSAAIVVGVAAGAALLFALAWWLRRKLQGHFLDVPAEEDPEVYLGQFKRFSLRELLVATEKFSKRNVLGKGRFGILYKGRLADDTLVAVKRLNEERTKGGELQFQTEVEMISMAVHRNLLRLRGFCMTPTERLLVYPYMANGSVASCLRERPEGNPALDWPKRKHIALGSARGLAYLHDHCDQKIIHLDVKAANILLDEEFEAVVGDFGLAKLMNYNDSHVTTAVRGTIGHIAPEYLSTGKSSEKTDVFGYGVMLLELITGQKAFDLARLANDDDIMLLDWVKEVLKEKKLESLVDAELEGKYVETEVEQLIQMALLCTQSSAMERPKMSEVVRMLEGDGLAERWEEWQKEEMPIHDFNYQAYPHAGTDWLIPYSNSLIENDYPSGPR

SEQ ID NO: 101310 - protein, 484 aa, Arabidopsis thaliana; identical to SEQ ID NO: 91782
  peptide (1)..(484): Ceres Seq. ID no. 13607516
  misc_feature (1)..(484): Homolog of NCBI NO: 30678986 NR Description: leucine-rich repeat protein kinase family thaliana] >gi|15810409|gb|AAL07092.1| unknown protein
  misc_feature (1)..(484): Homolog of NCBI NO: 22325667 NR Description: receptor-related protein kinase [Arabidopsis >gi|20453088|gb|AAM19787.1| At2g13800/F13J11.15 [Arabidopsis >gi|24796990|gb|AAN64507.1| At2g13800/F13J11.15 [Arabidopsis
  misc_feature (1)..(484): Homolog of NCBI NO: 18418211 NR Description: somatic embryogenesis receptor-related kinase protein [Arabidopsis thaliana] >gi|29427920|sp|Q94F62|BAK1_ARATH
  misc_feature (1)..(484): Homolog of NCBI NO: 14573459 NR Description: somatic embryogenesis receptor-like kinase 3
  misc_feature (1)..(484): Homolog of NCBI NO: 25411516 NR Description: probable receptor-like protein kinase [imported] -
  misc_feature (1)..(484): Homolog of NCBI NO: 25406123 NR Description: hypothetical protein F14O23.21 [imported] - thaliana >gi|7239510|gb|AAF43236.1|AC012654_20 Contains
  misc_feature (30)..(484): Homolog of NCBI NO: 25411517 NR Description: probable receptor-like protein kinase [imported] -
  misc_feature (30)..(484): Homolog of NCBI NO: 7488244 NR Description: protein kinase homolog F17M5.190 - Arabidopsis
  misc_feature (1)..(484): Homolog of NCBI NO: 24935324 NR Description: somatic embryogenesis receptor kinase 1 [Medicago >gi|24935326|gb|AAN64294.1| somatic embryogenesis receptor kinase
  misc_feature (1)..(484): Homolog of NCBI NO: 7488932 NR Description: probable somatic embryogenesis receptor-like

SEQ ID NO: 101311 - protein, 409 aa, Arabidopsis thaliana; identical to SEQ ID NO: 91783
  peptide (1)..(409): Ceres Seq. ID no. 13607517
  misc_feature (1)..(409): Homolog of NCBI NO: 30678986 NR Description: leucine-rich repeat protein kinase family thaliana] >gi|15810409|gb|AAL07092.1| unknown protein
  misc_feature (1)..(409): Homolog of NCBI NO: 22325667 NR Description: receptor-related protein kinase [Arabidopsis >gi|20453088|gb|AAM19787.1| At2g13800/F13J11.15 [Arabidopsis >gi|24796990|gb|AAN64507.1| At2g13800/F13J11.15 [Arabidopsis
  misc_feature (1)..(409): Homolog of NCBI NO: 18418211 NR Description: somatic embryogenesis receptor-related kinase protein [Arabidopsis thaliana] >gi|29427920|sp|Q94F62|BAK1_ARATH
  misc_feature (1)..(409): Homolog of NCBI NO: 14573459 NR Description: somatic embryogenesis receptor-like kinase 3
  misc_feature (1)..(409): Homolog of NCBI NO: 25411516 NR Description: probable receptor-like protein kinase [imported] -
  misc_feature (1)..(409): Homolog of NCBI NO: 25406123 NR Description: hypothetical protein F14O23.21 [imported] - thaliana >gi|7239510|gb|AAF43236.1|AC012654_20 Contains
  misc_feature (1)..(409): Homolog of NCBI NO: 25411517 NR Description: probable receptor-like protein kinase [imported] -
  misc_feature (1)..(409): Homolog of NCBI NO: 7488244 NR Description: protein kinase homolog F17M5.190 - Arabidopsis
  misc_feature (1)..(409): Homolog of NCBI NO: 24935324 NR Description: somatic embryogenesis receptor kinase 1 [Medicago >gi|24935326|gb|AAN64294.1| somatic embryogenesis receptor kinase
  misc_feature (1)..(409): Homolog of NCBI NO: 7488932 NR Description: probable somatic embryogenesis receptor-like

SEQ ID NO: 101312 - DNA, 1855 bp, Arabidopsis thaliana
  misc_feature (1)..(1855): Ceres Seq. ID no. 13607547
  misc_feature: MA Experiment ID: 108434 Result: Up-regulated in Transcription
  misc_feature: MA Experiment 108434 PARAMETER Experiment Name: At_Root_Tips_cDNA_P Parameter: Tissue Value: Root Tips
  misc_feature: MA Experiment ID: 108464 Result: Up-regulated in Transcription
  misc_feature: MA Experiment 108464 PARAMETER Experiment Name: At_Germinating_Seeds_cDNA_P Parameter: Age (day) Value: 4 vs. 0
  misc_feature: MA Experiment 108464 PARAMETER Experiment Name: At_Germinating_Seeds_cDNA_P Parameter: Tissue Value: Germinating Seeds
  misc_feature: MA Experiment ID: 20000069 Result: Down-regulated in Transcription
  misc_feature: MA Experiment 20000069 PARAMETER Experiment Name: At_100uM_ABA_Mutants_cDNA_P Parameter: Plant Line Value: CS23
  misc_feature: MA Experiment 20000069 PARAMETER Experiment Name: At_100uM_ABA_Mutants_cDNA_P Parameter: Timepoint (hr) Value: 6
  misc_feature: MA Experiment 20000069 PARAMETER Experiment Name: At_100uM_ABA_Mutants_cDNA_P Parameter: Tissue Value: Aerial
  misc_feature: MA Experiment 20000069 PARAMETER Experiment Name: At_100uM_ABA_Mutants_cDNA_P Parameter: Treatment Value: 100uM ABA vs. No Treatment
  misc_feature: MA Experiment ID: 20000087 Result: Down-regulated in Transcription
  misc_feature: MA Experiment 20000087 PARAMETER Experiment Name: At_100uM_ABA_Mutants_cDNA_P Parameter: Plant Line Value: WS
  misc_feature: MA Experiment 20000087 PARAMETER Experiment Name: At_100uM_ABA_Mutants_cDNA_P Parameter: Timepoint (hr) Value: 6
  misc_feature: MA Experiment 20000087 PARAMETER Experiment Name: At_100uM_ABA_Mutants_cDNA_P Parameter: Tissue Value: Aerial
  misc_feature: MA Experiment 20000087 PARAMETER Experiment Name: At_100uM_ABA_Mutants_cDNA_P Parameter: Treatment Value: 100uM ABA vs. No Treatment
  misc_feature: MA Experiment ID: 20000089 Result: Down-regulated in Transcription
  misc_feature: MA Experiment ID: 20000111 Result: Down-regulated in Transcription
  misc_feature: MA Experiment 20000111 PARAMETER Experiment Name: At_42deg_Heat_cDNA_P Parameter: Temperature (deg C) Value: 42 vs. 22
  misc_feature: MA Experiment 20000111 PARAMETER Experiment Name: At_42deg_Heat_cDNA_P Parameter: Timepoint (hr) Value: 6
  misc_feature: MA Experiment 20000111 PARAMETER Experiment Name: At_42deg_Heat_cDNA_P Parameter: Tissue Value: Aerial
  misc_feature: MA Experiment ID: 20000112 Result: Down-regulated in Transcription
  misc_feature: MA Experiment 20000112 PARAMETER Experiment Name: At_42deg_Heat_cDNA_P Parameter: Temperature (deg C) Value: 42 vs. 22
  misc_feature: MA Experiment 20000112 PARAMETER Experiment Name: At_42deg_Heat_cDNA_P Parameter: Timepoint (hr) Value: 2
  misc_feature: MA Experiment 20000112 PARAMETER Experiment Name: At_42deg_Heat_cDNA_P Parameter: Tissue Value: Aerial
  misc_feature: MA Experiment ID: 20000113 Result: Down-regulated in Transcription
  misc_feature: MA Experiment 20000113 PARAMETER Experiment Name: At_42deg_Heat_cDNA_P Parameter: Temperature (deg C) Value: 42 vs. 22
  misc_feature: MA Experiment 20000113 PARAMETER Experiment Name: At_42deg_Heat_cDNA_P Parameter: Timepoint (hr) Value: 8
  misc_feature: MA Experiment 20000113 PARAMETER Experiment Name: At_42deg_Heat_cDNA_P Parameter: Tissue Value: Aerial
  misc_feature: MA Experiment ID: 20000117 Result: Down-regulated in Transcription
  misc_feature: MA Experiment 20000117 PARAMETER Experiment Name: At_100uM_ABA_Mutants_cDNA_P Parameter: Plant Line Value: Columbia
  misc_feature: MA Experiment 20000117 PARAMETER Experiment Name: At_100uM_ABA_Mutants_cDNA_P Parameter: Timepoint (hr) Value: 6
  misc_feature: MA Experiment 20000117 PARAMETER Experiment Name: At_100uM_ABA_Mutants_cDNA_P Parameter: Tissue Value: Aerial
  misc_feature: MA Experiment 20000117 PARAMETER Experiment Name: At_100uM_ABA_Mutants_cDNA_P Parameter: Treatment Value: 100uM ABA vs. No Treatment
  misc_feature: MA Experiment ID: 20000144 Result: Down-regulated in Transcription
  misc_feature: MA Experiment 20000144 PARAMETER Experiment Name: At_42deg_Heat_cDNA_P Parameter: Temperature (deg C) Value: 42 vs. 22
  misc_feature: MA Experiment 20000144 PARAMETER Experiment Name: At_42deg_Heat_cDNA_P Parameter: Timepoint (hr) Value: 1
  misc_feature: MA Experiment 20000144 PARAMETER Experiment Name: At_42deg_Heat_cDNA_P Parameter: Tissue Value: Aerial
  misc_feature: MA Experiment ID: 20000173 Result: Down-regulated in Transcription
  misc_feature: MA Experiment 20000173 PARAMETER Experiment Name: At_42deg_Heat_P Parameter: Age (day) Value: 14
  misc_feature: MA Experiment 20000173 PARAMETER Experiment Name: At_42deg_Heat_P Parameter: Organism Value: A. thaliana
  misc_feature: MA Experiment 20000173 PARAMETER Experiment Name: At_42deg_Heat_P Parameter: Plant Line Value: WS
  misc_feature: MA Experiment 20000173 PARAMETER Experiment Name: At_42deg_Heat_P Parameter: Temperature (deg C) Value: 42 vs. 22
  misc_feature: MA Experiment 20000173 PARAMETER Experiment Name: At_42deg_Heat_P Parameter: Timepoint (hr) Value: 6
  misc_feature: MA Experiment 20000173 PARAMETER Experiment Name: At_42deg_Heat_P Parameter: Tissue Value: Aerial
  misc_feature: MA Experiment ID: 20000184 Result: Up-regulated in Transcription
  misc_feature: MA Experiment 20000184 PARAMETER Experiment Name: At_Shoots__P Parameter: Age (day) Value: 7
  misc_feature: MA Experiment 20000184 PARAMETER Experiment Name: At_Shoots__P Parameter: Tissue Value: Shoots vs. Whole Plant
  misc_feature: MA Experiment ID: 20000265 Result: Down-regulated in Transcription
  misc_feature: MA Experiment 20000265 PARAMETER Experiment Name: At_Open_Flower_P Parameter: Age (day) Value: 21
  misc_feature: MA Experiment 20000265 PARAMETER Experiment Name: At_Open_Flower_P Parameter: Plant Line Value: WS
  misc_feature: MA Experiment 20000265 PARAMETER Experiment Name: At_Open_Flower_P Parameter: Tissue Value: Closed Flower vs. Whole Plant
  misc_feature: MA Experiment ID: 20000286 Result: Down-regulated in Transcription
  misc_feature: MA Experiment 20000286 PARAMETER Experiment Name: At_Open_Flower_P Parameter: Age (day) Value: 21
  misc_feature: MA Experiment 20000286 PARAMETER Experiment Name: At_Open_Flower_P Parameter: Plant Line Value: WS
  misc_feature: MA Experiment 20000286 PARAMETER Experiment Name: At_Open_Flower_P Parameter: Tissue Value: Half Open vs. Whole Plant
  misc_feature: MA Experiment ID: 20000439 Result: Down-regulated in Transcription
  misc_feature: MA Experiment 20000439 PARAMETER Experiment Name: At_Roots__P Parameter: Age (day) Value: 14 vs. 21
  misc_feature: MA Experiment 20000439 PARAMETER Experiment Name: At_Roots__P Parameter: Organism Value: A. thaliana
  misc_feature: MA Experiment 20000439 PARAMETER Experiment Name: At_Roots__P Parameter: Tissue Value: Roots vs. Whole Plant
  misc_feature: MA Experiment ID: 20000794 Result: Down-regulated in Transcription
  misc_feature: MA Experiment 20000794 PARAMETER Experiment Name: At_Petals_P Parameter: Age (day) Value: 23-25 days
  misc_feature: MA Experiment 20000794 PARAMETER Experiment Name: At_Petals_P Parameter: Plant Line Value: WS
  misc_feature: MA Experiment 20000794 PARAMETER Experiment Name: At_Petals_P Parameter: Tissue Value: Petals vs. Whole plant
  misc_feature: MA Experiment ID: 20001248 Result: Down-regulated in Transcription
  misc_feature: MA Experiment 20001248 PARAMETER Experiment Name: At_Far-red-induction_P Parameter: Age (day) Value: 7
  misc_feature: MA Experiment 20001248 PARAMETER Experiment Name: At_Far-red-induction_P Parameter: Light Value: Far-red vs. White
  misc_feature: MA Experiment 20001248 PARAMETER Experiment Name: At_Far-red-induction_P Parameter: Organism Value: A. thaliana
  misc_feature: MA Experiment 20001248 PARAMETER Experiment Name: At_Far-red-induction_P Parameter: Plant Line Value: Columbia
  misc_feature: MA Experiment 20001248 PARAMETER Experiment Name: At_Far-red-induction_P Parameter: Timepoint (hr) Value: 4
  misc_feature: MA Experiment 20001248 PARAMETER Experiment Name: At_Far-red-induction_P Parameter: Tissue Value: Whole Plant
  misc_feature: MA Experiment ID: 20001557 Result: Up-regulated in Transcription
  misc_feature: MA Experiment 20001557 PARAMETER Experiment Name: At_Drought_Soil_Dry_P Parameter: Age (day) Value: 27
  misc_feature: MA Experiment 20001557 PARAMETER Experiment Name: At_Drought_Soil_Dry_P Parameter: Organism Value: A. thaliana
  misc_feature: MA Experiment 20001557 PARAMETER Experiment Name: At_Drought_Soil_Dry_P Parameter: Plant Line Value: WS
  misc_feature: MA Experiment 20001557 PARAMETER Experiment Name: At_Drought_Soil_Dry_P Parameter: Post Timepoint (hr) Value: 3
  misc_feature: MA Experiment 20001557 PARAMETER Experiment Name: At_Drought_Soil_Dry_P Parameter: Post-Treatment Value: Re-Water vs. No Drought
  misc_feature: MA Experiment 20001557 PARAMETER Experiment Name: At_Drought_Soil_Dry_P Parameter: Timepoint (day) Value: 13
  misc_feature: MA Experiment 20001557 PARAMETER Experiment Name: At_Drought_Soil_Dry_P Parameter: Treatment Value: Drought vs. No Drought
  misc_feature: MA Experiment ID: 20001558 Result: Up-regulated in Transcription
  misc_feature: MA Experiment 20001558 PARAMETER Experiment Name: At_Drought_Soil_Dry_P Parameter: Age (day) Value: 27
  misc_feature: MA Experiment 20001558 PARAMETER Experiment Name: At_Drought_Soil_Dry_P Parameter: Organism Value: A. thaliana
  misc_feature: MA Experiment 20001558 PARAMETER Experiment Name: At_Drought_Soil_Dry_P Parameter: Plant Line Value: WS
  misc_feature: MA Experiment 20001558 PARAMETER Experiment Name: At_Drought_Soil_Dry_P Parameter: Post Timepoint (hr) Value: 6
  misc_feature: MA Experiment 20001558 PARAMETER Experiment Name: At_Drought_Soil_Dry_P Parameter: Post-Treatment Value: Re-Water vs. No Drought
  misc_feature: MA Experiment 20001558 PARAMETER Experiment Name: At_Drought_Soil_Dry_P Parameter: Timepoint (day) Value: 13
  misc_feature: MA Experiment 20001558 PARAMETER Experiment Name: At_Drought_Soil_Dry_P Parameter: Treatment Value: Drought vs. No Drought
aaatcataaaaacacaagttttcgacagatcaactgttttcttcattacgtgttcttcaatggcgtcacttcactgattctattcctatcaaacccacttacccattcccttttatatgcacaaattctcataaagttttcaattttattccatttttctcggaagccatggaagctgctaatgagcctgttaatggcggatccgtacagatccgaacagagaacaacgaaagacgaaagcttcctaatttcttacaaagcgtcaacatgaaatacgtcaagctaggttatcattacctcattactcatctcttcaagctctgtttggttccattaatggcggttttagtcacagagatctctcgattaacaacagacgatctttaccagatttggcttcatctccaatacaatctcgttgctttcatctttctctctgctttagctatctttggctccaccgtttacatcatgagtcgtcccagatctgtttatctcgttgattactcttgttatcttcctccggagagtcttcaggttaagtatcagaagtttatggatcattctaagttgattgaagatttcaatgagtcatctttagagtttcagaggaagattcttgaacgttctggtttaggagaagagacttatctccctgaagctttacattgtatccctccgaggcctacgatgatggcggctcgtgaggaatctgagcaggtaatgtttggtgctcttgataagcttttcgagaataccaagattaaccctagggatattggtgtgttggttgtgaattgtagcttgtttaatcctacaccttcgttgtcagctatgattgttaacaagtataagcttagagggaatgttaagagttttaaccttggtggaatggggtgtagtgctggtgttatctctatcgatttagctaaagatatgttgcaagttcataggaatacttatgctgttgtggttagtactgagaacattactcagaattggtattttgggaataagaaggctatgttgattccgaattgtttgtttcgtgttggtggttcggcgattttgttgtcgaacaaggggaaagatcgtagacggtctaagtataagcttgttcataccgttaggactcataaaggagctgttgagaaggctttcaactgtgtttaccaagagcaagatgataatgggaagaccggggtttcgttgtcgaaagatcttatggctatagctggggaagctcttaaggcgaatatcactactttaggtcctttggttcttcctataagtgagcagattctgtttttcatgactttggttacgaagaaactgtttaactcgaagctgaagccgtatattccggatttcaagcttgcgtttgatcatttctgtatccatgctggtggtagagctgtgattgatgagcttgagaagaatctgcagctttcgcagactcatgtcgaggcatccagaatgacactgcacagatttggaaacacttcttcgagctcgatttggtatgaactggcttacatagaggctaaaggtaggatgaagaaaggaaaccgggtttggcagattgcttttggaagtgggtttaagtgtaacagtgcagtttgggtggctctaaacaatgtcaagccttcggttagtagtccgtgggaacactgcatcgaccgatatccggttaagctcgacttctgatttaatgaaaaaccatttgtttggttagtcctagtcttactagactctgccttgtttatttttcttcttttctggttaagctcttgtactcttaatgtgacgcttcttgattattactctcgcgttttattctatggcatctttatcc

SEQ ID NO: 101313 - protein, 512 aa, Arabidopsis thaliana
  peptide (1)..(512): Ceres Seq. ID no. 13607548
  misc_feature (346)..(489): Pfam Name: Chalcone and stilbene synthases, C-terminal domain Pfam Description: Chalcone and stilbene synthases, C-terminal
  misc_feature (1)..(512): Homolog of NCBI NO: 15226724 NR Description: very-long-chain fatty acid condensing enzyme
  misc_feature (10)..(512): Homolog of NCBI NO: 15223556 NR Description: very-long-chain fatty acid condensing enzyme putative [Arabidopsis thaliana] >gi|25402889|pir||F86327 protein
  misc_feature (29)..(511): Homolog of NCBI NO: 15236133 NR Description: fatty acid elongase 1 (FAE1), putative
  misc_feature (1)..(510): Homolog of NCBI NO: 29417540 NR Description: beta-ketoacyl-CoA-synthase [Marchantia polymorpha]
  misc_feature (23)..(510): Homolog of NCBI NO: 15225767 NR Description: beta-ketoacyl-CoA synthase, putative [Arabidopsis
  misc_feature (25)..(508): Homolog of NCBI NO: 17979464 NR Description: At1g68530/T26J14_10 [Arabidopsis thaliana]
  misc_feature (25)..(508): Homolog of NCBI NO: 15221431 NR Description: very-long-chain fatty acid condensing enzyme
  misc_feature (25)..(508): Homolog of NCBI NO: 21593111 NR Description: very-long-chain fatty acid condensing enzyme CUT1
  misc_feature (27)..(508): Homolog of NCBI NO: 9714501 NR Description: putative fatty acid elongase [Zea mays]
  misc_feature (29)..(511): Homolog of NCBI NO: 30424122 NR Description: beta-ketoacyl-CoA synthase FAE1.2 [Brassica
MEAANEPVNGGSVQIRTENNERRKLPNFLQSVNMKYVKLGYHYLITHLFKLCLVPLMAVLVTEISRLTTDDLYQIWLHLQYNLVAFIFLSALAIFGSTVYIMSRPRSVYLVDYSCYLPPESLQVKYQKFMDHSKLIEDFNESSLEFQRKILERSGLGEETYLPEALHCIPPRPTMMAAREESEQVMFGALDKLFENTKINPRDIGVLVVNCSLFNPTPSLSAMIVNKYKLRGNVKSFNLGGMGCSAGVISIDLAKDMLQVHRNTYAVVVSTENITQNWYFGNKKAMLIPNCLFRVGGSAILLSNKGKDRRRSKYKLVHTVRTHKGAVEKAFNCVYQEQDDNGKTGVSLSKDLMAIAGEALKANITTLGPLVLPISEQILFFMTLVTKKLFNSKLKPYIPDFKLAFDHFCIHAGGRAVIDELEKNLQLSQTHVEASRMTLHRFGNTSSSSIWYELAYIEAKGRMKKGNRVWQIAFGSGFKCNSAVWVALNNVKPSVSSPWEHCIDRYPVKLDF

SEQ ID NO: 101314 - protein, 479 aa, Arabidopsis thaliana
  peptide (1)..(479): Ceres Seq. ID no. 13607549
  misc_feature (313)..(456): Pfam Name: Chalcone and stilbene synthases, C-terminal domain Pfam Description: Chalcone and stilbene synthases, C-terminal
  misc_feature (1)..(479): Homolog of NCBI NO: 15226724 NR Description: very-long-chain fatty acid condensing enzyme
  misc_feature (1)..(479): Homolog of NCBI NO: 15223556 NR Description: very-long-chain fatty acid condensing enzyme putative [Arabidopsis thaliana] >gi|25402889|pir||F86327 protein
  misc_feature (1)..(478): Homolog of NCBI NO: 15236133 NR Description: fatty acid elongase 1 (FAE1), putative
  misc_feature (1)..(477): Homolog of NCBI NO: 29417540 NR Description: beta-ketoacyl-CoA-synthase [Marchantia polymorpha]
  misc_feature (1)..(477): Homolog of NCBI NO: 15225767 NR Description: beta-ketoacyl-CoA synthase, putative [Arabidopsis
  misc_feature (1)..(475): Homolog of NCBI NO: 17979464 NR Description: At1g68530/T26J14_10 [Arabidopsis thaliana]
  misc_feature (1)..(475): Homolog of NCBI NO: 15221431 NR Description: very-long-chain fatty acid condensing enzyme
  misc_feature (1)..(475): Homolog of NCBI NO: 21593111 NR Description: very-long-chain fatty acid condensing enzyme CUT1
  misc_feature (1)..(475): Homolog of NCBI NO: 9714501 NR Description: putative fatty acid elongase [Zea mays]
  misc_feature (1)..(478): Homolog of NCBI NO: 30424122 NR Description: beta-ketoacyl-CoA synthase FAE1.2 [Brassica
MKYVKLGYHYLITHLFKLCLVPLMAVLVTEISRLTTDDLYQIWLHLQYNLVAFIFLSALAIFGSTVYIMSRPRSVYLVDYSCYLPPESLQVKYQKFMDHSKLIEDFNESSLEFQRKILERSGLGEETYLPEALHCIPPRPTMMAAREESEQVMFGALDKLFENTKINPRDIGVLVVNCSLFNPTPSLSAMIVNKYKLRGNVKSFNLGGMGCSAGVISIDLAKDMLQVHRNTYAVVVSTENITQNWYFGNKKAMLIPNCLFRVGGSAILLSNKGKDRRRSKYKLVHTVRTHKGAVEKAFNCVYQEQDDNGKTGVSLSKDLMAIAGEALKANITTLGPLVLPISEQILFFMTLVTKKLFNSKLKPYIPDFKLAFDHFCIHAGGRAVIDELEKNLQLSQTHVEASRMTLHRFGNTSSSSIWYELAYIEAKGRMKKGNRVWQIAFGSGFKCNSAVWVALNNVKPSVSSPWEHCIDRYPVKLDF

SEQ ID NO: 101315 - protein, 456 aa, Arabidopsis thaliana
  peptide (1)..(456): Ceres Seq. ID no. 13607550
  misc_feature (290)..(433): Pfam Name: Chalcone and stilbene synthases, C-terminal domain Pfam Description: Chalcone and stilbene synthases, C-terminal
  misc_feature (1)..(456): Homolog of NCBI NO: 15226724 NR Description: very-long-chain fatty acid condensing enzyme
  misc_feature (1)..(456): Homolog of NCBI NO: 15223556 NR Description: very-long-chain fatty acid condensing enzyme putative [Arabidopsis thaliana] >gi|25402889|pir||F86327 protein
  misc_feature (1)..(455): Homolog of NCBI NO: 15236133 NR Description: fatty acid elongase 1 (FAE1), putative
  misc_feature (1)..(454): Homolog of NCBI NO: 29417540 NR Description: beta-ketoacyl-CoA-synthase [Marchantia polymorpha]
  misc_feature (1)..(454): Homolog of NCBI NO: 15225767 NR Description: beta-ketoacyl-CoA synthase, putative [Arabidopsis
  misc_feature (1)..(452): Homolog of NCBI NO: 17979464 NR Description: At1g68530/T26J14_10 [Arabidopsis thaliana]
  misc_feature (1)..(452): Homolog of NCBI NO: 15221431 NR Description: very-long-chain fatty acid condensing enzyme
  misc_feature (1)..(452): Homolog of NCBI NO: 21593111 NR Description: very-long-chain fatty acid condensing enzyme CUT1
  misc_feature (1)..(452): Homolog of NCBI NO: 9714501 NR Description: putative fatty acid elongase [Zea mays]
  misc_feature (1)..(455): Homolog of NCBI NO: 30424122 NR Description: beta-ketoacyl-CoA synthase FAE1.2 [Brassica
MAVLVTEISRLTTDDLYQIWLHLQYNLVAFIFLSALAIFGSTVYIMSRPRSVYLVDYSCYLPPESLQVKYQKFMDHSKLIEDFNESSLEFQRKILERSGLGEETYLPEALHCIPPRPTMMAAREESEQVMFGALDKLFENTKINPRDIGVLVVNCSLFNPTPSLSAMIVNKYKLRGNVKSFNLGGMGCSAGVISIDLAKDMLQVHRNTYAVVVSTENITQNWYFGNKKAMLIPNCLFRVGGSAILLSNKGKDRRRSKYKLVHTVRTHKGAVEKAFNCVYQEQDDNGKTGVSLSKDLMAIAGEALKANITTLGPLVLPISEQILFFMTLVTKKLFNSKLKPYIPDFKLAFDHFCIHAGGRAVIDELEKNLQLSQTHVEASRMTLHRFGNTSSSSIWYELAYIEAKGRMKKGNRVWQIAFGSGFKCNSAVWVALNNVKPSVSSPWEHCIDRYPVKLDF

SEQ ID NO: 101316 - DNA, 979 bp, Arabidopsis thaliana
  misc_feature (1)..(979): Ceres Seq. ID no. 13607551
  misc_feature: MA Experiment ID: 20000166 Result: Up-regulated in Transcription
  misc_feature: MA Experiment 20000166 PARAMETER Experiment Name: At_100uM_ABA_P Parameter: Age (day) Value: 14
  misc_feature: MA Experiment 20000166 PARAMETER Experiment Name: At_100uM_ABA_P Parameter: Organism Value: A. thaliana
  misc_feature: MA Experiment 20000166 PARAMETER Experiment Name: At_100uM_ABA_P Parameter: Plant Line Value: WS
  misc_feature: MA Experiment 20000166 PARAMETER Experiment Name: At_100uM_ABA_P Parameter: Timepoint (hr) Value: 1
  misc_feature: MA Experiment 20000166 PARAMETER Experiment Name: At_100uM_ABA_P Parameter: Tissue Value: Aerial
  misc_feature: MA Experiment 20000166 PARAMETER Experiment Name: At_100uM_ABA_P Parameter: Treatment Value: 100uM ABA vs. No Treatment
  misc_feature: MA Experiment ID: 20000173 Result: Down-regulated in Transcription
  misc_feature: MA Experiment 20000173 PARAMETER Experiment Name: At_42deg_Heat_P Parameter: Age (day) Value: 14
  misc_feature: MA Experiment 20000173 PARAMETER Experiment Name: At_42deg_Heat_P Parameter: Organism Value: A. thaliana
  misc_feature: MA Experiment 20000173 PARAMETER Experiment Name: At_42deg_Heat_P Parameter: Plant Line Value: WS
  misc_feature: MA Experiment 20000173 PARAMETER Experiment Name: At_42deg_Heat_P Parameter: Temperature (deg C) Value: 42 vs. 22
  misc_feature: MA Experiment 20000173 PARAMETER Experiment Name: At_42deg_Heat_P Parameter: Timepoint (hr) Value: 6
  misc_feature: MA Experiment 20000173 PARAMETER Experiment Name: At_42deg_Heat_P Parameter: Tissue Value: Aerial
  misc_feature: MA Experiment ID: 20000184 Result: Down-regulated in Transcription
  misc_feature: MA Experiment 20000184 PARAMETER Experiment Name: At_Shoots__P Parameter: Age (day) Value: 7
  misc_feature: MA Experiment 20000184 PARAMETER Experiment Name: At_Shoots__P Parameter: Tissue Value: Shoots vs. Whole Plant
  misc_feature: MA Experiment ID: 20000185 Result: Down-regulated in Transcription
  misc_feature: MA Experiment 20000185 PARAMETER Experiment Name: At_Roots__P Parameter: Age (day) Value: 7 vs. 21
  misc_feature: MA Experiment 20000185 PARAMETER Experiment Name: At_Roots__P Parameter: Organism Value: A. thaliana
  misc_feature: MA Experiment 20000185 PARAMETER Experiment Name: At_Roots__P Parameter: Tissue Value: Roots vs. Whole Plant
  misc_feature: MA Experiment ID: 20000234 Result: Down-regulated in Transcription
  misc_feature: MA Experiment 20000234 PARAMETER Experiment Name: At_Siliques_P Parameter: Age (day) Value: 21
  misc_feature: MA Experiment 20000234 PARAMETER Experiment Name: At_Siliques_P Parameter: Organism Value: A. thaliana
  misc_feature: MA Experiment 20000234 PARAMETER Experiment Name: At_Siliques_P Parameter: Plant Line Value: WS
  misc_feature: MA Experiment 20000234 PARAMETER Experiment Name: At_Siliques_P Parameter: Tissue Value: Less Than 5mm Siliques vs. Whole Plant
  misc_feature: MA Experiment ID: 20000235 Result: Down-regulated in Transcription
  misc_feature: MA Experiment 20000235 PARAMETER Experiment Name: At_Siliques_P Parameter: Age (day) Value: 21
  misc_feature: MA Experiment 20000235 PARAMETER Experiment Name: At_Siliques_P Parameter: Organism Value: A. thaliana
  misc_feature: MA Experiment 20000235 PARAMETER Experiment Name: At_Siliques_P Parameter: Plant Line Value: WS
  misc_feature: MA Experiment 20000235 PARAMETER Experiment Name: At_Siliques_P Parameter: Tissue Value: 5-10mm Siliques vs. Whole Plant
  misc_feature: MA Experiment ID: 20000264 Result: Down-regulated in Transcription
  misc_feature: MA Experiment 20000264 PARAMETER Experiment Name: At_Open_Flower_P Parameter: Age (day) Value: 21
  misc_feature: MA Experiment 20000264 PARAMETER Experiment Name: At_Open_Flower_P Parameter: Plant Line Value: WS
  misc_feature: MA Experiment 20000264 PARAMETER Experiment Name: At_Open_Flower_P Parameter: Tissue Value: Open Flower vs. Whole Plant
  misc_feature: MA Experiment ID: 20000265 Result: Down-regulated in Transcription
  misc_feature: MA Experiment 20000265 PARAMETER Experiment Name: At_Open_Flower_P Parameter: Age (day) Value: 21
  misc_feature: MA Experiment 20000265 PARAMETER Experiment Name: At_Open_Flower_P Parameter: Plant Line Value: WS
  misc_feature: MA Experiment 20000265 PARAMETER Experiment Name: At_Open_Flower_P Parameter: Tissue Value: Closed Flower vs. Whole Plant
  misc_feature: MA Experiment ID: 20000267 Result: Up-regulated in Transcription
  misc_feature: MA Experiment 20000267 PARAMETER Experiment Name: At_Drought_P Parameter: Age (day) Value: 7
  misc_feature: MA Experiment 20000267 PARAMETER Experiment Name: At_Drought_P Parameter: Organism Value: A. thaliana
  misc_feature: MA Experiment 20000267 PARAMETER Experiment Name: At_Drought_P Parameter: Plant Line Value: WS
  misc_feature: MA Experiment 20000267 PARAMETER Experiment Name: At_Drought_P Parameter: Timepoint (hr) Value: 6
  misc_feature: MA Experiment 20000267 PARAMETER Experiment Name: At_Drought_P Parameter: Tissue Value: Whole Plant
  misc_feature: MA Experiment 20000267 PARAMETER Experiment Name: At_Drought_P Parameter: Treatment Value: Drought vs. No Drought
  misc_feature: MA Experiment ID: 20000286 Result: Down-regulated in Transcription
  misc_feature: MA Experiment 20000286 PARAMETER Experiment Name: At_Open_Flower_P Parameter: Age (day) Value: 21
  misc_feature: MA Experiment 20000286 PARAMETER Experiment Name: At_Open_Flower_P Parameter: Plant Line Value: WS
  misc_feature: MA Experiment 20000286 PARAMETER Experiment Name: At_Open_Flower_P Parameter: Tissue Value: Half Open vs. Whole Plant
  misc_feature: MA Experiment ID: 20000438 Result: Down-regulated in Transcription
  misc_feature: MA Experiment 20000438 PARAMETER Experiment Name: At_Shoots__P Parameter: Age (day) Value: 14
  misc_feature: MA Experiment 20000438 PARAMETER Experiment Name: At_Shoots__P Parameter: Tissue Value: Shoots vs. Whole Plant
  misc_feature: MA Experiment ID: 20000439 Result: Down-regulated in Transcription
  misc_feature: MA Experiment 20000439 PARAMETER Experiment Name: At_Roots__P Parameter: Age (day) Value: 14 vs. 21
  misc_feature: MA Experiment 20000439 PARAMETER Experiment Name: At_Roots__P Parameter: Organism Value: A. thaliana
  misc_feature: MA Experiment 20000439 PARAMETER Experiment Name: At_Roots__P Parameter: Tissue Value: Roots vs. Whole Plant
  misc_feature: MA Experiment ID: 20000445 Result: Up-regulated in Transcription
  misc_feature: MA Experiment 20000445 PARAMETER Experiment Name: At_100uM_NAA__P Parameter: Age (day) Value: 14
  misc_feature: MA Experiment 20000445 PARAMETER Experiment Name: At_100uM_NAA__P Parameter: Organism Value: A. thaliana
  misc_feature: MA Experiment 20000445 PARAMETER Experiment Name: At_100uM_NAA__P Parameter: Plant Line Value: WS
  misc_feature: MA Experiment 20000445 PARAMETER Experiment Name: At_100uM_NAA__P Parameter: Timepoint (hr) Value: 6
  misc_feature: MA Experiment 20000445 PARAMETER Experiment Name: At_100uM_NAA__P Parameter: Tissue Value: Aerial
  misc_feature: MA Experiment 20000445 PARAMETER Experiment Name: At_100uM_NAA__P Parameter: Treatment Value: 100uM NAA vs. No Treatment
  misc_feature: MA Experiment ID: 20000460 Result: Up-regulated in Transcription
  misc_feature: MA Experiment 20000460 PARAMETER Experiment Name: At_10percent_PEG_P Parameter: Age (day) Value: 12
  misc_feature: MA Experiment 20000460 PARAMETER Experiment Name: At_10percent_PEG_P Parameter: Organism Value: A. thaliana
  misc_feature: MA Experiment 20000460 PARAMETER Experiment Name: At_10percent_PEG_P Parameter: Plant Line Value: WS
  misc_feature: MA Experiment 20000460 PARAMETER Experiment Name: At_10percent_PEG_P Parameter: Timepoint (day) Value: 12
  misc_feature: MA Experiment 20000460 PARAMETER Experiment Name: At_10percent_PEG_P Parameter: Tissue Value: Whole Plant
  misc_feature: MA Experiment 20000460 PARAMETER Experiment Name: At_10percent_PEG_P Parameter: Treatment Value: 10percent PEG vs. No Treatment
  misc_feature: MA Experiment ID: 20000573 Result: Down-regulated in Transcription
  misc_feature: MA Experiment 20000573 PARAMETER Experiment Name: At_100uM_ABA_Mutants__P Parameter: Organism Value: A. thaliana
  misc_feature: MA Experiment 20000573 PARAMETER Experiment Name: At_100uM_ABA_Mutants__P Parameter: Plant Line Value: CS22 vs. Ler wt
  misc_feature: MA Experiment 20000573 PARAMETER Experiment Name: At_100uM_ABA_Mutants__P Parameter: Timepoint (hr) Value: N/A
  misc_feature: MA Experiment 20000573 PARAMETER Experiment Name: At_100uM_ABA_Mutants__P Parameter: Tissue Value: Whole Plant
  misc_feature: MA Experiment 20000573 PARAMETER Experiment Name: At_100uM_ABA_Mutants__P Parameter: Treatment Value: None
  misc_feature: MA Experiment ID: 20000574 Result: Down-regulated in Transcription
  misc_feature: MA Experiment 20000574 PARAMETER Experiment Name: At_100uM_ABA_Mutants__P Parameter: Organism Value: A. thaliana
  misc_feature: MA Experiment 20000574 PARAMETER Experiment Name: At_100uM_ABA_Mutants__P Parameter: Plant Line Value: CS23 vs. Ler wt
  misc_feature: MA Experiment 20000574 PARAMETER Experiment Name: At_100uM_ABA_Mutants__P Parameter: Timepoint (hr) Value: N/A
  misc_feature: MA Experiment 20000574 PARAMETER Experiment Name: At_100uM_ABA_Mutants__P Parameter: Tissue Value: Whole Plant
  misc_feature: MA Experiment 20000574 PARAMETER Experiment Name: At_100uM_ABA_Mutants__P Parameter: Treatment Value: None
  misc_feature: MA Experiment ID: 20000709 Result: Down-regulated in Transcription
  misc_feature: MA Experiment 20000709 PARAMETER Experiment Name: At_15mM_NH4NO3_L-to-H_P Parameter: Age (hr) Value: 14
  misc_feature: MA Experiment 20000709 PARAMETER Experiment Name: At_15mM_NH4NO3_L-to-H_P Parameter: Organism Value: A. thaliana
  misc_feature: MA Experiment 20000709 PARAMETER Experiment Name: At_15mM_NH4NO3_L-to-H_P Parameter: Plant Line Value: WS
  misc_feature: MA Experiment 20000709 PARAMETER Experiment Name: At_15mM_NH4NO3_L-to-H_P Parameter: Timepoint (hr) Value: 4
  misc_feature: MA Experiment 20000709 PARAMETER Experiment Name: At_15mM_NH4NO3_L-to-H_P Parameter: Tissue Value: Aerial
  misc_feature: MA Experiment 20000709 PARAMETER Experiment Name: At_15mM_NH4NO3_L-to-H_P Parameter: Treatment Value: 15mM NH4NO3 vs. 30mM Mannitol
  misc_feature: MA Experiment ID: 20000794 Result: Down-regulated in Transcription
  misc_feature: MA Experiment 20000794 PARAMETER Experiment Name: At_Petals_P Parameter: Age (day) Value: 23-25 days
  misc_feature: MA Experiment 20000794 PARAMETER Experiment Name: At_Petals_P Parameter: Plant Line Value: WS
  misc_feature: MA Experiment 20000794 PARAMETER Experiment Name: At_Petals_P Parameter: Tissue Value: Petals vs. Whole plant
  misc_feature: MA Experiment ID: 20001451 Result: Down-regulated in Transcription
  misc_feature: MA Experiment 20001451 PARAMETER Experiment Name: At_Far-red-induction_P Parameter: Age (day) Value: 7
  misc_feature: MA Experiment 20001451 PARAMETER Experiment Name: At_Far-red-induction_P Parameter: Light Value: Far-red vs. White
  misc_feature: MA Experiment 20001451 PARAMETER Experiment Name: At_Far-red-induction_P Parameter: Organism Value: A. thaliana
  misc_feature: MA Experiment 20001451 PARAMETER Experiment Name: At_Far-red-induction_P Parameter: Plant Line Value: Columbia
  misc_feature: MA Experiment 20001451 PARAMETER Experiment Name: At_Far-red-induction_P Parameter: Timepoint (hr) Value: 24
  misc_feature: MA Experiment 20001451 PARAMETER Experiment Name: At_Far-red-induction_P Parameter: Tissue Value: Whole Plant
  misc_feature: MA Experiment ID: 20001556 Result: Down-regulated in Transcription
  misc_feature: MA Experiment 20001556 PARAMETER Experiment Name: At_Drought_Soil_Dry_P Parameter: Age (day) Value: 26
  misc_feature: MA Experiment 20001556 PARAMETER Experiment Name: At_Drought_Soil_Dry_P Parameter: Organism Value: A. thaliana
  misc_feature: MA Experiment 20001556 PARAMETER Experiment Name: At_Drought_Soil_Dry_P Parameter: Plant Line Value: WS
  misc_feature: MA Experiment 20001556 PARAMETER Experiment Name: At_Drought_Soil_Dry_P Parameter: Post Timepoint (hr) Value: None
  misc_feature: MA Experiment 20001556 PARAMETER Experiment Name: At_Drought_Soil_Dry_P Parameter: Post-Treatment Value: None
  misc_feature: MA Experiment 20001556 PARAMETER Experiment Name: At_Drought_Soil_Dry_P Parameter: Timepoint (day) Value: 12
  misc_feature: MA Experiment 20001556 PARAMETER Experiment Name: At_Drought_Soil_Dry_P Parameter: Treatment Value: Drought vs. No Drought
  misc_feature: MA Experiment ID: 20001557 Result: Down-regulated in Transcription
  misc_feature: MA Experiment 20001557 PARAMETER Experiment Name: At_Drought_Soil_Dry_P Parameter: Age (day) Value: 27
  misc_feature: MA Experiment 20001557 PARAMETER Experiment Name: At_Drought_Soil_Dry_P Parameter: Organism Value: A. thaliana
  misc_feature: MA Experiment 20001557 PARAMETER Experiment Name: At_Drought_Soil_Dry_P Parameter: Plant Line Value: WS
  misc_feature: MA Experiment 20001557 PARAMETER Experiment Name: At_Drought_Soil_Dry_P Parameter: Post Timepoint (hr) Value: 3
  misc_feature: MA Experiment 20001557 PARAMETER Experiment Name: At_Drought_Soil_Dry_P Parameter: Post-Treatment Value: Re-Water vs. No Drought
  misc_feature: MA Experiment 20001557 PARAMETER Experiment Name: At_Drought_Soil_Dry_P Parameter: Timepoint (day) Value: 13
  misc_feature: MA Experiment 20001557 PARAMETER Experiment Name: At_Drought_Soil_Dry_P Parameter: Treatment Value: Drought vs. No Drought
  misc_feature: MA Experiment ID: 20001558 Result: Down-regulated in Transcription
  misc_feature: MA Experiment 20001558 PARAMETER Experiment Name: At_Drought_Soil_Dry_P Parameter: Age (day) Value: 27
  misc_feature: MA Experiment 20001558 PARAMETER Experiment Name: At_Drought_Soil_Dry_P Parameter: Organism Value: A. thaliana
  misc_feature: MA Experiment 20001558 PARAMETER Experiment Name: At_Drought_Soil_Dry_P Parameter: Plant Line Value: WS
  misc_feature: MA Experiment 20001558 PARAMETER Experiment Name: At_Drought_Soil_Dry_P Parameter: Post Timepoint (hr) Value: 6
  misc_feature: MA Experiment 20001558 PARAMETER Experiment Name: At_Drought_Soil_Dry_P Parameter: Post-Treatment Value: Re-Water vs. No Drought
  misc_feature: MA Experiment 20001558 PARAMETER Experiment Name: At_Drought_Soil_Dry_P Parameter: Timepoint (day) Value: 13
  misc_feature: MA Experiment 20001558 PARAMETER Experiment Name: At_Drought_Soil_Dry_P Parameter: Treatment Value: Drought vs. No Drought
  misc_feature: MA Experiment ID: 20001559 Result: Down-regulated in Transcription
  misc_feature: MA Experiment 20001559 PARAMETER Experiment Name: At_Drought_Soil_Dry_P Parameter: Age (day) Value: 28
  misc_feature: MA Experiment 20001559 PARAMETER Experiment Name: At_Drought_Soil_Dry_P Parameter: Organism Value: A. thaliana
  misc_feature: MA Experiment 20001559 PARAMETER Experiment Name: At_Drought_Soil_Dry_P Parameter: Plant Line Value: WS
  misc_feature: MA Experiment 20001559 PARAMETER Experiment Name: At_Drought_Soil_Dry_P Parameter: Post Timepoint (hr) Value: 29
  misc_feature: MA Experiment 20001559 PARAMETER Experiment Name: At_Drought_Soil_Dry_P Parameter: Post-Treatment Value: Re-Water vs. No Drought
  misc_feature: MA Experiment 20001559 PARAMETER Experiment Name: At_Drought_Soil_Dry_P Parameter: Timepoint (day) Value: 14
  misc_feature: MA Experiment 20001559 PARAMETER Experiment Name: At_Drought_Soil_Dry_P Parameter: Treatment Value: Drought vs. No Drought
  misc_feature: MA Experiment ID: 20001560 Result: Down-regulated in Transcription
  misc_feature: MA Experiment 20001560 PARAMETER Experiment Name: At_Drought_Soil_Dry_P Parameter: Age (day) Value: 28
  misc_feature: MA Experiment 20001560 PARAMETER Experiment Name: At_Drought_Soil_Dry_P Parameter: Organism Value: A. thaliana
  misc_feature: MA Experiment 20001560 PARAMETER Experiment Name: At_Drought_Soil_Dry_P Parameter: Plant Line Value: WS
  misc_feature: MA Experiment 20001560 PARAMETER Experiment Name: At_Drought_Soil_Dry_P Parameter: Post Timepoint (hr) Value: None
  misc_feature: MA Experiment 20001560 PARAMETER Experiment Name: At_Drought_Soil_Dry_P Parameter: Post-Treatment Value: None
  misc_feature: MA Experiment 20001560 PARAMETER Experiment Name: At_Drought_Soil_Dry_P Parameter: Timepoint (day) Value: 14
  misc_feature: MA Experiment 20001560 PARAMETER Experiment Name: At_Drought_Soil_Dry_P Parameter: Treatment Value: Drought vs. No Drought
  misc_feature: MA Experiment ID: 20001755 Result: Up-regulated in Transcription
  misc_feature: MA Experiment 20001755 PARAMETER Experiment Name: At_50mM_NH4NO3_L-to-H_P Parameter: Timepoint (hr) Value: 2
  misc_feature: MA Experiment 20001755 PARAMETER Experiment Name: At_50mM_NH4NO3_L-to-H_P Parameter: Tissue Value: Leaf
  misc_feature: MA Experiment 20001755 PARAMETER Experiment Name: At_50mM_NH4NO3_L-to-H_P Parameter: Treatment Value: 50mM NH4NO3 vs 100mM Mannitol
  misc_feature: MA Experiment ID: 20001904 Result: Down-regulated in Transcription
  misc_feature: MA Experiment 20001904 PARAMETER Experiment Name: At_Drought_Reproduction_P Parameter: Age (day) Value: 37
  misc_feature: MA Experiment 20001904 PARAMETER Experiment Name: At_Drought_Reproduction_P Parameter: Organism Value: A. thaliana
  misc_feature: MA Experiment 20001904 PARAMETER Experiment Name: At_Drought_Reproduction_P Parameter: Plant Line Value: WS
  misc_feature: MA Experiment 20001904 PARAMETER Experiment Name: At_Drought_Reproduction_P Parameter: Timepoint (day) Value: 7
  misc_feature: MA Experiment 20001904 PARAMETER Experiment Name: At_Drought_Reproduction_P Parameter: Tissue Value: Rosettes
  misc_feature: MA Experiment 20001904 PARAMETER Experiment Name: At_Drought_Reproduction_P Parameter: Treatment Value: Drought vs. No Drought
  misc_feature: MA Experiment ID: 20001905 Result: Down-regulated in Transcription
  misc_feature: MA Experiment 20001905 PARAMETER Experiment Name: At_Drought_Reproduction_P Parameter: Age (day) Value: 40
  misc_feature: MA Experiment 20001905 PARAMETER Experiment Name: At_Drought_Reproduction_P Parameter: Organism Value: A. thaliana
  misc_feature: MA Experiment 20001905 PARAMETER Experiment Name: At_Drought_Reproduction_P Parameter: Plant Line Value: WS
  misc_feature: MA Experiment 20001905 PARAMETER Experiment Name: At_Drought_Reproduction_P Parameter: Timepoint (day) Value: 10
  misc_feature: MA Experiment 20001905 PARAMETER Experiment Name: At_Drought_Reproduction_P Parameter: Tissue Value: Rosettes
  misc_feature: MA Experiment 20001905 PARAMETER Experiment Name: At_Drought_Reproduction_P Parameter: Treatment Value: Drought vs. No Drought
atgggaaaagatattgagctcccgggttttaggttccacccgactgaggaagagcttcttgatttctacctcaagaacatggtttacggtaagagatcgagtgtcgaagtcattggtttccttaacatataccgtcatgatccatgggacttacctggtttatcgagaatcggggagagggaatggtacttctttgtaccaagggaaaggaagcatgggaacggtgggaggccaagcaggacaactgaaaaaggatattggaaagcaactggatccgatcgtaaaatcataagcttgtctgagccaaaacgtgttatagggctcaagaagacgcttgtgttctatagaggaagagcaccaggaggaagcaagactgattgggtgatgaacgagtttcggatgcccgataattgctccttaccaaaggatgttgtgctttgtaagatatatagaaaagctacttcattgaaagtattggagcaaagggcagagatggaagctaagatgaatcaaacatgtcctaactctcctctttcgtcttccgagacgatttctttcgttggtaaagaagaaaacatgatgacttcgttccgtgctcctcaagtaatagctatggaagaagcaaacaagatccaaatgcatcaagaaaacgcgaaaaccgaagagaaacaaagagaagcagagaccaaagaaccttcttcatcactgaagctaccgtttggaagtttaccagagctacaattaccaaaaccaggagtagaatgggaccagttgttgagtataagcccatggctccagaatcttacaccaatagttaacatatattggtaggatatgtaaagaacaaatacatttaaatattcttactctcgtaaaaaacagagcttgtaccaaatagtatttactaaacttttatgtatcttttgtaattttgtaacataagaaaatttgtaacactatttatagtcatatttgacga

SEQ ID NO: 101317 - protein, 276 aa, Arabidopsis thaliana
  peptide (1)..(276): Ceres Seq. ID no. 13607552
  misc_feature (28)..(135): Pfam Name: No apical meristem (NAM) protein Pfam Description: No apical meristem (NAM) protein
  misc_feature (1)..(276): Homolog of NCBI NO: 25411775 NR Description: NAM (no apical meristem)-like protein [imported]
  misc_feature (27)..(276): Homolog of NCBI NO: 18398293 NR Description: No apical meristem (NAM) protein family thaliana] >gi|13605647|gb|AAK32817.1|AF361804_1 At2g17040 thaliana] >gi|20857250|gb|AAM26707.1| At2g17040/At2g17040
  misc_feature (4)..(152): Homolog of NCBI NO: 30678000 NR Description: No apical meristem (NAM) protein family thaliana] >gi|24030186|gb|AAN41274.1| putative NAM (no apical
  misc_feature (4)..(152): Homolog of NCBI NO: 30678002 NR Description: No apical meristem (NAM) protein family
  misc_feature (4)..(135): Homolog of NCBI NO: 25410986 NR Description: NAM (no apical meristem)-like protein [imported]
  misc_feature (3)..(251): Homolog of NCBI NO: 15223376 NR Description: No apical meristem (NAM) protein family
  misc_feature (3)..(251): Homolog of NCBI NO: 25518578 NR Description: hypothetical protein T2P11.6 - Arabidopsis
  misc_feature (8)..(196): Homolog of NCBI NO: 15218843 NR Description: No apical meristem (NAM) protein family
  misc_feature (4)..(135): Homolog of NCBI NO: 34907482 NR Description: OsNAC6-like protein [Oryza sativa (japonica
  misc_feature (4)..(135): Homolog of NCBI NO: 10177980 NR Description: NAM (no apical meristem)-like protein
MGKDIELPGFRFHPTEEELLDFYLKNMVYGKRSSVEVIGFLNIYRHDPWDLPGLSRIGEREWYFFVPRERKHGNGGRPSRTTEKGYWKATGSDRKIISLSEPKRVIGLKKTLVFYRGRAPGGSKTDWVMNEFRMPDNCSLPKDVVLCKIYRKATSLKVLEQRAEMEAKMNQTCPNSPLSSSETISFVGKEENMMTSFRAPQVIAMEEANKIQMHQENAKTEEKQREAETKEPSSSLKLPFGSLPELQLPKPGVEWDQLLSISPWLQNLTPIVNIYW

SEQ ID NO: 101318 - protein, 250 aa, Arabidopsis thaliana; identical to SEQ ID NO: 89514
  peptide (1)..(250): Ceres Seq. ID no. 13607553
  misc_feature (2)..(109): Pfam Name: No apical meristem (NAM) protein Pfam Description: No apical meristem (NAM) protein
  misc_feature (1)..(250): Homolog of NCBI NO: 25411775 NR Description: NAM (no apical meristem)-like protein [imported]
  misc_feature (1)..(250): Homolog of NCBI NO: 18398293 NR Description: No apical meristem (NAM) protein family thaliana] >gi|13605647|gb|AAK32817.1|AF361804_1 At2g17040 thaliana] >gi|20857250|gb|AAM26707.1| At2g17040/At2g17040
  misc_feature (1)..(126): Homolog of NCBI NO: 30678000 NR Description: No apical meristem (NAM) protein family thaliana] >gi|24030186|gb|AAN41274.1| putative NAM (no apical
  misc_feature (1)..(126): Homolog of NCBI NO: 30678002 NR Description: No apical meristem (NAM) protein family
  misc_feature (1)..(109): Homolog of NCBI NO: 25410986 NR Description: NAM (no apical meristem)-like protein [imported]
  misc_feature (1)..(225): Homolog of NCBI NO: 15223376 NR Description: No apical meristem (NAM) protein family
  misc_feature (1)..(225): Homolog of NCBI NO: 25518578 NR Description: hypothetical protein T2P11.6 - Arabidopsis
  misc_feature (1)..(170): Homolog of NCBI NO: 15218843 NR Description: No apical meristem (NAM) protein family
  misc_feature (1)..(109): Homolog of NCBI NO: 34907482 NR Description: OsNAC6-like protein [Oryza sativa (japonica
  misc_feature (1)..(109): Homolog of NCBI NO: 10177980 NR Description: NAM (no apical meristem)-like protein

SEQ ID NO: 101319 - protein, 148 aa, Arabidopsis thaliana; identical to SEQ ID NO: 89515
  peptide (1)..(148): Ceres Seq. ID no. 13607554
  misc_feature (1)..(148): Homolog of NCBI NO: 25411775 NR Description: NAM (no apical meristem)-like protein [imported]
  misc_feature (1)..(148): Homolog of NCBI NO: 18398293 NR Description: No apical meristem (NAM) protein family thaliana] >gi|13605647|gb|AAK32817.1|AF361804_1 At2g17040 thaliana] >gi|20857250|gb|AAM26707.1| At2g17040/At2g17040
  misc_feature (1)..(24): Homolog of NCBI NO: 30678000 NR Description: No apical meristem (NAM) protein family thaliana] >gi|24030186|gb|AAN41274.1| putative NAM (no apical
  misc_feature (1)..(24): Homolog of NCBI NO: 30678002 NR Description: No apical meristem (NAM) protein family
  misc_feature (1)..(123): Homolog of NCBI NO: 15223376 NR Description: No apical meristem (NAM) protein family
  misc_feature (1)..(123): Homolog of NCBI NO: 25518578 NR Description: hypothetical protein T2P11.6 - Arabidopsis
  misc_feature (1)..(68): Homolog of NCBI NO: 15218843 NR Description: No apical meristem (NAM) protein family
  misc_feature (1)..(58): Homolog of NCBI NO: 34897020 NR Description: putative NAM (no apical meristem) protein [Oryza
  misc_feature (1)..(74): Homolog of NCBI NO: 31322582 NR Description: NAC-domain protein 485 [Brassica napus]
  misc_feature (1)..(44): Homolog of NCBI NO: 15148914 NR Description: NAC domain protein NAC2 [Phaseolus vulgaris]

SEQ ID NO: 101320 - DNA, 1224 bp, Arabidopsis thaliana
  misc_feature (1)..(1224): Ceres Seq. ID no. 13607555
  misc_feature: MA Experiment ID: 108434 Result: Up-regulated in Transcription
  misc_feature: MA Experiment 108434 PARAMETER Experiment Name: At_Root_Tips_cDNA_P Parameter: Tissue Value: Root Tips
  misc_feature: MA Experiment ID: 108577 Result: Down-regulated in Transcription
  misc_feature: MA Experiment 108577 PARAMETER Experiment Name: At_42deg_Heat_cDNA_P Parameter: Temperature (deg C) Value: 42 vs. 22
  misc_feature: MA Experiment 108577 PARAMETER Experiment Name: At_42deg_Heat_cDNA_P Parameter: Timepoint (hr) Value: 6
  misc_feature: MA Experiment 108577 PARAMETER Experiment Name: At_42deg_Heat_cDNA_P Parameter: Tissue Value: Aerial
  misc_feature: MA Experiment ID: 108595 Result: Down-regulated in Transcription
  misc_feature: MA Experiment 108595 PARAMETER Experiment Name: At_Ler-pi_Ovule_cDNA_P Parameter: Plant Line Value: null
  misc_feature: MA Experiment ID: 20000111 Result: Down-regulated in Transcription
  misc_feature: MA Experiment 20000111 PARAMETER Experiment Name: At_42deg_Heat_cDNA_P Parameter: Temperature (deg C) Value: 42 vs. 22
  misc_feature: MA Experiment 20000111 PARAMETER Experiment Name: At_42deg_Heat_cDNA_P Parameter: Timepoint (hr) Value: 6
  misc_feature: MA Experiment 20000111 PARAMETER Experiment Name: At_42deg_Heat_cDNA_P Parameter: Tissue Value: Aerial
  misc_feature: MA Experiment ID: 20000112 Result: Down-regulated in Transcription
  misc_feature: MA Experiment 20000112 PARAMETER Experiment Name: At_42deg_Heat_cDNA_P Parameter: Temperature (deg C) Value: 42 vs. 22
  misc_feature: MA Experiment 20000112 PARAMETER Experiment Name: At_42deg_Heat_cDNA_P Parameter: Timepoint (hr) Value: 2
  misc_feature: MA Experiment 20000112 PARAMETER Experiment Name: At_42deg_Heat_cDNA_P Parameter: Tissue Value: Aerial
  misc_feature: MA Experiment ID: 20000113 Result: Down-regulated in Transcription
  misc_feature: MA Experiment 20000113 PARAMETER Experiment Name: At_42deg_Heat_cDNA_P Parameter: Temperature (deg C) Value: 42 vs. 22
  misc_feature: MA Experiment 20000113 PARAMETER Experiment Name: At_42deg_Heat_cDNA_P Parameter: Timepoint (hr) Value: 8
  misc_feature: MA Experiment 20000113 PARAMETER Experiment Name: At_42deg_Heat_cDNA_P Parameter: Tissue Value: Aerial
  misc_feature: MA Experiment ID: 20000173 Result: Down-regulated in Transcription
  misc_feature: MA Experiment 20000173 PARAMETER Experiment Name: At_42deg_Heat_P Parameter: Age (day) Value: 14
  misc_feature: MA Experiment 20000173 PARAMETER Experiment Name: At_42deg_Heat_P Parameter: Organism Value: A. thaliana
  misc_feature: MA Experiment 20000173 PARAMETER Experiment Name: At_42deg_Heat_P Parameter: Plant Line Value: WS
  misc_feature: MA Experiment 20000173 PARAMETER Experiment Name: At_42deg_Heat_P Parameter: Temperature (deg C) Value: 42 vs. 22
  misc_feature: MA Experiment 20000173 PARAMETER Experiment Name: At_42deg_Heat_P Parameter: Timepoint (hr) Value: 6
  misc_feature: MA Experiment 20000173 PARAMETER Experiment Name: At_42deg_Heat_P Parameter: Tissue Value: Aerial
  misc_feature: MA Experiment ID: 20000184 Result: Up-regulated in Transcription
  misc_feature: MA Experiment 20000184 PARAMETER Experiment Name: At_Shoots__P Parameter: Age (day) Value: 7
  misc_feature: MA Experiment 20000184 PARAMETER Experiment Name: At_Shoots__P Parameter: Tissue Value: Shoots vs. Whole Plant
  misc_feature: MA Experiment ID: 20001905 Result: Down-regulated in Transcription
  misc_feature: MA Experiment 20001905 PARAMETER Experiment Name: At_Drought_Reproduction_P Parameter: Age (day) Value: 40
  misc_feature: MA Experiment 20001905 PARAMETER Experiment Name: At_Drought_Reproduction_P Parameter: Organism Value: A. thaliana
  misc_feature: MA Experiment 20001905 PARAMETER Experiment Name: At_Drought_Reproduction_P Parameter: Plant Line Value: WS
  misc_feature: MA Experiment 20001905 PARAMETER Experiment Name: At_Drought_Reproduction_P Parameter: Timepoint (day) Value: 10
  misc_feature: MA Experiment 20001905 PARAMETER Experiment Name: At_Drought_Reproduction_P Parameter: Tissue Value: Rosettes
  misc_feature: MA Experiment 20001905 PARAMETER Experiment Name: At_Drought_Reproduction_P Parameter: Treatment Value: Drought vs. No Drought
ctcattacttgttcatcaatggcaagtctttgtttccaatctccttccaaacccatttcctatttccaacccaaatccaatccatcgccaccgttattcgccaaagtctccgtctttcgatgcagagcttccgtacaaaccctcgtcgccgttgagccggagccagttttcgtctccgtcaagacttttgcgccagccaccgtcgctaatttgggaccagggtttgatttcttaggatgtgccgtcgatggtctcggagaccatgtgactctccgtgtagatccctctgtacgagccggtgaggtctcaatctcggagatcaccggaaccacaacaaaactcagcacgaaccctctccggaactgcgccggaatcgctgctattgctacgatgaagatgttagggatcagatcggttggtttatcattagatttgcataaaggtcttcctttaggtagcggtttaggttctagtgcagctagtgccgccgcagctgctgtggcggttaatgagatctttggccggaaattagggagtgatcaattggtattagccggtttagaatcggaagcgaaagtctccggttatcacgctgataatatcgcaccagcgatcatgggtggattcgttttgattagaaactacgaaccacttgatttgaaaccattgaggttcccatctgataaagatctcttctttgttctagtaagccctgactttgaagctccaactaagaaaatgagagctgcattgcctacagagattccaatggttcatcatgtttggaacagtagccaagcagctgctttagtcgctgctgtgttagaaggtgacgcagtgatgcttgggaaggcattgtcgtcggataagattgtggagccgactagagcgccgttgattccgggaatggaagctgtgaagaaggcggctttagaagctggagcatttggatgtactattagcggagctggaccaacagcggttgcggtgattgattcggaggagaagggtcaagtcattggagagaagatggtggaagcgttttggaaagttggtcatttgaaatctgttgcttctgtgaagaagcttgataatgttggtgctaggcttgtcaacagcgtctccagatgatctttgtgtgctgtttgattatgttaagattggaactaatcttgctctgtactgtaatttctagatgataataaagttctttgttttctacac

SEQ ID NO: 101321 - protein, 376 aa, Arabidopsis thaliana
  peptide (1)..(376): Ceres Seq. ID no. 13607556
  misc_feature (7)..(376): Homolog of NCBI NO: 15227800 NR Description: homoserine kinase [Arabidopsis thaliana]
  misc_feature (7)..(376): Homolog of NCBI NO: 39104572 NR Description: putative homoserine kinase HSK [Arabidopsis
  misc_feature (7)..(376): Homolog of NCBI NO: 4927412 NR Description: homoserine kinase [Arabidopsis thaliana]
  misc_feature (59)..(371): Homolog of NCBI NO: 23136657 NR Description: hypothetical protein [Cytophaga hutchinsonii]
  misc_feature (59)..(375): Homolog of NCBI NO: 21674844 NR Description: homoserine kinase [Chlorobium tepidum TLS]
  misc_feature (61)..(352): Homolog of NCBI NO: 14521243 NR Description: HOMOSERINE KINASE (HK). [Pyrococcus abyssi]
  misc_feature (61)..(371): Homolog of NCBI NO: 21242565 NR Description: homoserine kinase [Xanthomonas axonopodis pv. str. 306] >gi|21108024|gb|AAM36683.1| homoserine kinase
  misc_feature (61)..(371): Homolog of NCBI NO: 21231249 NR Description: homoserine kinase [Xanthomonas campestris pv. str. ATCC 33913] >gi|24211871|sp|Q8P9Q0|KHSE_XANCP Homoserine (HK) >gi|21112898|gb|AAM41090.1| homoserine kinase [Xanthomonas
  misc_feature (50)..(371): Homolog of NCBI NO: 22997478 NR Description: hypothetical protein [Xylella fastidiosa Ann-1]
  misc_feature (50)..(371): Homolog of NCBI NO: 15838815 NR Description: homoserine kinase [Xylella fastidiosa 9a5c]
LITCSSMASLCFQSPSKPISYFQPKSNPSPPLFAKVSVFRCRASVQTLVAVEPEPVFVSVKTFAPATVANLGPGFDFLGCAVDGLGDHVTLRVDPSVRAGEVSISEITGTTTKLSTNPLRNCAGIAAIATMKMLGIRSVGLSLDLHKGLPLGSGLGSSAASAAAAAVAVNEIFGRKLGSDQLVLAGLESEAKVSGYHADNIAPAIMGGFVLIRNYEPLDLKPLRFPSDKDLFFVLVSPDFEAPTKKMRAALPTEIPMVHHVWNSSQAAALVAAVLEGDAVMLGKALSSDKIVEPTRAPLIPGMEAVKKAALEAGAFGCTISGAGPTAVAVIDSEEKGQVIGEKMVEAFWKVGHLKSVASVKKLDNVGARLVNSVSR

SEQ ID NO: 101322 - protein, 370 aa, Arabidopsis thaliana; identical to SEQ ID NO: 26642
  peptide (1)..(370): Ceres Seq. ID no. 13607557
  misc_feature (1)..(370): Homolog of NCBI NO: 15227800 NR Description: homoserine kinase [Arabidopsis thaliana]
  misc_feature (1)..(370): Homolog of NCBI NO: 39104572 NR Description: putative homoserine kinase HSK [Arabidopsis
  misc_feature (1)..(370): Homolog of NCBI NO: 4927412 NR Description: homoserine kinase [Arabidopsis thaliana]
  misc_feature (53)..(365): Homolog of NCBI NO: 23136657 NR Description: hypothetical protein [Cytophaga hutchinsonii]
  misc_feature (53)..(369): Homolog of NCBI NO: 21674844 NR Description: homoserine kinase [Chlorobium tepidum TLS]
  misc_feature (55)..(346): Homolog of NCBI NO: 14521243 NR Description: HOMOSERINE KINASE (HK). [Pyrococcus abyssi]
  misc_feature (55)..(365): Homolog of NCBI NO: 21242565 NR Description: homoserine kinase [Xanthomonas axonopodis pv. str. 306] >gi|21108024|gb|AAM36683.1| homoserine kinase
  misc_feature (55)..(365): Homolog of NCBI NO: 21231249 NR Description: homoserine kinase [Xanthomonas campestris pv. str. ATCC 33913] >gi|24211871|sp|Q8P9Q0|KHSE_XANCP Homoserine (HK) >gi|21112898|gb|AAM41090.1| homoserine kinase [Xanthomonas
  misc_feature (44)..(365): Homolog of NCBI NO: 22997478 NR Description: hypothetical protein [Xylella fastidiosa Ann-1]
  misc_feature (44)..(365): Homolog of NCBI NO: 15838815 NR Description: homoserine kinase [Xylella fastidiosa 9a5c]

SEQ ID NO: 101323 - protein, 246 aa, Arabidopsis thaliana; identical to SEQ ID NO: 26643
  peptide (1)..(246): Ceres Seq. ID no. 13607558
  misc_feature (1)..(246): Homolog of NCBI NO: 15227800 NR Description: homoserine kinase [Arabidopsis thaliana]
  misc_feature (1)..(246): Homolog of NCBI NO: 39104572 NR Description: putative homoserine kinase HSK [Arabidopsis
  misc_feature (1)..(246): Homolog of NCBI NO: 4927412 NR Description: homoserine kinase [Arabidopsis thaliana]
  misc_feature (1)..(241): Homolog of NCBI NO: 23136657 NR Description: hypothetical protein [Cytophaga hutchinsonii]
  misc_feature (1)..(245): Homolog of NCBI NO: 21674844 NR Description: homoserine kinase [Chlorobium tepidum TLS]
  misc_feature (1)..(222): Homolog of NCBI NO: 14521243 NR Description: HOMOSERINE KINASE (HK). [Pyrococcus abyssi]
  misc_feature (1)..(241): Homolog of NCBI NO: 21242565 NR Description: homoserine kinase [Xanthomonas axonopodis pv. str. 306] >gi|21108024|gb|AAM36683.1| homoserine kinase
  misc_feature (1)..(241): Homolog of NCBI NO: 21231249 NR Description: homoserine kinase [Xanthomonas campestris pv. str. ATCC 33913] >gi|24211871|sp|Q8P9Q0|KHSE_XANCP Homoserine (HK) >gi|21112898|gb|AAM41090.1| homoserine kinase [Xanthomonas
  misc_feature (1)..(241): Homolog of NCBI NO: 22997478 NR Description: hypothetical protein [Xylella fastidiosa Ann-1]
  misc_feature (1)..(241): Homolog of NCBI NO: 15838815 NR Description: homoserine kinase [Xylella fastidiosa 9a5c]

SEQ ID NO: 101324 - DNA, 1444 bp, Arabidopsis thaliana
  misc_feature (1)..(1444): Ceres Seq. ID no. 13607559
  misc_feature: MA Experiment ID: 108569 Result: Up-regulated in Transcription
  misc_feature: MA Experiment 108569 PARAMETER Experiment Name: At_0.001%_MeJA__cDNA_P Parameter: Timepoint (hr) Value: 6
  misc_feature: MA Experiment 108569 PARAMETER Experiment Name: At_0.001%_MeJA__cDNA_P Parameter: Tissue Value: Aerial
  misc_feature: MA Experiment 108569 PARAMETER Experiment Name: At_0.001%_MeJA__cDNA_P Parameter: Treatment Value: 0.001% MeJA vs. No Treatment
  misc_feature: MA Experiment ID: 108573 Result: Up-regulated in Transcription
  misc_feature: MA Experiment 108573 PARAMETER Experiment Name: At_Drought_cDNA_P Parameter: Timepoint (hr) Value: 6
  misc_feature: MA Experiment 108573 PARAMETER Experiment Name: At_Drought_cDNA_P Parameter: Tissue Value: Aerial
  misc_feature: MA Experiment 108573 PARAMETER Experiment Name: At_Drought_cDNA_P Parameter: Treatment Value: Drought vs. No Drought
  misc_feature: MA Experiment ID: 108594 Result: Down-regulated in Transcription
  misc_feature: MA Experiment 108594 PARAMETER Experiment Name: At_Ler-rhl_Root_cDNA_P Parameter: Plant Line Value: null
  misc_feature: MA Experiment ID: 108595 Result: Down-regulated in Transcription
  misc_feature: MA Experiment 108595 PARAMETER Experiment Name: At_Ler-pi_Ovule_cDNA_P Parameter: Plant Line Value: null
  misc_feature: MA Experiment ID: 108668 Result: Up-regulated in Transcription
  misc_feature: MA Experiment 108668 PARAMETER Experiment Name: At_2mM_SA_cDNA_P Parameter: Plant Line Value: WS
  misc_feature: MA Experiment 108668 PARAMETER Experiment Name: At_2mM_SA_cDNA_P Parameter: Timepoint (hr) Value: 6
  misc_feature: MA Experiment 108668 PARAMETER Experiment Name: At_2mM_SA_cDNA_P Parameter: Treatment Value: 2mM SA vs. No Treatment
  misc_feature: MA Experiment ID: 20000111 Result: Down-regulated in Transcription
  misc_feature: MA Experiment 20000111 PARAMETER Experiment Name: At_42deg_Heat_cDNA_P Parameter: Temperature (deg C) Value: 42 vs. 22
  misc_feature: MA Experiment 20000111 PARAMETER Experiment Name: At_42deg_Heat_cDNA_P Parameter: Timepoint (hr) Value: 6
  misc_feature: MA Experiment 20000111 PARAMETER Experiment Name: At_42deg_Heat_cDNA_P Parameter: Tissue Value: Aerial
  misc_feature: MA Experiment ID: 20000113 Result: Down-regulated in Transcription
  misc_feature: MA Experiment 20000113 PARAMETER Experiment Name: At_42deg_Heat_cDNA_P Parameter: Temperature (deg C) Value: 42 vs. 22
  misc_feature: MA Experiment 20000113 PARAMETER Experiment Name: At_42deg_Heat_cDNA_P Parameter: Timepoint (hr) Value: 8
  misc_feature: MA Experiment 20000113 PARAMETER Experiment Name: At_42deg_Heat_cDNA_P Parameter: Tissue Value: Aerial
  misc_feature: MA Experiment ID: 20000173 Result: Down-regulated in Transcription
  misc_feature: MA Experiment 20000173 PARAMETER Experiment Name: At_42deg_Heat_P Parameter: Age (day) Value: 14
  misc_feature: MA Experiment 20000173 PARAMETER Experiment Name: At_42deg_Heat_P Parameter: Organism Value: A. thaliana
  misc_feature: MA Experiment 20000173 PARAMETER Experiment Name: At_42deg_Heat_P Parameter: Plant Line Value: WS
  misc_feature: MA Experiment 20000173 PARAMETER Experiment Name: At_42deg_Heat_P Parameter: Temperature (deg C) Value: 42 vs. 22
  misc_feature: MA Experiment 20000173 PARAMETER Experiment Name: At_42deg_Heat_P Parameter: Timepoint (hr) Value: 6
  misc_feature: MA Experiment 20000173 PARAMETER Experiment Name: At_42deg_Heat_P Parameter: Tissue Value: Aerial
  misc_feature: MA Experiment ID: 20000180 Result: Up-regulated in Transcription
  misc_feature: MA Experiment 20000180 PARAMETER Experiment Name: At_Germinating_Seeds_P Parameter: Age (hr) Value: 24 vs. 0
  misc_feature: MA Experiment 20000180 PARAMETER Experiment Name: At_Germinating_Seeds_P Parameter: Tissue Value: Germinating Seeds
  misc_feature: MA Experiment ID: 20000185 Result: Up-regulated in Transcription
  misc_feature: MA Experiment 20000185 PARAMETER Experiment Name: At_Roots__P Parameter: Age (day) Value: 7 vs. 21
  misc_feature: MA Experiment 20000185 PARAMETER Experiment Name: At_Roots__P Parameter: Organism Value: A. thaliana
  misc_feature: MA Experiment 20000185 PARAMETER Experiment Name: At_Roots__P Parameter: Tissue Value: Roots vs. Whole Plant
  misc_feature: MA Experiment ID: 20000234 Result: Down-regulated in Transcription
  misc_feature: MA Experiment 20000234 PARAMETER Experiment Name: At_Siliques_P Parameter: Age (day) Value: 21
  misc_feature: MA Experiment 20000234 PARAMETER Experiment Name: At_Siliques_P Parameter: Organism Value: A. thaliana
  misc_feature: MA Experiment 20000234 PARAMETER Experiment Name: At_Siliques_P Parameter: Plant Line Value: WS
  misc_feature: MA Experiment 20000234 PARAMETER Experiment Name: At_Siliques_P Parameter: Tissue Value: Less Than 5mm Siliques vs. Whole Plant
  misc_feature: MA Experiment ID: 20000439 Result: Up-regulated in Transcription
  misc_feature: MA Experiment 20000439 PARAMETER Experiment Name: At_Roots__P Parameter: Age (day) Value: 14 vs. 21
  misc_feature: MA Experiment 20000439 PARAMETER Experiment Name: At_Roots__P Parameter: Organism Value: A. thaliana
  misc_feature: MA Experiment 20000439 PARAMETER Experiment Name: At_Roots__P Parameter: Tissue Value: Roots vs. Whole Plant
cttcgttccaaaaagtcgcaactcttcttcatcttcttcctctgacgatcattttcagaagaatctgattccgatcaaaattgcagaagaagatgtctcgccaatcgttttctctactgaagaatcttcgtagcatcgcttccggttccaaaatccagacccgatccgtgacttacatgcccagacccggtgacggaaaaccaagaccagtgacgttaatccccggagacggagttggtccgttggtaacaaacgcggttcaacaagtgatggaagcgatgcacgctccggtttacttcgaaccgttcgaagttcatggagatatgaagagtttacctgaaggattgttggaatcgattaagaagaacaaagtttgtttgaaaggtggtcttaagactcccgtcggtggtggtgtgagctctctcaatgttaatctgagaaaggagcttgatctctttgcttctttggtcaactgtttcaatttgcctggtttagcttctcgtcatgagaatgttgatattgttgtgattagagagaacactgaaggtgaatatgcaggtcttgaacatgaagttgttcctggtgttgttgagagccttaaggtgattacaaagttctgttcagagcgtattgcaaagtatgcgtttgagtatgcctacttgaacaacaggaagaaagttacagcagtgcacaaggctaatatcatgaaattggctgatggtttgttcttggagtcttgtcaagaggttgctaagaagtatccaagcattgcttacaatgaaatcattgttgataattgttgtatgcaacttgtggctagaccagagcaattcgatgtcatggtgacgcctaatctctatggtaatctagtggcaaacactgctgctggtattgctggaggtactggagtcatgcctggaggaaatgttggggcggagtatgcggtctttgagcaaggtgcatcagcgggaaacgtggggaaggatacaacggaagagcaaaagaatgcaaaccctgtggctttgttgctgtcatcagccatgatgcttagacaccttcagttcccttcttttgctgacaggcttgaaaccgctgtgaagcgtgttatcgctgaagggaattgtcggactgaagatcttggtggaaacagtaccactcaagaggtcgttgacgctgtcattgcaaatttggattgacttgacaattccaacttcgcttgtgtaaagcatcagtcacacgtcggtatgattcacgcttactggaaaatacttctagttcccacattctttcgagataactcgaattgggatttcagatttcgagaaaaataacatatggttttttgttttgtttttcttctttttgttcatgtaatatgcaaagtgcaaagtgaaaactgcctcagagcattattttttgaataatgaaaattatgtttaacttc

SEQ ID NO: 101325 - protein, 367 aa, Arabidopsis thaliana; identical to SEQ ID NO: 26195
  peptide (1)..(367): Ceres Seq. ID no. 13607560
  misc_feature (39)..(362): Pfam Name: Isocitrate/isopropylmalate dehydrogenase Pfam Description: Isocitrate/isopropylmalate dehydrogenase
  misc_feature (1)..(367): Homolog of NCBI NO: 15227370 NR Description: isocitrate dehydrogenase [NAD+] subunit 2
  misc_feature (1)..(367): Homolog of NCBI NO: 1766048 NR Description: NAD+ dependent isocitrate dehydrogenase subunit 2
  misc_feature (1)..(367): Homolog of NCBI NO: 30679881 NR Description: isocitrate dehydrogenase [NAD+] subunit 2
  misc_feature (3)..(367): Homolog of NCBI NO: 28974504 NR Description: NAD-dependent isocitrate dehydrogenase gamma
  misc_feature (1)..(367): Homolog of NCBI NO: 15236932 NR Description: isocitrate dehydrogenase [NAD+] subunit 1 thaliana] >gi|7431337|pir||T06131 isocitrate dehydrogenase (NAD)
  misc_feature (1)..(367): Homolog of NCBI NO: 21537157 NR Description: NAD+ dependent isocitrate dehydrogenase subunit 1
  misc_feature (1)..(367): Homolog of NCBI NO: 1766046 NR Description: NAD+ dependent isocitrate dehydrogenase subunit 1
  misc_feature (1)..(367): Homolog of NCBI NO: 28974502 NR Description: NAD-dependent isocitrate dehydrogenase beta
  misc_feature (1)..(367): Homolog of NCBI NO: 28974498 NR Description: NAD-dependent isocitrate dehydrogenase beta
  misc_feature (1)..(367): Homolog of NCBI NO: 3790188 NR Description: NAD-dependent isocitrate dehydrogenase [Nicotiana

SEQ ID NO: 101326 - protein, 339 aa, Arabidopsis thaliana; identical to SEQ ID NO: 26196
  peptide (1)..(339): Ceres Seq. ID no. 13607561
  misc_feature (11)..(334): Pfam Name: Isocitrate/isopropylmalate dehydrogenase Pfam Description: Isocitrate/isopropylmalate dehydrogenase
  misc_feature (1)..(339): Homolog of NCBI NO: 15227370 NR Description: isocitrate dehydrogenase [NAD+] subunit 2
  misc_feature (1)..(339): Homolog of NCBI NO: 1766048 NR Description: NAD+ dependent isocitrate dehydrogenase subunit 2
  misc_feature (1)..(339): Homolog of NCBI NO: 30679881 NR Description: isocitrate dehydrogenase [NAD+] subunit 2
  misc_feature (1)..(339): Homolog of NCBI NO: 28974504 NR Description: NAD-dependent isocitrate dehydrogenase gamma
  misc_feature (1)..(339): Homolog of NCBI NO: 15236932 NR Description: isocitrate dehydrogenase [NAD+] subunit 1 thaliana] >gi|7431337|pir||T06131 isocitrate dehydrogenase (NAD)
  misc_feature (1)..(339): Homolog of NCBI NO: 21537157 NR Description: NAD+ dependent isocitrate dehydrogenase subunit 1
  misc_feature (1)..(339): Homolog of NCBI NO: 1766046 NR Description: NAD+ dependent isocitrate dehydrogenase subunit 1
  misc_feature (1)..(339): Homolog of NCBI NO: 28974502 NR Description: NAD-dependent isocitrate dehydrogenase beta
  misc_feature (1)..(339): Homolog of NCBI NO: 28974498 NR Description: NAD-dependent isocitrate dehydrogenase beta
  misc_feature (1)..(339): Homolog of NCBI NO: 3790188 NR Description: NAD-dependent isocitrate dehydrogenase [Nicotiana

SEQ ID NO: 101327 - protein, 308 aa, Arabidopsis thaliana; identical to SEQ ID NO: 26197
  peptide (1)..(308): Ceres Seq. ID no. 13607562
  misc_feature (1)..(303): Pfam Name: Isocitrate/isopropylmalate dehydrogenase Pfam Description: Isocitrate/isopropylmalate dehydrogenase
  misc_feature (1)..(308): Homolog of NCBI NO: 15227370 NR Description: isocitrate dehydrogenase [NAD+] subunit 2
  misc_feature (1)..(308): Homolog of NCBI NO: 1766048 NR Description: NAD+ dependent isocitrate dehydrogenase subunit 2
  misc_feature (1)..(308): Homolog of NCBI NO: 30679881 NR Description: isocitrate dehydrogenase [NAD+] subunit 2
  misc_feature (1)..(308): Homolog of NCBI NO: 28974504 NR Description: NAD-dependent isocitrate dehydrogenase gamma
  misc_feature (1)..(308): Homolog of NCBI NO: 15236932 NR Description: isocitrate dehydrogenase [NAD+] subunit 1 thaliana] >gi|7431337|pir||T06131 isocitrate dehydrogenase (NAD)
  misc_feature (1)..(308): Homolog of NCBI NO: 21537157 NR Description: NAD+ dependent isocitrate dehydrogenase subunit 1
  misc_feature (1)..(308): Homolog of NCBI NO: 1766046 NR Description: NAD+ dependent isocitrate dehydrogenase subunit 1
  misc_feature (1)..(308): Homolog of NCBI NO: 28974502 NR Description: NAD-dependent isocitrate dehydrogenase beta
  misc_feature (1)..(308): Homolog of NCBI NO: 28974498 NR Description: NAD-dependent isocitrate dehydrogenase beta
  misc_feature (1)..(308): Homolog of NCBI NO: 3790188 NR Description: NAD-dependent isocitrate dehydrogenase [Nicotiana

SEQ ID NO: 101328 - DNA, 2864 bp, Arabidopsis thaliana
  misc_feature (1)..(2864): Ceres Seq. ID no. 13607571
  misc_feature: MA Experiment ID: 20000437 Result: Down-regulated in Transcription
  misc_feature: MA Experiment 20000437 PARAMETER Experiment Name: At_Drought_P Parameter: Age (day) Value: 8
  misc_feature: MA Experiment 20000437 PARAMETER Experiment Name: At_Drought_P Parameter: Organism Value: A. thaliana
  misc_feature: MA Experiment 20000437 PARAMETER Experiment Name: At_Drought_P Parameter: Plant Line Value: WS
  misc_feature: MA Experiment 20000437 PARAMETER Experiment Name: At_Drought_P Parameter: Timepoint (hr) Value: 24
  misc_feature: MA Experiment 20000437 PARAMETER Experiment Name: At_Drought_P Parameter: Tissue Value: Whole Plant
  misc_feature: MA Experiment 20000437 PARAMETER Experiment Name: At_Drought_P Parameter: Treatment Value: Drought vs. No Drought
atgttgttacagttccgagcaaagacttttttcaacaacattgctcaagattctctggttactcttatcaccaaacgagttggattgggttacaggtttttgtcttcgttatgccaaccaaagaacacggctttagattccgaaggttacaagatactttttcagacagctgcaaaatcaggctccgtggtactgggaaagctcgctcatggacacatgatcaagtcctccttgaacccgtgtctgtacttgctcaacaatcttctgaacatgtattgcaagtgccgggaattgggttttgcacgccagttgttcgacagaatgcctgaacgaaacattatttcttttaattctttgatttctgggtacactcagatgggattttatgaacaggccatggaattgtttcttgaagctagagaagctaatttgaagctcgataagttcacgtatgccggtgcattgggcttttgtggagaaaggtgtgatcttgatttaggggaattgttgcacgggttggttgttgtgaatggtctatctcagcaagtgtttttgatcaatgtgttgattgacatgtatagtaagtgtggaaagcttgaccaagctatgtctttatttgatagatgcgatgaaagggatcaagtttcatggaattctttgatttccggttatgttcgggttggcgcagcggaagaaccgctaaatctgttggctaaaatgcatagagacggcctaaatctgactacgtatgctctggggagtgtgctaaaggcttgttgtattaacctgaacgaaggatttatagaaaaaggtatggcaattcactgttatacagcaaaactaggaatggagtttgatatagttgtccgtactgcattgcttgacatgtatgccaaaaacggaagtttgaaagaggcgataaagcttttcagtttgatgccttcgaagaatgtggttacgtataacgcaatgatatctgggtttctccaaatggatgaaataaccgatgaagcttctagtgaagcctttaagctcttcatggatatgcaaagacggggtttggaaccctcgccatcgacattttcagttgtgctcaaagcttgtagtgcagcgaaaaccttggaatatggaaggcagattcacgctctcatctgtaagaacaattttcagtctgatgagtttattgggagcgctctaatcgagctgtatgcgttaatgggttcaactgaagatggaatgcaatgctttgcttcaacatcaaagcaagatatcgcctcatggacatcgatgatagattgccatgtccaaaacgagcagcttgaaagcgcatttgatctgttccgacaacttttttcatcccatataagaccagaagagtatacagtttcccttatgatgagtgcttgtgctgattttgctgcattaagctcaggagagcagattcagggttatgccataaagagtggaattgatgctttcaccagtgttaagacgtcaagcatttctatgtatgcaaagtcaggtaacatgccgcttgctaatcaagtatttatcgaggtccaaaacccagacgttgcaacatactcggctatgatctcaagccttgctcaacacggttctgctaacgaagccttaaacatctttgaatcgatgaaaacccacggaattaaaccgaaccagcaagcctttctcggtgttctaatagcttgttgccacggaggattagtcacacaaggactaaagtatttccaatgcatgaagaacgattacaggattaacccaaacgagaaacatttcacttgcctcgtcgatcttttaggtcgcacgggaagattatcagatgctgagaatctgattttgagctctggttttcaagaccatccagtgacgtggagagcattactgagttcttgtagagtttacaaagacagcgtaattgggaaacgcgttgcggagagactgatggaacttgaacccgaggcctctggctcatacgtattgctccacaacatttacaacgattctggagtcaattcttcagcagaggaggtgagagaactgatgagagatcgaggggttaagaaagaaccagccttgagctggatcgtaatcggtaaccaaactcattccttcgccgtcgctgatttgtctcacccttcgagccagatgatctacacaatagagaactgtgcgacgcttttcgcaatctcggagaagggaggaaaaatggcggccaaaaccctaatcaggtcaggagcttcgttgatgaatcggtttctaacgaagccgacaacgaatatcgtgcagaacaatctcagatcttcttttcaatacatagctcctcagggacaagaaatcccgccgtattttttcccgtcgttgtcgaatctacagagctcactcatttcgcgccctaacgacactgcttcgctccaggaactcaacgaacgtggatttctttacccttctggtcttccttcactcgaattcttcttgccagaagttgatccttcaagtgagccattgcttctgtttcctaagaggacattccaaccaagcactataaggcgtaaacggaaccatggattctttgctcggaaggcaaccaaaggtggacggagagtcatagctcggagaatagcaaaagggcgtcacagagtcacagcctagaatctctctaatctttccattgatgaatctccggttattcaggctagaaaacctgaaacttccatctcctaaataacttgtcttcttatccatgttctcatgtgttgttgatctcagaattgatctgaagttaaaattttaacgatctcagctcttttgtaatggatagtttatatcaatgaatccttttttcc

SEQ ID NO: 101329 - protein, 889 aa, Arabidopsis thaliana
  peptide (1)..(889): Ceres Seq. ID no. 13607572
  misc_feature (597)..(631): Pfam Name: PPR repeat Pfam Description: PPR repeat
  misc_feature (70)..(726): Homolog of NCBI NO: 34905780 NR Description: selenium-binding protein-like [Oryza sativa
  misc_feature (45)..(732): Homolog of NCBI NO: 15226200 NR Description: pentatricopeptide (PPR) repeat-containing protein
  misc_feature (65)..(718): Homolog of NCBI NO: 15232006 NR Description: pentatricopeptide (PPR) repeat-containing protein thaliana] >gi|5923669|gb|AAD56320.1|AC009326_7 hypothetical
  misc_feature (12)..(727): Homolog of NCBI NO: 38423978 NR Description: PPR-repeat protein-like [Oryza sativa (japonica
  misc_feature (53)..(725): Homolog of NCBI NO: 32482936 NR Description: OSJNBb0072M01.1 [Oryza sativa (japonica
  misc_feature (65)..(725): Homolog of NCBI NO: 34915012 NR Description: P0458A05.10 [Oryza sativa (japonica
  misc_feature (73)..(727): Homolog of NCBI NO: 15235115 NR Description: pentatricopeptide (PPR) repeat-containing protein
  misc_feature (62)..(719): Homolog of NCBI NO: 15226150 NR Description: pentatricopeptide (PPR) repeat-containing protein
  misc_feature (33)..(745): Homolog of NCBI NO: 34897084 NR Description: hypothetical protein [Oryza sativa (japonica group)] >gi|12957718|gb|AAK09236.1| hypothetical protein [Oryza
  misc_feature (27)..(725): Homolog of NCBI NO: 38606535 NR Description: OSJNBa0016O02.23 [Oryza sativa (japonica
MLLQFRAKTFFNNIAQDSLVTLITKRVGLGYRFLSSLCQPKNTALDSEGYKILFQTAAKSGSVVLGKLAHGHMIKSSLNPCLYLLNNLLNMYCKCRELGFARQLFDRMPERNIISFNSLISGYTQMGFYEQAMELFLEAREANLKLDKFTYAGALGFCGERCDLDLGELLHGLVVVNGLSQQVFLINVLIDMYSKCGKLDQAMSLFDRCDERDQVSWNSLISGYVRVGAAEEPLNLLAKMHRDGLNLTTYALGSVLKACCINLNEGFIEKGMAIHCYTAKLGMEFDIVVRTALLDMYAKNGSLKEAIKLFSLMPSKNVVTYNAMISGFLQMDEITDEASSEAFKLFMDMQRRGLEPSPSTFSVVLKACSAAKTLEYGRQIHALICKNNFQSDEFIGSALIELYALMGSTEDGMQCFASTSKQDIASWTSMIDCHVQNEQLESAFDLFRQLFSSHIRPEEYTVSLMMSACADFAALSSGEQIQGYAIKSGIDAFTSVKTSSISMYAKSGNMPLANQVFIEVQNPDVATYSAMISSLAQHGSANEALNIFESMKTHGIKPNQQAFLGVLIACCHGGLVTQGLKYFQCMKNDYRINPNEKHFTCLVDLLGRTGRLSDAENLILSSGFQDHPVTWRALLSSCRVYKDSVIGKRVAERLMELEPEASGSYVLLHNIYNDSGVNSSAEEVRELMRDRGVKKEPALSWIVIGNQTHSFAVADLSHPSSQMIYTIENCATLFAISEKGGKMAAKTLIRSGASLMNRFLTKPTTNIVQNNLRSSFQYIAPQGQEIPPYFFPSLSNLQSSLISRPNDTASLQELNERGFLYPSGLPSLEFFLPEVDPSSEPLLLFPKRTFQPSTIRRKRNHGFFARKATKGGRRVIARRIAKGRHRVTA

SEQ ID NO: 101330 - protein, 817 aa, Arabidopsis thaliana
  peptide (1)..(817): Ceres Seq. ID no. 13607573
  misc_feature (525)..(559): Pfam Name: PPR repeat Pfam Description: PPR repeat
  misc_feature (1)..(654): Homolog of NCBI NO: 34905780 NR Description: selenium-binding protein-like [Oryza sativa
  misc_feature (1)..(660): Homolog of NCBI NO: 15226200 NR Description: pentatricopeptide (PPR) repeat-containing protein
  misc_feature (1)..(646): Homolog of NCBI NO: 15232006 NR Description: pentatricopeptide (PPR) repeat-containing protein thaliana] >gi|5923669|gb|AAD56320.1|AC009326_7 hypothetical
  misc_feature (1)..(655): Homolog of NCBI NO: 38423978 NR Description: PPR-repeat protein-like [Oryza sativa (japonica
  misc_feature (1)..(653): Homolog of NCBI NO: 32482936 NR Description: OSJNBb0072M01.1 [Oryza sativa (japonica
  misc_feature (1)..(653): Homolog of NCBI NO: 34915012 NR Description: P0458A05.10 [Oryza sativa (japonica
  misc_feature (1)..(655): Homolog of NCBI NO: 15235115 NR Description: pentatricopeptide (PPR) repeat-containing protein
  misc_feature (1)..(647): Homolog of NCBI NO: 15226150 NR Description: pentatricopeptide (PPR) repeat-containing protein
  misc_feature (1)..(673): Homolog of NCBI NO: 34897084 NR Description: hypothetical protein [Oryza sativa (japonica group)] >gi|12957718|gb|AAK09236.1| hypothetical protein [Oryza
  misc_feature (1)..(653): Homolog of NCBI NO: 38606535 NR Description: OSJNBa0016O02.23 [Oryza sativa (japonica
MIKSSLNPCLYLLNNLLNMYCKCRELGFARQLFDRMPERNIISFNSLISGYTQMGFYEQAMELFLEAREANLKLDKFTYAGALGFCGERCDLDLGELLHGLVVVNGLSQQVFLINVLIDMYSKCGKLDQAMSLFDRCDERDQVSWNSLISGYVRVGAAEEPLNLLAKMHRDGLNLTTYALGSVLKACCINLNEGFIEKGMAIHCYTAKLGMEFDIVVRTALLDMYAKNGSLKEAIKLFSLMPSKNVVTYNAMISGFLQMDEITDEASSEAFKLFMDMQRRGLEPSPSTFSVVLKACSAAKTLEYGRQIHALICKNNFQSDEFIGSALIELYALMGSTEDGMQCFASTSKQDIASWTSMIDCHVQNEQLESAFDLFRQLFSSHIRPEEYTVSLMMSACADFAALSSGEQIQGYAIKSGIDAFTSVKTSSISMYAKSGNMPLANQVFIEVQNPDVATYSAMISSLAQHGSANEALNIFESMKTHGIKPNQQAFLGVLIACCHGGLVTQGLKYFQCMKNDYRINPNEKHFTCLVDLLGRTGRLSDAENLILSSGFQDHPVTWRALLSSCRVYKDSVIGKRVAERLMELEPEASGSYVLLHNIYNDSGVNSSAEEVRELMRDRGVKKEPALSWIVIGNQTHSFAVADLSHPSSQMIYTIENCATLFAISEKGGKMAAKTLIRSGASLMNRFLTKPTTNIVQNNLRSSFQYIAPQGQEIPPYFFPSLSNLQSSLISRPNDTASLQELNERGFLYPSGLPSLEFFLPEVDPSSEPLLLFPKRTFQPSTIRRKRNHGFFARKATKGGRRVIARRIAKGRHRVTA

SEQ ID NO: 101331 - protein, 799 aa, Arabidopsis thaliana
  peptide (1)..(799): Ceres Seq. ID no. 13607574
  misc_feature (507)..(541): Pfam Name: PPR repeat Pfam Description: PPR repeat
  misc_feature (1)..(636): Homolog of NCBI NO: 34905780 NR Description: selenium-binding protein-like [Oryza sativa
  misc_feature (1)..(642): Homolog of NCBI NO: 15226200 NR Description: pentatricopeptide (PPR) repeat-containing protein
  misc_feature (1)..(628): Homolog of NCBI NO: 15232006 NR Description: pentatricopeptide (PPR) repeat-containing protein thaliana] >gi|5923669|gb|AAD56320.1|AC009326_7 hypothetical
  misc_feature (1)..(637): Homolog of NCBI NO: 38423978 NR Description: PPR-repeat protein-like [Oryza sativa (japonica
  misc_feature (1)..(635): Homolog of NCBI NO: 32482936 NR Description: OSJNBb0072M01.1 [Oryza sativa (japonica
  misc_feature (1)..(635): Homolog of NCBI NO: 34915012 NR Description: P0458A05.10 [Oryza sativa (japonica
  misc_feature (1)..(637): Homolog of NCBI NO: 15235115 NR Description: pentatricopeptide (PPR) repeat-containing protein
  misc_feature (1)..(629): Homolog of NCBI NO: 15226150 NR Description: pentatricopeptide (PPR) repeat-containing protein
  misc_feature (1)..(655): Homolog of NCBI NO: 34897084 NR Description: hypothetical protein [Oryza sativa (japonica group)] >gi|12957718|gb|AAK09236.1| hypothetical protein [Oryza
  misc_feature (1)..(635): Homolog of NCBI NO: 38606535 NR Description: OSJNBa0016O02.23 [Oryza sativa (japonica
MYCKCRELGFARQLFDRMPERNIISFNSLISGYTQMGFYEQAMELFLEAREANLKLDKFTYAGALGFCGERCDLDLGELLHGLVVVNGLSQQVFLINVLIDMYSKCGKLDQAMSLFDRCDERDQVSWNSLISGYVRVGAAEEPLNLLAKMHRDGLNLTTYALGSVLKACCINLNEGFIEKGMAIHCYTAKLGMEFDIVVRTALLDMYAKNGSLKEAIKLFSLMPSKNVVTYNAMISGFLQMDEITDEASSEAFKLFMDMQRRGLEPSPSTFSVVLKACSAAKTLEYGRQIHALICKNNFQSDEFIGSALIELYALMGSTEDGMQCFASTSKQDIASWTSMIDCHVQNEQLESAFDLFRQLFSSHIRPEEYTVSLMMSACADFAALSSGEQIQGYAIKSGIDAFTSVKTSSISMYAKSGNMPLANQVFIEVQNPDVATYSAMISSLAQHGSANEALNIFESMKTHGIKPNQQAFLGVLIACCHGGLVTQGLKYFQCMKNDYRINPNEKHFTCLVDLLGRTGRLSDAENLILSSGFQDHPVTWRALLSSCRVYKDSVIGKRVAERLMELEPEASGSYVLLHNIYNDSGVNSSAEEVRELMRDRGVKKEPALSWIVIGNQTHSFAVADLSHPSSQMIYTIENCATLFAISEKGGKMAAKTLIRSGASLMNRFLTKPTTNIVQNNLRSSFQYIAPQGQEIPPYFFPSLSNLQSSLISRPNDTASLQELNERGFLYPSGLPSLEFFLPEVDPSSEPLLLFPKRTFQPSTIRRKRNHGFFARKATKGGRRVIARRIAKGRHRVTA

SEQ ID NO: 101332 - DNA, 1111 bp, Arabidopsis thaliana
  misc_feature (1)..(1111): Ceres Seq. ID no. 13607590
  misc_feature: MA Experiment ID: 20000030 Result: Up-regulated in Transcription
  misc_feature: MA Experiment 20000030 PARAMETER Experiment Name: At_CS6630_Roots_cDNA_P Parameter: Plant Line Value: CS6630 vs. WS
  misc_feature: MA Experiment 20000030 PARAMETER Experiment Name: At_CS6630_Roots_cDNA_P Parameter: Tissue Value: Roots
  misc_feature: MA Experiment ID: 20000068 Result: Up-regulated in Transcription
  misc_feature: MA Experiment ID: 20000306 Result: Up-regulated in Transcription
  misc_feature: MA Experiment 20000306 PARAMETER Experiment Name: At_Germinating_Seeds_Sub_P Parameter: Age (hr) Value: 6 vs. 0
  misc_feature: MA Experiment 20000306 PARAMETER Experiment Name: At_Germinating_Seeds_Sub_P Parameter: Organism Value: A. thaliana
  misc_feature: MA Experiment 20000306 PARAMETER Experiment Name: At_Germinating_Seeds_Sub_P Parameter: Plant Line Value: WS
  misc_feature: MA Experiment 20000306 PARAMETER Experiment Name: At_Germinating_Seeds_Sub_P Parameter: Tissue Value: Germinating Seeds
  misc_feature: MA Experiment ID: 20000307 Result: Up-regulated in Transcription
  misc_feature: MA Experiment 20000307 PARAMETER Experiment Name: At_Germinating_Seeds_Sub_P Parameter: Age (hr) Value: 24 vs. 0
  misc_feature: MA Experiment 20000307 PARAMETER Experiment Name: At_Germinating_Seeds_Sub_P Parameter: Organism Value: A. thaliana
  misc_feature: MA Experiment 20000307 PARAMETER Experiment Name: At_Germinating_Seeds_Sub_P Parameter: Plant Line Value: WS
  misc_feature: MA Experiment 20000307 PARAMETER Experiment Name: At_Germinating_Seeds_Sub_P Parameter: Tissue Value: Germinating Seeds
  misc_feature: MA Experiment ID: 20000314 Result: Up-regulated in Transcription
  misc_feature: MA Experiment 20000314 PARAMETER Experiment Name: At_14day_Shoots-Roots_Sub_P Parameter: Age (day) Value: 14
  misc_feature: MA Experiment 20000314 PARAMETER Experiment Name: At_14day_Shoots-Roots_Sub_P Parameter: Organism Value: A. thaliana
  misc_feature: MA Experiment 20000314 PARAMETER Experiment Name: At_14day_Shoots-Roots_Sub_P Parameter: Plant Line Value: WS
  misc_feature: MA Experiment 20000314 PARAMETER Experiment Name: At_14day_Shoots-Roots_Sub_P Parameter: Tissue Value: Roots vs. Whole Plant
  misc_feature: MA Experiment ID: 20000315 Result: Down-regulated in Transcription
  misc_feature: MA Experiment 20000315 PARAMETER Experiment Name: At_14day_Shoots-Roots_Sub_P Parameter: Age (day) Value: 14
  misc_feature: MA Experiment 20000315 PARAMETER Experiment Name: At_14day_Shoots-Roots_Sub_P Parameter: Organism Value: A. thaliana
  misc_feature: MA Experiment 20000315 PARAMETER Experiment Name: At_14day_Shoots-Roots_Sub_P Parameter: Plant Line Value: WS
  misc_feature: MA Experiment 20000315 PARAMETER Experiment Name: At_14day_Shoots-Roots_Sub_P Parameter: Tissue Value: Shoots vs. Whole Plant
gcttagaattattgattgcattgcaagaaacaagactaatgatgacccaaaaaccacgaactgtgatctgcgtcggagacatccatggaaacatatcaaagctcaataaactctggcttaatcttcaatccgatatccaaaactcagatttcagctcagctctcgtcatcttcctcggcgactactgcgatcgtggaccggagactcgaaaagtcatcgacttcttgatctctttgccggagaaacatcccgatcagacccatgtctttcttgccggaaaccacgactttgcttttgctggcttcttgggtttgttacctcgcccttcagatgggtctgagtttaaggaaacgtggaaagagtactcaaaaagtgaggagagagaaggatggtataaaggtgaagggtttgagaatatgcatctccaaagcaggagatgggcgggaaagattagggttcagttcgattattccgcatatggagtgttgtataatggatcaatatacgatgcggcgtctacttttgaatcttatggcgttcctcatggatcttctgatttgataaaggcagtacctgagagtcacaagaaattcttgaccaatatggtttgggtacataaagaggatgatgtttgtatagaaacagaggaaggccttacgcattgtaagttgattgccgtacatgctggtctagagacaaagaataacgtagaagaacagcttaaactattgagagataaagacacaagcatcccaagaatacaacctctaactggtcggaaaaccgtttgggggatcccacaggaactggatgataaaaagactattgttgttagcggccaccatgggaaacttcacatcgatggcttgagattgatcatcgatgaaggtggtggatataccgatacacctttggctgcaattgttcttccttctaagaagattatccgcgacaccgataatttttccaattaagtatatcatgtcttcatattaaaattgaaacttctagtagtttttgtgattgttctgttgttactttttaattagtgtttcggtcttttccgctacttgtataacttgataatttttttccaaaattagaaaatggt

SEQ ID NO: 101333 - protein, 323 aa, Arabidopsis thaliana; identical to SEQ ID NO: 43052
  peptide (1)..(323): Ceres Seq. ID no. 13607591
  misc_feature (19)..(284): Pfam Name: Calcineurin-like phosphoesterase Pfam Description: Calcineurin-like phosphoesterase
  misc_feature (13)..(323): Homolog of NCBI NO: 18398696 NR Description: calcineurin-like phosphoesterase family thaliana] >gi|21553642|gb|AAM62735.1| unknown [Arabidopsis
  misc_feature (14)..(323): Homolog of NCBI NO: 6143880 NR Description: unknown protein [Arabidopsis thaliana]
  misc_feature (14)..(323): Homolog of NCBI NO: 18398699 NR Description: calcineurin-like phosphoesterase family thaliana] >gi|6143879|gb|AAF04426.1|AC010927_19 unknown protein thaliana] >gi|23297516|gb|AAN12986.1| unknown protein
  misc_feature (14)..(323): Homolog of NCBI NO: 21618122 NR Description: unknown [Arabidopsis thaliana]
  misc_feature (18)..(323): Homolog of NCBI NO: 38347604 NR Description: OSJNBa0042I15.17 [Oryza sativa (japonica
  misc_feature (173)..(323): Homolog of NCBI NO: 19424085 NR Description: unknown protein [Arabidopsis thaliana]
  misc_feature (24)..(108): Homolog of NCBI NO: 13475753 NR Description: serine/threonine protein phosphatase loti] >gi|14026509|dbj|BAB53106.1| serine/threonine protein
  misc_feature (21)..(102): Homolog of NCBI NO: 29653830 NR Description: serine/threonine protein phosphatase [Coxiella RSA 493] >gi|29541093|gb|AAO90036.1| serine/threonine protein
  misc_feature (21)..(114): Homolog of NCBI NO: 27377467 NR Description: serine/threonine protein phosphatase I japonicum] >gi|27350611|dbj|BAC47621.1| serine/threonine protein

SEQ ID NO: 101334 - protein, 311 aa, Arabidopsis thaliana; identical to SEQ ID NO: 43053
  peptide (1)..(311): Ceres Seq. ID no. 13607592
  misc_feature (7)..(272): Pfam Name: Calcineurin-like phosphoesterase Pfam Description: Calcineurin-like phosphoesterase
  misc_feature (1)..(311): Homolog of NCBI NO: 18398696 NR Description: calcineurin-like phosphoesterase family thaliana] >gi|21553642|gb|AAM62735.1| unknown [Arabidopsis
  misc_feature (2)..(311): Homolog of NCBI NO: 6143880 NR Description: unknown protein [Arabidopsis thaliana]
  misc_feature (2)..(311): Homolog of NCBI NO: 18398699 NR Description: calcineurin-like phosphoesterase family thaliana] >gi|6143879|gb|AAF04426.1|AC010927_19 unknown protein thaliana] >gi|23297516|gb|AAN12986.1| unknown protein
  misc_feature (2)..(311): Homolog of NCBI NO: 21618122 NR Description: unknown [Arabidopsis thaliana]
  misc_feature (6)..(311): Homolog of NCBI NO: 38347604 NR Description: OSJNBa0042I15.17 [Oryza sativa (japonica
  misc_feature (161)..(311): Homolog of NCBI NO: 19424085 NR Description: unknown protein [Arabidopsis thaliana]
  misc_feature (12)..(96): Homolog of NCBI NO: 13475753 NR Description: serine/threonine protein phosphatase loti] >gi|14026509|dbj|BAB53106.1| serine/threonine protein
  misc_feature (9)..(90): Homolog of NCBI NO: 29653830 NR Description: serine/threonine protein phosphatase [Coxiella RSA 493] >gi|29541093|gb|AAO90036.1| serine/threonine protein
  misc_feature (9)..(102): Homolog of NCBI NO: 27377467 NR Description: serine/threonine protein phosphatase I japonicum] >gi|27350611|dbj|BAC47621.1| serine/threonine protein

SEQ ID NO: 101335 - protein, 310 aa, Arabidopsis thaliana; identical to SEQ ID NO: 43054
  peptide (1)..(310): Ceres Seq. ID no. 13607593
  misc_feature (6)..(271): Pfam Name: Calcineurin-like phosphoesterase Pfam Description: Calcineurin-like phosphoesterase
  misc_feature (1)..(310): Homolog of NCBI NO: 18398696 NR Description: calcineurin-like phosphoesterase family thaliana] >gi|21553642|gb|AAM62735.1| unknown [Arabidopsis
  misc_feature (1)..(310): Homolog of NCBI NO: 6143880 NR Description: unknown protein [Arabidopsis thaliana]
  misc_feature (1)..(310): Homolog of NCBI NO: 18398699 NR Description: calcineurin-like phosphoesterase family thaliana] >gi|6143879|gb|AAF04426.1|AC010927_19 unknown protein thaliana] >gi|23297516|gb|AAN12986.1| unknown protein
  misc_feature (1)..(310): Homolog of NCBI NO: 21618122 NR Description: unknown [Arabidopsis thaliana]
  misc_feature (5)..(310): Homolog of NCBI NO: 38347604 NR Description: OSJNBa0042I15.17 [Oryza sativa (japonica
  misc_feature (160)..(310): Homolog of NCBI NO: 19424085 NR Description: unknown protein [Arabidopsis thaliana]
  misc_feature (11)..(95): Homolog of NCBI NO: 13475753 NR Description: serine/threonine protein phosphatase loti] >gi|14026509|dbj|BAB53106.1| serine/threonine protein
  misc_feature (8)..(89): Homolog of NCBI NO: 29653830 NR Description: serine/threonine protein phosphatase [Coxiella RSA 493] >gi|29541093|gb|AAO90036.1| serine/threonine protein
  misc_feature (8)..(101): Homolog of NCBI NO: 27377467 NR Description: serine/threonine protein phosphatase I japonicum] >gi|27350611|dbj|BAC47621.1| serine/threonine protein

SEQ ID NO: 101336 - DNA, 1980 bp, Arabidopsis thaliana
  misc_feature (1)..(1980): Ceres Seq. ID no. 13607594
  misc_feature: MA Experiment ID: 108573 Result: Up-regulated in Transcription
  misc_feature: MA Experiment 108573 PARAMETER Experiment Name: At_Drought_cDNA_P Parameter: Timepoint (hr) Value: 6
  misc_feature: MA Experiment 108573 PARAMETER Experiment Name: At_Drought_cDNA_P Parameter: Tissue Value: Aerial
  misc_feature: MA Experiment 108573 PARAMETER Experiment Name: At_Drought_cDNA_P Parameter: Treatment Value: Drought vs. No Drought
atgatcgatcagatatctcaatttcaggaacccagaaagagggacttgtcttttacctccaaagggttcctgccgtttcttttctacaatttttctcctgctaattatcaaatttttcttctgattttcattgtttgttagagattcttcttctcctctgcttttctattctctgggagctcgatgatggatgataaagctcgcaaagaagaagaacatcatgtgtctcaccaacataatcattctcctctgcaaagggatggaaattctgctgagattgcacaaggacaagagctatcatcaccgggccgagacctatggaggcgaggtcttgtgttagatttaccatcaacaacacctgaagatactacaagagatgatctttttagacgaaatgcatctttaacttcaagtcctgttgccaaaagagtcaacttttctccaatgtccagccctagagtcggacaacgtggtgcatccttgagtccttcttcttctacttcttcttcttcaagaaacaaacctaatagcctgaagaatctaatccccaagttaagctttaagaaccggaacagcaataacgataatgtggatatcgagaaagccgcggatttgggctttgtgtcctccccttcttcaggaaatggcagggacaggtctacatggactctcactaatattttaactccaagattgaagaaaactgagtctcttcctgtaacccctatagctcactcaaatcctgagtccactcacgggagatttgccgttgatctagttacttccacgaaaaaagggcctccactgcctatccaccgttcacgctctgtcccagcattcaacaaagatggaagtcaaaggcaattaggtgttttccgggtgattccaactccaaacatgtctccaaccagaaatactattaaacttaacgacgcgaatgttgatggagctgaagatgttcctgaagaagaagctgtgtgtagaatctgccttgtagaattgggagaagattcagaagccttcaagatggaatgtttgtgtagaggggaactagctcttgcccacaaagaatgtacaatcaaatggttcaccattaaaggaaacagaacatgtgatgtgtgcaagcaagaggttcagaatctccctgtgacccttcttcgcatgcagaattctcggggtagtattggagctccagacgccgaggctgcacactacagtttatggcaggatgttccaattcttgtgattgtaagcatgcttgcatacttctgttttctcgagcagcttctgcttacaaaaatgcaatctggcgccattgcagtttctttaccattctcgtgcgttcttggtctttttgcttcgatgacggcaacaacaatggtgccgaagagatatgtctggatttacgctacaactcagttcggtcttgttgtttttttctctcacattttcttcacattggttcgcatgcagccggttgtggccattctcttagccactatcgttgggtttggactcaccatgagcggtacaacaggtatagtcgagttttcgaaatggaggagaagcaataggacagctgaacttccaagcagtagtcaagtggatcaaccactggttgagacaacagatcagaacatttctggatcaagaaactgaaagccagaggtccgtcaatactaatcatatgttccagtagtggtctatgatctcgatggagatccatctatttagagatgtgagaacagattggtcatgtgagttaagtagtggtagttgacgagattaaggctcgatttttgggggtctcttttgtgtgtgaatgtgagtgtgagtgtgagtgtatgtatatcatctgttgttttcttaaagaaaaacaaaaagaagaagttttgtatcttttagtatattaaactattgggcttttataaagtcttgcaaattcgctacggcccataaagcccaacaagttttaaaatt

SEQ ID NO: 101337 - protein, 491 aa, Arabidopsis thaliana; identical to SEQ ID NO: 42719
  peptide (1)..(491): Ceres Seq. ID no. 13607595
  misc_feature (266)..(313): Pfam Name: Zinc finger, C3HC4 type (RING finger) Pfam Description: Zinc finger, C3HC4 type (RING finger)
  misc_feature (1)..(491): Homolog of NCBI NO: 18398630 NR Description: zinc finger (C3HC4-type RING finger) protein [Arabidopsis thaliana] >gi|15809927|gb|AAL06891.1| [Arabidopsis thaliana] >gi|21360565|gb|AAM47479.1|
  misc_feature (25)..(330): Homolog of NCBI NO: 6681342 NR Description: unknown protein, 3' partial [Arabidopsis thaliana]
  misc_feature (2)..(474): Homolog of NCBI NO: 9757769 NR Description: gene_id:MOK16.9~unknown protein [Arabidopsis
  misc_feature (2)..(474): Homolog of NCBI NO: 11290062 NR Description: hypothetical protein F15A17.210 - Arabidopsis >gi|7413595|emb|CAB86085.1| putative protein [Arabidopsis
  misc_feature (66)..(474): Homolog of NCBI NO: 18414148 NR Description: zinc finger (C3HC4-type RING finger) protein [Arabidopsis thaliana] >gi|15809868|gb|AAL06862.1| [Arabidopsis thaliana] >gi|21655303|gb|AAM65363.1|
  misc_feature (282)..(491): Homolog of NCBI NO: 6682253 NR Description: unknown protein [Arabidopsis thaliana]
  misc_feature (14)..(489): Homolog of NCBI NO: 18424371 NR Description: zinc finger (C3HC4-type RING finger) protein
  misc_feature (14)..(489): Homolog of NCBI NO: 30697388 NR Description: zinc finger (C3HC4-type RING finger) protein
  misc_feature (170)..(473): Homolog of NCBI NO: 32489688 NR Description: OSJNBb0004G23.1 [Oryza sativa (japonica
  misc_feature (14)..(384): Homolog of NCBI NO: 13605863 NR Description: AT5g60580/muf9_230 [Arabidopsis thaliana]

SEQ ID NO: 101338 - protein, 490 aa, Arabidopsis thaliana; identical to SEQ ID NO: 42720
  peptide (1)..(490): Ceres Seq. ID no. 13607596
  misc_feature (265)..(312): Pfam Name: Zinc finger, C3HC4 type (RING finger) Pfam Description: Zinc finger, C3HC4 type (RING finger)
  misc_feature (1)..(490): Homolog of NCBI NO: 18398630 NR Description: zinc finger (C3HC4-type RING finger) protein [Arabidopsis thaliana] >gi|15809927|gb|AAL06891.1| [Arabidopsis thaliana] >gi|21360565|gb|AAM47479.1|
  misc_feature (24)..(329): Homolog of NCBI NO: 6681342 NR Description: unknown protein, 3' partial [Arabidopsis thaliana]
  misc_feature (1)..(473): Homolog of NCBI NO: 9757769 NR Description: gene_id:MOK16.9~unknown protein [Arabidopsis
  misc_feature (1)..(473): Homolog of NCBI NO: 11290062 NR Description: hypothetical protein F15A17.210 - Arabidopsis >gi|7413595|emb|CAB86085.1| putative protein [Arabidopsis
  misc_feature (65)..(473): Homolog of NCBI NO: 18414148 NR Description: zinc finger (C3HC4-type RING finger) protein [Arabidopsis thaliana] >gi|15809868|gb|AAL06862.1| [Arabidopsis thaliana] >gi|21655303|gb|AAM65363.1|
  misc_feature (281)..(490): Homolog of NCBI NO: 6682253 NR Description: unknown protein [Arabidopsis thaliana]
  misc_feature (13)..(488): Homolog of NCBI NO: 18424371 NR Description: zinc finger (C3HC4-type RING finger) protein
  misc_feature (13)..(488): Homolog of NCBI NO: 30697388 NR Description: zinc finger (C3HC4-type RING finger) protein
  misc_feature (169)..(472): Homolog of NCBI NO: 32489688 NR Description: OSJNBb0004G23.1 [Oryza sativa (japonica
  misc_feature (13)..(383): Homolog of NCBI NO: 13605863 NR Description: AT5g60580/muf9_230 [Arabidopsis thaliana]

SEQ ID NO: 101339 - protein, 404 aa, Arabidopsis thaliana; identical to SEQ ID NO: 42721
  peptide (1)..(404): Ceres Seq. ID no. 13607597
  misc_feature (179)..(226): Pfam Name: Zinc finger, C3HC4 type (RING finger) Pfam Description: Zinc finger, C3HC4 type (RING finger)
  misc_feature (1)..(404): Homolog of NCBI NO: 18398630 NR Description: zinc finger (C3HC4-type RING finger) protein [Arabidopsis thaliana] >gi|15809927|gb|AAL06891.1| [Arabidopsis thaliana] >gi|21360565|gb|AAM47479.1|
  misc_feature (1)..(243): Homolog of NCBI NO: 6681342 NR Description: unknown protein, 3' partial [Arabidopsis thaliana]
  misc_feature (1)..(387): Homolog of NCBI NO: 9757769 NR Description: gene_id:MOK16.9~unknown protein [Arabidopsis
  misc_feature (1)..(387): Homolog of NCBI NO: 11290062 NR Description: hypothetical protein F15A17.210 - Arabidopsis >gi|7413595|emb|CAB86085.1| putative protein [Arabidopsis
  misc_feature (1)..(387): Homolog of NCBI NO: 18414148 NR Description: zinc finger (C3HC4-type RING finger) protein [Arabidopsis thaliana] >gi|15809868|gb|AAL06862.1| [Arabidopsis thaliana] >gi|21655303|gb|AAM65363.1|
  misc_feature (195)..(404): Homolog of NCBI NO: 6682253 NR Description: unknown protein [Arabidopsis thaliana]
  misc_feature (1)..(402): Homolog of NCBI NO: 18424371 NR Description: zinc finger (C3HC4-type RING finger) protein
  misc_feature (1)..(402): Homolog of NCBI NO: 30697388 NR Description: zinc finger (C3HC4-type RING finger) protein
  misc_feature (83)..(386): Homolog of NCBI NO: 32489688 NR Description: OSJNBb0004G23.1 [Oryza sativa (japonica
  misc_feature (1)..(297): Homolog of NCBI NO: 13605863 NR Description: AT5g60580/muf9_230 [Arabidopsis thaliana]

SEQ ID NO: 101340 - DNA, 1081 bp, Arabidopsis thaliana
  misc_feature (1)..(1081): Ceres Seq. ID no. 13607602
  misc_feature: MA Experiment ID: 108501 Result: Down-regulated in Transcription
  misc_feature: MA Experiment 108501 PARAMETER Experiment Name: At_ap2_floral_buds_cDNA_P Parameter: Plant Line Value: ap2 (Ler.)
  misc_feature: MA Experiment 108501 PARAMETER Experiment Name: At_ap2_floral_buds_cDNA_P Parameter: Tissue Value: Closed Flower
  misc_feature: MA Experiment ID: 108561 Result: Down-regulated in Transcription
  misc_feature: MA Experiment 108561 PARAMETER Experiment Name: At_100uM_ABA_cDNA_P Parameter: Timepoint (hr) Value: 6
  misc_feature: MA Experiment 108561 PARAMETER Experiment Name: At_100uM_ABA_cDNA_P Parameter: Tissue Value: Aerial
  misc_feature: MA Experiment 108561 PARAMETER Experiment Name: At_100uM_ABA_cDNA_P Parameter: Treatment Value: 100uM ABA vs. No Treatment
  misc_feature: MA Experiment ID: 108572 Result: Up-regulated in Transcription
  misc_feature: MA Experiment 108572 PARAMETER Experiment Name: At_Drought_cDNA_P Parameter: Timepoint (hr) Value: 1
  misc_feature: MA Experiment 108572 PARAMETER Experiment Name: At_Drought_cDNA_P Parameter: Tissue Value: Aerial
  misc_feature: MA Experiment 108572 PARAMETER Experiment Name: At_Drought_cDNA_P Parameter: Treatment Value: Drought vs. No Drought
  misc_feature: MA Experiment ID: 108574 Result: Down-regulated in Transcription
  misc_feature: MA Experiment 108574 PARAMETER Experiment Name: At_Wounding__cDNA_P Parameter: Timepoint (hr) Value: 1
  misc_feature: MA Experiment 108574 PARAMETER Experiment Name: At_Wounding__cDNA_P Parameter: Tissue Value: Aerial
  misc_feature: MA Experiment 108574 PARAMETER Experiment Name: At_Wounding__cDNA_P Parameter: Treatment Value: Wounding vs. No Wounding
  misc_feature: MA Experiment ID: 108579 Result: Down-regulated in Transcription
  misc_feature: MA Experiment 108579 PARAMETER Experiment Name: At_4deg_Cold_cDNA_P Parameter: Temperature (deg C) Value: 4 vs. 22
  misc_feature: MA Experiment 108579 PARAMETER Experiment Name: At_4deg_Cold_cDNA_P Parameter: Timepoint (hr) Value: 6
  misc_feature: MA Experiment 108579 PARAMETER Experiment Name: At_4deg_Cold_cDNA_P Parameter: Tissue Value: Aerial
  misc_feature: MA Experiment ID: 108585 Result: Down-regulated in Transcription
  misc_feature: MA Experiment 108585 PARAMETER Experiment Name: At_5mM_NaNP_cDNA_P Parameter: Timepoint (hr) Value: 6
  misc_feature: MA Experiment 108585 PARAMETER Experiment Name: At_5mM_NaNP_cDNA_P Parameter: Tissue Value: Aerial
  misc_feature: MA Experiment 108585 PARAMETER Experiment Name: At_5mM_NaNP_cDNA_P Parameter: Treatment Value: null
  misc_feature: MA Experiment ID: 108595 Result: Down-regulated in Transcription
  misc_feature: MA Experiment 108595 PARAMETER Experiment Name: At_Ler-pi_Ovule_cDNA_P Parameter: Plant Line Value: null
  misc_feature: MA Experiment ID: 108605 Result: Down-regulated in Transcription
  misc_feature: MA Experiment 108605 PARAMETER Experiment Name: At_100uM_ABA_cDNA_P Parameter: Timepoint (hr) Value: 6
  misc_feature: MA Experiment 108605 PARAMETER Experiment Name: At_100uM_ABA_cDNA_P Parameter: Tissue Value: Aerial
  misc_feature: MA Experiment 108605 PARAMETER Experiment Name: At_100uM_ABA_cDNA_P Parameter: Treatment Value: 100uM ABA vs. No Treatment
  misc_feature: MA Experiment ID: 108607 Result: Down-regulated in Transcription
  misc_feature: MA Experiment 108607 PARAMETER Experiment Name: At_100uM_ABA_cDNA_P Parameter: Timepoint (hr) Value: 4
  misc_feature: MA Experiment 108607 PARAMETER Experiment Name: At_100uM_ABA_cDNA_P Parameter: Tissue Value: Aerial
  misc_feature: MA Experiment 108607 PARAMETER Experiment Name: At_100uM_ABA_cDNA_P Parameter: Treatment Value: 100uM ABA vs. No Treatment
  misc_feature: MA Experiment ID: 20000113 Result: Down-regulated in Transcription
  misc_feature: MA Experiment 20000113 PARAMETER Experiment Name: At_42deg_Heat_cDNA_P Parameter: Temperature (deg C) Value: 42 vs. 22
  misc_feature: MA Experiment 20000113 PARAMETER Experiment Name: At_42deg_Heat_cDNA_P Parameter: Timepoint (hr) Value: 8
  misc_feature: MA Experiment 20000113 PARAMETER Experiment Name: At_42deg_Heat_cDNA_P Parameter: Tissue Value: Aerial
  misc_feature: MA Experiment ID: 20000169 Result: Down-regulated in Transcription
  misc_feature: MA Experiment 20000169 PARAMETER Experiment Name: At_100uM_ABA_P Parameter: Age (day) Value: 14
  misc_feature: MA Experiment 20000169 PARAMETER Experiment Name: At_100uM_ABA_P Parameter: Organism Value: A. thaliana
  misc_feature: MA Experiment 20000169 PARAMETER Experiment Name: At_100uM_ABA_P Parameter: Plant Line Value: WS
  misc_feature: MA Experiment 20000169 PARAMETER Experiment Name: At_100uM_ABA_P Parameter: Timepoint (hr) Value: 6
  misc_feature: MA Experiment 20000169 PARAMETER Experiment Name: At_100uM_ABA_P Parameter: Tissue Value: Aerial
  misc_feature: MA Experiment 20000169 PARAMETER Experiment Name: At_100uM_ABA_P Parameter: Treatment Value: 100uM ABA vs. No Treatment
  misc_feature: MA Experiment ID: 20000173 Result: Down-regulated in Transcription
  misc_feature: MA Experiment 20000173 PARAMETER Experiment Name: At_42deg_Heat_P Parameter: Age (day) Value: 14
  misc_feature: MA Experiment 20000173 PARAMETER Experiment Name: At_42deg_Heat_P Parameter: Organism Value: A. thaliana
  misc_feature: MA Experiment 20000173 PARAMETER Experiment Name: At_42deg_Heat_P Parameter: Plant Line Value: WS
  misc_feature: MA Experiment 20000173 PARAMETER Experiment Name: At_42deg_Heat_P Parameter: Temperature (deg C) Value: 42 vs. 22
  misc_feature: MA Experiment 20000173 PARAMETER Experiment Name: At_42deg_Heat_P Parameter: Timepoint (hr) Value: 6
  misc_feature: MA Experiment 20000173 PARAMETER Experiment Name: At_42deg_Heat_P Parameter: Tissue Value: Aerial
  misc_feature: MA Experiment ID: 20000184 Result: Down-regulated in Transcription
  misc_feature: MA Experiment 20000184 PARAMETER Experiment Name: At_Shoots__P Parameter: Age (day) Value: 7
  misc_feature: MA Experiment 20000184 PARAMETER Experiment Name: At_Shoots__P Parameter: Tissue Value: Shoots vs. Whole Plant
  misc_feature: MA Experiment ID: 20000185 Result: Down-regulated in Transcription
  misc_feature: MA Experiment 20000185 PARAMETER Experiment Name: At_Roots__P Parameter: Age (day) Value: 7 vs. 21
  misc_feature: MA Experiment 20000185 PARAMETER Experiment Name: At_Roots__P Parameter: Organism Value: A. thaliana
  misc_feature: MA Experiment 20000185 PARAMETER Experiment Name: At_Roots__P Parameter: Tissue Value: Roots vs. Whole Plant
  misc_feature: MA Experiment ID: 20000213 Result: Down-regulated in Transcription
  misc_feature: MA Experiment 20000213 PARAMETER Experiment Name: At_4deg_Cold_P Parameter: Timepoint (hr) Value: 2
  misc_feature: MA Experiment ID: 20000234 Result: Down-regulated in Transcription
  misc_feature: MA Experiment 20000234 PARAMETER Experiment Name: At_Siliques_P Parameter: Age (day) Value: 21
  misc_feature: MA Experiment 20000234 PARAMETER Experiment Name: At_Siliques_P Parameter: Organism Value: A. thaliana
  misc_feature: MA Experiment 20000234 PARAMETER Experiment Name: At_Siliques_P Parameter: Plant Line Value: WS
  misc_feature: MA Experiment 20000234 PARAMETER Experiment Name: At_Siliques_P Parameter: Tissue Value: Less Than 5mm Siliques vs. Whole Plant
  misc_feature: MA Experiment ID: 20000235 Result: Down-regulated in Transcription
  misc_feature: MA Experiment 20000235 PARAMETER Experiment Name: At_Siliques_P Parameter: Age (day) Value: 21
  misc_feature: MA Experiment 20000235 PARAMETER Experiment Name: At_Siliques_P Parameter: Organism Value: A. thaliana
  misc_feature: MA Experiment 20000235 PARAMETER Experiment Name: At_Siliques_P Parameter: Plant Line Value: WS
  misc_feature: MA Experiment 20000235 PARAMETER Experiment Name: At_Siliques_P Parameter: Tissue Value: 5-10mm Siliques vs. Whole Plant
  misc_feature: MA Experiment ID: 20000265 Result: Down-regulated in Transcription
  misc_feature: MA Experiment 20000265 PARAMETER Experiment Name: At_Open_Flower_P Parameter: Age (day) Value: 21
  misc_feature: MA Experiment 20000265 PARAMETER Experiment Name: At_Open_Flower_P Parameter: Plant Line Value: WS
  misc_feature: MA Experiment 20000265 PARAMETER Experiment Name: At_Open_Flower_P Parameter: Tissue Value: Closed Flower vs. Whole Plant
  misc_feature: MA Experiment ID: 20000286 Result: Down-regulated in Transcription
  misc_feature: MA Experiment 20000286 PARAMETER Experiment Name: At_Open_Flower_P Parameter: Age (day) Value: 21
  misc_feature: MA Experiment 20000286 PARAMETER Experiment Name: At_Open_Flower_P Parameter: Plant Line Value: WS
  misc_feature: MA Experiment 20000286 PARAMETER Experiment Name: At_Open_Flower_P Parameter: Tissue Value: Half Open vs. Whole Plant
  misc_feature: MA Experiment ID: 20000438 Result: Down-regulated in Transcription
  misc_feature: MA Experiment 20000438 PARAMETER Experiment Name: At_Shoots__P Parameter: Age (day) Value: 14
  misc_feature: MA Experiment 20000438 PARAMETER Experiment Name: At_Shoots__P Parameter: Tissue Value: Shoots vs. Whole Plant
  misc_feature: MA Experiment ID: 20000439 Result: Down-regulated in Transcription
  misc_feature: MA Experiment 20000439 PARAMETER Experiment Name: At_Roots__P Parameter: Age (day) Value: 14 vs. 21
  misc_feature: MA Experiment 20000439 PARAMETER Experiment Name: At_Roots__P Parameter: Organism Value: A. thaliana
  misc_feature: MA Experiment 20000439 PARAMETER Experiment Name: At_Roots__P Parameter: Tissue Value: Roots vs. Whole Plant
  misc_feature: MA Experiment ID: 20000451 Result: Down-regulated in Transcription
  misc_feature: MA Experiment 20000451 PARAMETER Experiment Name: At_CS6879_Shoots-Roots_P Parameter: Age (day) Value: 14
  misc_feature: MA Experiment 20000451 PARAMETER Experiment Name: At_CS6879_Shoots-Roots_P Parameter: Organism Value: A. thaliana
  misc_feature: MA Experiment 20000451 PARAMETER Experiment Name: At_CS6879_Shoots-Roots_P Parameter: Plant Line Value: CS6879 vs. WS
  misc_feature: MA Experiment 20000451 PARAMETER Experiment Name: At_CS6879_Shoots-Roots_P Parameter: Tissue Value: Roots
  misc_feature: MA Experiment ID: 20001450 Result: Up-regulated in Transcription
  misc_feature: MA Experiment 20001450 PARAMETER Experiment Name: At_Far-red-induction_P Parameter: Age (day) Value: 7
  misc_feature: MA Experiment 20001450 PARAMETER Experiment Name: At_Far-red-induction_P Parameter: Light Value: Far-red vs. White
  misc_feature: MA Experiment 20001450 PARAMETER Experiment Name: At_Far-red-induction_P Parameter: Organism Value: A. thaliana
  misc_feature: MA Experiment 20001450 PARAMETER Experiment Name: At_Far-red-induction_P Parameter: Plant Line Value: Columbia
  misc_feature: MA Experiment 20001450 PARAMETER Experiment Name: At_Far-red-induction_P Parameter: Timepoint (hr) Value: 8
  misc_feature: MA Experiment 20001450 PARAMETER Experiment Name: At_Far-red-induction_P Parameter: Tissue Value: Whole Plant
  misc_feature: MA Experiment ID: 20001557 Result: Down-regulated in Transcription
  misc_feature: MA Experiment 20001557 PARAMETER Experiment Name: At_Drought_Soil_Dry_P Parameter: Age (day) Value: 27
  misc_feature: MA Experiment 20001557 PARAMETER Experiment Name: At_Drought_Soil_Dry_P Parameter: Organism Value: A. thaliana
  misc_feature: MA Experiment 20001557 PARAMETER Experiment Name: At_Drought_Soil_Dry_P Parameter: Plant Line Value: WS
  misc_feature: MA Experiment 20001557 PARAMETER Experiment Name: At_Drought_Soil_Dry_P Parameter: Post Timepoint (hr) Value: 3
  misc_feature: MA Experiment 20001557 PARAMETER Experiment Name: At_Drought_Soil_Dry_P Parameter: Post-Treatment Value: Re-Water vs. No Drought
  misc_feature: MA Experiment 20001557 PARAMETER Experiment Name: At_Drought_Soil_Dry_P Parameter: Timepoint (day) Value: 13
  misc_feature: MA Experiment 20001557 PARAMETER Experiment Name: At_Drought_Soil_Dry_P Parameter: Treatment Value: Drought vs. No Drought
  misc_feature: MA Experiment ID: 20001558 Result: Down-regulated in Transcription
  misc_feature: MA Experiment 20001558 PARAMETER Experiment Name: At_Drought_Soil_Dry_P Parameter: Age (day) Value: 27
  misc_feature: MA Experiment 20001558 PARAMETER Experiment Name: At_Drought_Soil_Dry_P Parameter: Organism Value: A. thaliana
  misc_feature: MA Experiment 20001558 PARAMETER Experiment Name: At_Drought_Soil_Dry_P Parameter: Plant Line Value: WS
  misc_feature: MA Experiment 20001558 PARAMETER Experiment Name: At_Drought_Soil_Dry_P Parameter: Post Timepoint (hr) Value: 6
  misc_feature: MA Experiment 20001558 PARAMETER Experiment Name: At_Drought_Soil_Dry_P Parameter: Post-Treatment Value: Re-Water vs. No Drought
  misc_feature: MA Experiment 20001558 PARAMETER Experiment Name: At_Drought_Soil_Dry_P Parameter: Timepoint (day) Value: 13
  misc_feature: MA Experiment 20001558 PARAMETER Experiment Name: At_Drought_Soil_Dry_P Parameter: Treatment Value: Drought vs. No Drought
  misc_feature: MA Experiment ID: 20001560 Result: Down-regulated in Transcription
  misc_feature: MA Experiment 20001560 PARAMETER Experiment Name: At_Drought_Soil_Dry_P Parameter: Age (day) Value: 28
  misc_feature: MA Experiment 20001560 PARAMETER Experiment Name: At_Drought_Soil_Dry_P Parameter: Organism Value: A. thaliana
  misc_feature: MA Experiment 20001560 PARAMETER Experiment Name: At_Drought_Soil_Dry_P Parameter: Plant Line Value: WS
  misc_feature: MA Experiment 20001560 PARAMETER Experiment Name: At_Drought_Soil_Dry_P Parameter: Post Timepoint (hr) Value: None
  misc_feature: MA Experiment 20001560 PARAMETER Experiment Name: At_Drought_Soil_Dry_P Parameter: Post-Treatment Value: None
  misc_feature: MA Experiment 20001560 PARAMETER Experiment Name: At_Drought_Soil_Dry_P Parameter: Timepoint (day) Value: 14
  misc_feature: MA Experiment 20001560 PARAMETER Experiment Name: At_Drought_Soil_Dry_P Parameter: Treatment Value: Drought vs. No Drought
  misc_feature: MA Experiment ID: 20001904 Result: Down-regulated in Transcription
  misc_feature: MA Experiment 20001904 PARAMETER Experiment Name: At_Drought_Reproduction_P Parameter: Age (day) Value: 37
  misc_feature: MA Experiment 20001904 PARAMETER Experiment Name: At_Drought_Reproduction_P Parameter: Organism Value: A. thaliana
  misc_feature: MA Experiment 20001904 PARAMETER Experiment Name: At_Drought_Reproduction_P Parameter: Plant Line Value: WS
  misc_feature: MA Experiment 20001904 PARAMETER Experiment Name: At_Drought_Reproduction_P Parameter: Timepoint (day) Value: 7
  misc_feature: MA Experiment 20001904 PARAMETER Experiment Name: At_Drought_Reproduction_P Parameter: Tissue Value: Rosettes
  misc_feature: MA Experiment 20001904 PARAMETER Experiment Name: At_Drought_Reproduction_P Parameter: Treatment Value: Drought vs. No Drought
  misc_feature: MA Experiment ID: 20001905 Result: Down-regulated in Transcription
  misc_feature: MA Experiment 20001905 PARAMETER Experiment Name: At_Drought_Reproduction_P Parameter: Age (day) Value: 40
  misc_feature: MA Experiment 20001905 PARAMETER Experiment Name: At_Drought_Reproduction_P Parameter: Organism Value: A. thaliana
  misc_feature: MA Experiment 20001905 PARAMETER Experiment Name: At_Drought_Reproduction_P Parameter: Plant Line Value: WS
  misc_feature: MA Experiment 20001905 PARAMETER Experiment Name: At_Drought_Reproduction_P Parameter: Timepoint (day) Value: 10
  misc_feature: MA Experiment 20001905 PARAMETER Experiment Name: At_Drought_Reproduction_P Parameter: Tissue Value: Rosettes
  misc_feature: MA Experiment 20001905 PARAMETER Experiment Name: At_Drought_Reproduction_P Parameter: Treatment Value: Drought vs. No Drought
  misc_feature: MA Experiment ID: 20001906 Result: Down-regulated in Transcription
  misc_feature: MA Experiment 20001906 PARAMETER Experiment Name: At_Drought_Reproduction_P Parameter: Age (day) Value: 35
  misc_feature: MA Experiment 20001906 PARAMETER Experiment Name: At_Drought_Reproduction_P Parameter: Organism Value: A. thaliana
  misc_feature: MA Experiment 20001906 PARAMETER Experiment Name: At_Drought_Reproduction_P Parameter: Plant Line Value: WS
  misc_feature: MA Experiment 20001906 PARAMETER Experiment Name: At_Drought_Reproduction_P Parameter: Timepoint (day) Value: 5
  misc_feature: MA Experiment 20001906 PARAMETER Experiment Name: At_Drought_Reproduction_P Parameter: Tissue Value: Siliques
  misc_feature: MA Experiment 20001906 PARAMETER Experiment Name: At_Drought_Reproduction_P Parameter: Treatment Value: Drought vs. No Drought
aatctatcaaccaaaagcaaagaaagagagggggaaaaaacacaaggaaaaaaatggctcaattggctgctttgtcgggaaagcaagctgatgagtacttgaacgcaaggccgaaatatcctacaatatggtacaaagtgttggctggtcgaaccagcaaccataaggtggcttgggatgttgggaccggcaacggtcaggctgctattggggtcgctgagtactaccagaaagtggtggcaactgatataaatgaatcacaactccaacgtgcaatgaagcacccaaaagtcacttactatcacactccatcatcaatgtccgacgacgatctagtgactctactcggtggagaaaactccatagatatcataatagccgctcaagctcttcactacttcgacctaaagagattctaccccatagtgaaacgtgttcttcgtaaacaaggcggtatcatcgtagtttgggtttacaacgatctcatcatcaccccaaaggttgattccatcatgaaacgtcttgtggattcaacattaccttacagaaacccgactatgaatttggcgtttgatggttataaaacaatagagtttccttttaaaaacattaggatggggactcaaggaaggcctaaagctcttgacatcccacacatgctttcgctagatggatttctagggttcttaaaatcatggcagcctctagtgaaagcaaaggagcaaggagaggatcttttaacttcttatatgattgatgagtttaaggaagcttggggtgatgatgaacaagtcaaggatgttcactacaaggcatttatgcttgcagggaaactttaggtaattaatatatgttcccctttgagatatatattaactatatgtcatacacgcatgtcatcaatgatcaatcgaattaggattgaaaacttatgtttaacaggtcttgagagcaacctggttgatttaaatgcggatcattactttgtataactttcgtttctgtataaattaatatattaattaatatatttatagcactgtaaatataaagatgttatatataaataaaaggttaatat

SEQ ID NO: 101341 - protein, 278 aa, Arabidopsis thaliana
  peptide (1)..(278): Ceres Seq. ID no. 13607603
  misc_feature (18)..(278): Homolog of NCBI NO: 15233061 NR Description: expressed protein [Arabidopsis thaliana]
  misc_feature (21)..(278): Homolog of NCBI NO: 21594033 NR Description: embryonic abundant protein-like [Arabidopsis
  misc_feature (21)..(278): Homolog of NCBI NO: 18405387 NR Description: expressed protein [Arabidopsis thaliana]
  misc_feature (21)..(278): Homolog of NCBI NO: 15232436 NR Description: embryonic abundant protein -related [Arabidopsis
  misc_feature (21)..(278): Homolog of NCBI NO: 15238280 NR Description: embryonic abundant protein -related [Arabidopsis
  misc_feature (21)..(276): Homolog of NCBI NO: 15235684 NR Description: expressed protein [Arabidopsis thaliana]
  misc_feature (47)..(276): Homolog of NCBI NO: 20258825 NR Description: unknown protein [Arabidopsis thaliana]
  misc_feature (21)..(181): Homolog of NCBI NO: 34912212 NR Description: P0415C01.8 [Oryza sativa (japonica
  misc_feature (191)..(276): Homolog of NCBI NO: 34912212 NR Description: P0415C01.8 [Oryza sativa (japonica
  misc_feature (21)..(278): Homolog of NCBI NO: 34910604 NR Description: putative embryonic abundant protein-like [Oryza
SINQKQRKRGGKNTRKKMAQLAALSGKQADEYLNARPKYPTIWYKVLAGRTSNHKVAWDVGTGNGQAAIGVAEYYQKVVATDINESQLQRAMKHPKVTYYHTPSSMSDDDLVTLLGGENSIDIIIAAQALHYFDLKRFYPIVKRVLRKQGGIIVVWVYNDLIITPKVDSIMKRLVDSTLPYRNPTMNLAFDGYKTIEFPFKNIRMGTQGRPKALDIPHMLSLDGFLGFLKSWQPLVKAKEQGEDLLTSYMIDEFKEAWGDDEQVKDVHYKAFMLAGKL

SEQ ID NO: 101342 - protein, 261 aa, Arabidopsis thaliana; identical to SEQ ID NO: 26263
  peptide (1)..(261): Ceres Seq. ID no. 13607604
  misc_feature (1)..(261): Homolog of NCBI NO: 15233061 NR Description: expressed protein [Arabidopsis thaliana]
  misc_feature (4)..(261): Homolog of NCBI NO: 21594033 NR Description: embryonic abundant protein-like [Arabidopsis
  misc_feature (4)..(261): Homolog of NCBI NO: 18405387 NR Description: expressed protein [Arabidopsis thaliana]
  misc_feature (4)..(261): Homolog of NCBI NO: 15232436 NR Description: embryonic abundant protein -related [Arabidopsis
  misc_feature (4)..(261): Homolog of NCBI NO: 15238280 NR Description: embryonic abundant protein -related [Arabidopsis
  misc_feature (4)..(259): Homolog of NCBI NO: 15235684 NR Description: expressed protein [Arabidopsis thaliana]
  misc_feature (30)..(259): Homolog of NCBI NO: 20258825 NR Description: unknown protein [Arabidopsis thaliana]
  misc_feature (4)..(164): Homolog of NCBI NO: 34912212 NR Description: P0415C01.8 [Oryza sativa (japonica
  misc_feature (174)..(259): Homolog of NCBI NO: 34912212 NR Description: P0415C01.8 [Oryza sativa (japonica
  misc_feature (4)..(261): Homolog of NCBI NO: 34910604 NR Description: putative embryonic abundant protein-like [Oryza

SEQ ID NO: 101343 - protein, 187 aa, Arabidopsis thaliana; identical to SEQ ID NO: 26264
  peptide (1)..(187): Ceres Seq. ID no. 13607605
  misc_feature (1)..(187): Homolog of NCBI NO: 15233061 NR Description: expressed protein [Arabidopsis thaliana]
  misc_feature (1)..(187): Homolog of NCBI NO: 21594033 NR Description: embryonic abundant protein-like [Arabidopsis
  misc_feature (1)..(187): Homolog of NCBI NO: 18405387 NR Description: expressed protein [Arabidopsis thaliana]
  misc_feature (1)..(187): Homolog of NCBI NO: 15232436 NR Description: embryonic abundant protein -related [Arabidopsis
  misc_feature (1)..(187): Homolog of NCBI NO: 15238280 NR Description: embryonic abundant protein -related [Arabidopsis
  misc_feature (1)..(185): Homolog of NCBI NO: 15235684 NR Description: expressed protein [Arabidopsis thaliana]
  misc_feature (1)..(185): Homolog of NCBI NO: 20258825 NR Description: unknown protein [Arabidopsis thaliana]
  misc_feature (1)..(90): Homolog of NCBI NO: 34912212 NR Description: P0415C01.8 [Oryza sativa (japonica
  misc_feature (100)..(185): Homolog of NCBI NO: 34912212 NR Description: P0415C01.8 [Oryza sativa (japonica
  misc_feature (1)..(187): Homolog of NCBI NO: 34910604 NR Description: putative embryonic abundant protein-like [Oryza

SEQ ID NO: 101344 - DNA, 1900 bp, Arabidopsis thaliana
  misc_feature (1)..(1900): Ceres Seq. ID no. 13607622
  misc_feature: MA Experiment ID: 20000264 Result: Up-regulated in Transcription
  misc_feature: MA Experiment 20000264 PARAMETER Experiment Name: At_Open_Flower_P Parameter: Age (day) Value: 21
  misc_feature: MA Experiment 20000264 PARAMETER Experiment Name: At_Open_Flower_P Parameter: Plant Line Value: WS
  misc_feature: MA Experiment 20000264 PARAMETER Experiment Name: At_Open_Flower_P Parameter: Tissue Value: Open Flower vs. Whole Plant
  misc_feature: MA Experiment ID: 20000438 Result: Up-regulated in Transcription
  misc_feature: MA Experiment 20000438 PARAMETER Experiment Name: At_Shoots__P Parameter: Age (day) Value: 14
  misc_feature: MA Experiment 20000438 PARAMETER Experiment Name: At_Shoots__P Parameter: Tissue Value: Shoots vs. Whole Plant
  misc_feature: MA Experiment ID: 20000495 Result: Up-regulated in Transcription
  misc_feature: MA Experiment 20000495 PARAMETER Experiment Name: At_Guard_Cells_P Parameter: Harvest Date Value: 8/2/2002
  misc_feature: MA Experiment 20000495 PARAMETER Experiment Name: At_Guard_Cells_P Parameter: Organism Value: A. thaliana
  misc_feature: MA Experiment 20000495 PARAMETER Experiment Name: At_Guard_Cells_P Parameter: Tissue Value: Guard Cells vs. Leaves
  misc_feature: MA Experiment ID: 20001457 Result: Down-regulated in Transcription
  misc_feature: MA Experiment 20001457 PARAMETER Experiment Name: At_50mM_NH4NO3_L-to-H_P Parameter: Age (day) Value: Undefined
  misc_feature: MA Experiment 20001457 PARAMETER Experiment Name: At_50mM_NH4NO3_L-to-H_P Parameter: Organism Value: Undefined
  misc_feature: MA Experiment 20001457 PARAMETER Experiment Name: At_50mM_NH4NO3_L-to-H_P Parameter: Plant Line Value: Undefined
  misc_feature: MA Experiment 20001457 PARAMETER Experiment Name: At_50mM_NH4NO3_L-to-H_P Parameter: Timepoint (hr) Value: 0.5
  misc_feature: MA Experiment 20001457 PARAMETER Experiment Name: At_50mM_NH4NO3_L-to-H_P Parameter: Tissue Value: Siliques
  misc_feature: MA Experiment 20001457 PARAMETER Experiment Name: At_50mM_NH4NO3_L-to-H_P Parameter: Treatment Value: 50mM NH4NO3 vs. 100mM Manitol
  misc_feature: MA Experiment ID: 20001554 Result: Up-regulated in Transcription
  misc_feature: MA Experiment 20001554 PARAMETER Experiment Name: At_Drought_Soil_Dry_P Parameter: Age (day) Value: 21
  misc_feature: MA Experiment 20001554 PARAMETER Experiment Name: At_Drought_Soil_Dry_P Parameter: Organism Value: A. thaliana
  misc_feature: MA Experiment 20001554 PARAMETER Experiment Name: At_Drought_Soil_Dry_P Parameter: Plant Line Value: WS
  misc_feature: MA Experiment 20001554 PARAMETER Experiment Name: At_Drought_Soil_Dry_P Parameter: Post Timepoint (hr) Value: None
  misc_feature: MA Experiment 20001554 PARAMETER Experiment Name: At_Drought_Soil_Dry_P Parameter: Post-Treatment Value: None
  misc_feature: MA Experiment 20001554 PARAMETER Experiment Name: At_Drought_Soil_Dry_P Parameter: Timepoint (day) Value: 7
  misc_feature: MA Experiment 20001554 PARAMETER Experiment Name: At_Drought_Soil_Dry_P Parameter: Treatment Value: Drought vs. No Drought
  misc_feature: MA Experiment ID: 20001558 Result: Down-regulated in Transcription
  misc_feature: MA Experiment 20001558 PARAMETER Experiment Name: At_Drought_Soil_Dry_P Parameter: Age (day) Value: 27
  misc_feature: MA Experiment 20001558 PARAMETER Experiment Name: At_Drought_Soil_Dry_P Parameter: Organism Value: A. thaliana
  misc_feature: MA Experiment 20001558 PARAMETER Experiment Name: At_Drought_Soil_Dry_P Parameter: Plant Line Value: WS
  misc_feature: MA Experiment 20001558 PARAMETER Experiment Name: At_Drought_Soil_Dry_P Parameter: Post Timepoint (hr) Value: 6
  misc_feature: MA Experiment 20001558 PARAMETER Experiment Name: At_Drought_Soil_Dry_P Parameter: Post-Treatment Value: Re-Water vs. No Drought
  misc_feature: MA Experiment 20001558 PARAMETER Experiment Name: At_Drought_Soil_Dry_P Parameter: Timepoint (day) Value: 13
  misc_feature: MA Experiment 20001558 PARAMETER Experiment Name: At_Drought_Soil_Dry_P Parameter: Treatment Value: Drought vs. No Drought
  misc_feature: MA Experiment ID: 20001560 Result: Down-regulated in Transcription
  misc_feature: MA Experiment 20001560 PARAMETER Experiment Name: At_Drought_Soil_Dry_P Parameter: Age (day) Value: 28
  misc_feature: MA Experiment 20001560 PARAMETER Experiment Name: At_Drought_Soil_Dry_P Parameter: Organism Value: A. thaliana
  misc_feature: MA Experiment 20001560 PARAMETER Experiment Name: At_Drought_Soil_Dry_P Parameter: Plant Line Value: WS
  misc_feature: MA Experiment 20001560 PARAMETER Experiment Name: At_Drought_Soil_Dry_P Parameter: Post Timepoint (hr) Value: None
  misc_feature: MA Experiment 20001560 PARAMETER Experiment Name: At_Drought_Soil_Dry_P Parameter: Post-Treatment Value: None
  misc_feature: MA Experiment 20001560 PARAMETER Experiment Name: At_Drought_Soil_Dry_P Parameter: Timepoint (day) Value: 14
  misc_feature: MA Experiment 20001560 PARAMETER Experiment Name: At_Drought_Soil_Dry_P Parameter: Treatment Value: Drought vs. No Drought
  misc_feature: MA Experiment ID: 20001761 Result: Down-regulated in Transcription
  misc_feature: MA Experiment 20001761 PARAMETER Experiment Name: At_50mM_NH4NO3_L-to-H_P Parameter: Timepoint (hr) Value: 4
  misc_feature: MA Experiment 20001761 PARAMETER Experiment Name: At_50mM_NH4NO3_L-to-H_P Parameter: Tissue Value: Siliques
  misc_feature: MA Experiment 20001761 PARAMETER Experiment Name: At_50mM_NH4NO3_L-to-H_P Parameter: Treatment Value: 50mM NH4NO3 vs 100mM Mannitol
  misc_feature: MA Experiment ID: 20001906 Result: Up-regulated in Transcription
  misc_feature: MA Experiment 20001906 PARAMETER Experiment Name: At_Drought_Reproduction_P Parameter: Age (day) Value: 35
  misc_feature: MA Experiment 20001906 PARAMETER Experiment Name: At_Drought_Reproduction_P Parameter: Organism Value: A. thaliana
  misc_feature: MA Experiment 20001906 PARAMETER Experiment Name: At_Drought_Reproduction_P Parameter: Plant Line Value: WS
  misc_feature: MA Experiment 20001906 PARAMETER Experiment Name: At_Drought_Reproduction_P Parameter: Timepoint (day) Value: 5
  misc_feature: MA Experiment 20001906 PARAMETER Experiment Name: At_Drought_Reproduction_P Parameter: Tissue Value: Siliques
  misc_feature: MA Experiment 20001906 PARAMETER Experiment Name: At_Drought_Reproduction_P Parameter: Treatment Value: Drought vs. No Drought
  misc_feature: MA Experiment ID: 20001909 Result: Up-regulated in Transcription
  misc_feature: MA Experiment 20001909 PARAMETER Experiment Name: At_Drought_Reproduction_P Parameter: Age (day) Value: 35
  misc_feature: MA Experiment 20001909 PARAMETER Experiment Name: At_Drought_Reproduction_P Parameter: Organism Value: A. thaliana
  misc_feature: MA Experiment 20001909 PARAMETER Experiment Name: At_Drought_Reproduction_P Parameter: Plant Line Value: WS
  misc_feature: MA Experiment 20001909 PARAMETER Experiment Name: At_Drought_Reproduction_P Parameter: Timepoint (day) Value: 5
  misc_feature: MA Experiment 20001909 PARAMETER Experiment Name: At_Drought_Reproduction_P Parameter: Tissue Value: Flowers
  misc_feature: MA Experiment 20001909 PARAMETER Experiment Name: At_Drought_Reproduction_P Parameter: Treatment Value: Drought vs. No Drought
cctttcgtcttaaaccccacagcaaaaagccactctcctttctctctctctcttgttcctctgcatccatggccaccaagctcgacaccagtagcttacttttggccctcttgtccaaatgtagcctccttactcaaaccaatcttgctctctctctcctcgtagcctccctagcttctctcgctctttctctcttcttctggtctcatcccggaggacccgcatggggaaagtacttcctccaccgccgccgtcaaaccaccgtgatacccgggccaagaggcttaccttttgtcggaagcatgtctctcatgtcaaacactctggctcaccgttgcatagccgcaaccgcagagaaatttagagccgaacggttaatggcgtttagtttgggagaaactcgcgtgatcgtcacgtgcaatcctgatgtagctaaagagattctaaacagtccggttttcgctgaccgcccggttaaggaatcagcttattccctcatgtttaaccgtgctatcggtttcgctccttacggcgtttactggcgaaccttgagaaaaatcgcgtctaatcatcttttcagcccgaaacagattaaacgttccgaaacgcagagaagcgtgatcgcgaatcaaatcgtgaagtgtctcacaaaacagagtaacaccaaaggtctctgtttcgcacgtgacttgatcaaaacggcatcgcttaataacatgatgtgctctgttttcggaaaagaatacgagcttgaggaagagcatgaagaagtgagtgagctacgtgaattggtggaagaaggttatgatttactcggtacactgaattggaccgatcatctcccatggctctctgaatttgatcctcaaagaatccggtctagatgctctaatctcgtcccaaaagtaaaccggtttgtgaaccggattatctctgaccaccgtgaacaaactcgtgactcaccgagtgacttcgttgacgtattgctctctctcgatggtcctgataaattatccgaccctgatatcatcgccgttctatgggaaatgatattcagaggaactgacacggtggctgttttgatcgagtggattcttgctaggatggtccttcatccagatattcaatcgacggttcacaatgagcttgatcaaatcgtgggacgatcaagggctgtcgaagagtctgacgtggtgtctctagtatatctaacggctgtggtgaaagaagtcttgaggcttcacccgccaggcccactactctcatgggcccgtttagcaatcacagacacgatcatcgacggtcgtcgtgttccggcggggaccaccgcaatggtgaacatgtgggctattgcacacgatccacacgtgtgggagaatccgttggagtttaaacccgaacgttttgtagccaaggaaggtgaggttgagttctcggttcttgggtctgatttgaggcttgcaccgttcgggtccggtcgtcgggtttgccccgggaagaatcttggtttgaccaccgtgacgttttggactgcgacgcttttgcatgagtttgaatggctgacgccgtccgatgagaagaccgttgacttgtccgagaaactgaggctctcgtgtgagatggctaatcctcttgctgctaaattacgccccaggcgcagttttagtgtatgataaggctaaggctatacacagatacagtggtaactaaagcgaaggaaaattagtgtgaatttaaagcaaaagaataaaataaagaacaaagaaagtaaaggaaacaaaaaaaaagaatcatacaaaaaatactaataagaatggtaatgaagcttttatattaaactaacatcttgatacgtgttgtatatatgatgaaaacattaatgtcacaaagaaaagttaat

SEQ ID NO: 101345 - protein, 556 aa, Arabidopsis thaliana; identical to SEQ ID NO: 21313
  peptide (1)..(556): Ceres Seq. ID no. 13607623
  misc_feature (89)..(550): Pfam Name: Cytochrome P450 Pfam Description: Cytochrome P450
  misc_feature (23)..(556): Homolog of NCBI NO: 15228624 NR Description: cytochrome P450, putative [Arabidopsis thaliana]
  misc_feature (23)..(556): Homolog of NCBI NO: 21592543 NR Description: cytochrome p450 (CYP78A9) [Arabidopsis thaliana]
  misc_feature (23)..(553): Homolog of NCBI NO: 15226422 NR Description: cytochrome P450, putative [Arabidopsis thaliana]
  misc_feature (20)..(552): Homolog of NCBI NO: 6715638 NR Description: T25K16.18 [Arabidopsis thaliana]
  misc_feature (23)..(552): Homolog of NCBI NO: 15223341 NR Description: cytochrome P450, putative [Arabidopsis thaliana]

SEQ ID NO: 101346 - protein, 534 aa, Arabidopsis thaliana; identical to SEQ ID NO: 21314
  peptide (1)..(534): Ceres Seq. ID no. 13607624
  misc_feature (67)..(528): Pfam Name: Cytochrome P450 Pfam Description: Cytochrome P450
  misc_feature (1)..(534): Homolog of NCBI NO: 15228624 NR Description: cytochrome P450, putative [Arabidopsis thaliana]
  misc_feature (1)..(534): Homolog of NCBI NO: 21592543 NR Description: cytochrome p450 (CYP78A9) [Arabidopsis thaliana]
  misc_feature (1)..(531): Homolog of NCBI NO: 15226422 NR Description: cytochrome P450, putative [Arabidopsis thaliana]
  misc_feature (1)..(530): Homolog of NCBI NO: 6715638 NR Description: T25K16.18 [Arabidopsis thaliana]
  misc_feature (1)..(530): Homolog of NCBI NO: 15223341 NR Description: cytochrome P450, putative [Arabidopsis thaliana]

SEQ ID NO: 101347 - protein, 456 aa, Arabidopsis thaliana; identical to SEQ ID NO: 21315
  peptide (1)..(456): Ceres Seq. ID no. 13607625
  misc_feature (1)..(450): Pfam Name: Cytochrome P450 Pfam Description: Cytochrome P450
  misc_feature (1)..(456): Homolog of NCBI NO: 15228624 NR Description: cytochrome P450, putative [Arabidopsis thaliana]
  misc_feature (1)..(456): Homolog of NCBI NO: 21592543 NR Description: cytochrome p450 (CYP78A9) [Arabidopsis thaliana]
  misc_feature (1)..(453): Homolog of NCBI NO: 15226422 NR Description: cytochrome P450, putative [Arabidopsis thaliana]
  misc_feature (1)..(452): Homolog of NCBI NO: 6715638 NR Description: T25K16.18 [Arabidopsis thaliana]
  misc_feature (1)..(452): Homolog of NCBI NO: 15223341 NR Description: cytochrome P450, putative [Arabidopsis thaliana]

SEQ ID NO: 101348 - DNA, 1249 bp, Arabidopsis thaliana
  misc_feature (1)..(1249): Ceres Seq. ID no. 13607626
  misc_feature: MA Experiment ID: 108573 Result: Down-regulated in Transcription
  misc_feature: MA Experiment 108573 PARAMETER Experiment Name: At_Drought_cDNA_P Parameter: Timepoint (hr) Value: 6
  misc_feature: MA Experiment 108573 PARAMETER Experiment Name: At_Drought_cDNA_P Parameter: Tissue Value: Aerial
  misc_feature: MA Experiment 108573 PARAMETER Experiment Name: At_Drought_cDNA_P Parameter: Treatment Value: Drought vs. No Drought
  misc_feature: MA Experiment ID: 108668 Result: Down-regulated in Transcription
  misc_feature: MA Experiment 108668 PARAMETER Experiment Name: At_2mM_SA_cDNA_P Parameter: Plant Line Value: WS
  misc_feature: MA Experiment 108668 PARAMETER Experiment Name: At_2mM_SA_cDNA_P Parameter: Timepoint (hr) Value: 6
  misc_feature: MA Experiment 108668 PARAMETER Experiment Name: At_2mM_SA_cDNA_P Parameter: Treatment Value: 2mM SA vs. No Treatment
  misc_feature: MA Experiment ID: 20000173 Result: Down-regulated in Transcription
  misc_feature: MA Experiment 20000173 PARAMETER Experiment Name: At_42deg_Heat_P Parameter: Age (day) Value: 14
  misc_feature: MA Experiment 20000173 PARAMETER Experiment Name: At_42deg_Heat_P Parameter: Organism Value: A. thaliana
  misc_feature: MA Experiment 20000173 PARAMETER Experiment Name: At_42deg_Heat_P Parameter: Plant Line Value: WS
  misc_feature: MA Experiment 20000173 PARAMETER Experiment Name: At_42deg_Heat_P Parameter: Temperature (deg C) Value: 42 vs. 22
  misc_feature: MA Experiment 20000173 PARAMETER Experiment Name: At_42deg_Heat_P Parameter: Timepoint (hr) Value: 6
  misc_feature: MA Experiment 20000173 PARAMETER Experiment Name: At_42deg_Heat_P Parameter: Tissue Value: Aerial
  misc_feature: MA Experiment ID: 20000235 Result: Up-regulated in Transcription
  misc_feature: MA Experiment 20000235 PARAMETER Experiment Name: At_Siliques_P Parameter: Age (day) Value: 21
  misc_feature: MA Experiment 20000235 PARAMETER Experiment Name: At_Siliques_P Parameter: Organism Value: A. thaliana
  misc_feature: MA Experiment 20000235 PARAMETER Experiment Name: At_Siliques_P Parameter: Plant Line Value: WS
  misc_feature: MA Experiment 20000235 PARAMETER Experiment Name: At_Siliques_P Parameter: Tissue Value: 5-10mm Siliques vs. Whole Plant
  misc_feature: MA Experiment ID: 20000264 Result: Up-regulated in Transcription
  misc_feature: MA Experiment 20000264 PARAMETER Experiment Name: At_Open_Flower_P Parameter: Age (day) Value: 21
  misc_feature: MA Experiment 20000264 PARAMETER Experiment Name: At_Open_Flower_P Parameter: Plant Line Value: WS
  misc_feature: MA Experiment 20000264 PARAMETER Experiment Name: At_Open_Flower_P Parameter: Tissue Value: Open Flower vs. Whole Plant
  misc_feature: MA Experiment ID: 20000265 Result: Up-regulated in Transcription
  misc_feature: MA Experiment 20000265 PARAMETER Experiment Name: At_Open_Flower_P Parameter: Age (day) Value: 21
  misc_feature: MA Experiment 20000265 PARAMETER Experiment Name: At_Open_Flower_P Parameter: Plant Line Value: WS
  misc_feature: MA Experiment 20000265 PARAMETER Experiment Name: At_Open_Flower_P Parameter: Tissue Value: Closed Flower vs. Whole Plant
  misc_feature: MA Experiment ID: 20000495 Result: Up-regulated in Transcription
  misc_feature: MA Experiment 20000495 PARAMETER Experiment Name: At_Guard_Cells_P Parameter: Harvest Date Value: 8/2/2002
  misc_feature: MA Experiment 20000495 PARAMETER Experiment Name: At_Guard_Cells_P Parameter: Organism Value: A. thaliana
  misc_feature: MA Experiment 20000495 PARAMETER Experiment Name: At_Guard_Cells_P Parameter: Tissue Value: Guard Cells vs. Leaves
  misc_feature: MA Experiment ID: 20001248 Result: Down-regulated in Transcription
  misc_feature: MA Experiment 20001248 PARAMETER Experiment Name: At_Far-red-induction_P Parameter: Age (day) Value: 7
  misc_feature: MA Experiment 20001248 PARAMETER Experiment Name: At_Far-red-induction_P Parameter: Light Value: Far-red vs. White
  misc_feature: MA Experiment 20001248 PARAMETER Experiment Name: At_Far-red-induction_P Parameter: Organism Value: A. thaliana
  misc_feature: MA Experiment 20001248 PARAMETER Experiment Name: At_Far-red-induction_P Parameter: Plant Line Value: Columbia
  misc_feature: MA Experiment 20001248 PARAMETER Experiment Name: At_Far-red-induction_P Parameter: Timepoint (hr) Value: 4
  misc_feature: MA Experiment 20001248 PARAMETER Experiment Name: At_Far-red-induction_P Parameter: Tissue Value: Whole Plant
aaactaacccacagtagaactaaattacacttctctttcaatcatttgcgtctcaccggctaatctcattcctctgtcatttttacagttcttcgatcgaaaaccggatgtgagaagcctcgaggttcaaggatttgcagaggctcaaagctttgctttcaaagaaaaagaggaagaaagcttacaagatacagttccatttctacagatgctgcaaagtgaagacccctcatcgtttttttcaatcaaagagccaaactttctgacgctactgtctcttcaaaccctcaaggagccttgggaactcgaaagatatctttcacttgaggattcacaatttcattcaccggtccaatctgagaccaaccgcttcatggaaggagccaatcaagctgtgtcaagccaagaaattccctttagccaagcaaacatgacactcccttcttctacctcatcaccactcagtgcacattcaagacgaaagcgcaaaatcaaccacttgctgcctcaagaaatgactagagaaaagagaaagaggaggaaaacaaaaccaagtaaaaacaatgaagagattgagaatcaaagaataaaccacattgctgttgaacgaaacagaagacgtcaaatgaacgaacatatcaactctctccgggcccttctcccaccttcctacatccaacgaggagaccaagcttccatagtaggaggagcaataaactacgtgaaggtcctcgagcaaatcatacaatctctcgaatcgcaaaagagaacgcaacaacaaagtaacagtgaggtagtagaaaacgcacttaatcatctctcaggcatttcgtcgaacgacctgtggacaactcttgaagatcaaacttgtatccccaaaatcgaagctacagtgatacaaaaccatgtcagccttaaagttcaatgtgagaagaaacaaggacaacttctcaaaggaatcatatcacttgaaaagcttaaactcactgttcttcatctcaatatcactacttcgtctcattcctctgtttcttattccttcaacctcaagatggaagatgagtgcgacttagagtcagccgacgagattacggcggctgttcatcggattttcgatattccgacaatttgattaaacacatataattccaaaaatattaacagctgacaaaatggtatcttttttttttttcctacttgtaccaattttttaagaattaagagaataaaaaaatttcgtttttcgttc

SEQ ID NO: 101349 - protein, 307 aa, Arabidopsis thaliana; identical to SEQ ID NO: 39873
  peptide (1)..(307): Ceres Seq. ID no. 13607627
  misc_feature (125)..(176): Pfam Name: Helix-loop-helix DNA-binding domain Pfam Description: Helix-loop-helix DNA-binding domain
  misc_feature (1)..(307): Homolog of NCBI NO: 18412203 NR Description: bHLH protein family [Arabidopsis thaliana]
  misc_feature (1)..(307): Homolog of NCBI NO: 11282339 NR Description: hypothetical protein F21F14.120 - Arabidopsis >gi|6899893|emb|CAB71902.1| putative protein [Arabidopsis
  misc_feature (1)..(307): Homolog of NCBI NO: 21618009 NR Description: unknown [Arabidopsis thaliana]
  misc_feature (1)..(307): Homolog of NCBI NO: 30695519 NR Description: bHLH protein family [Arabidopsis thaliana] putative bHLH transcription factor bHLH067 [Arabidopsis thaliana]
  misc_feature (1)..(303): Homolog of NCBI NO: 15226442 NR Description: bHLH protein family [Arabidopsis thaliana]
  misc_feature (45)..(303): Homolog of NCBI NO: 15234187 NR Description: bHLH protein family [Arabidopsis thaliana]
  misc_feature (222)..(303): Homolog of NCBI NO: 37533680 NR Description: putative helix-loop-helix DNA-binding protein
  misc_feature (107)..(186): Homolog of NCBI NO: 37533680 NR Description: putative helix-loop-helix DNA-binding protein
  misc_feature (107)..(194): Homolog of NCBI NO: 34902426 NR Description: Unknown protein [Oryza sativa (japonica
  misc_feature (222)..(301): Homolog of NCBI NO: 34902426 NR Description: Unknown protein [Oryza sativa (japonica

SEQ ID NO: 101350 - protein, 252 aa, Arabidopsis thaliana; identical to SEQ ID NO: 39874
  peptide (1)..(252): Ceres Seq. ID no. 13607628
  misc_feature (70)..(121): Pfam Name: Helix-loop-helix DNA-binding domain Pfam Description: Helix-loop-helix DNA-binding domain
  misc_feature (1)..(252): Homolog of NCBI NO: 18412203 NR Description: bHLH protein family [Arabidopsis thaliana]
  misc_feature (1)..(252): Homolog of NCBI NO: 11282339 NR Description: hypothetical protein F21F14.120 - Arabidopsis >gi|6899893|emb|CAB71902.1| putative protein [Arabidopsis
  misc_feature (1)..(252): Homolog of NCBI NO: 21618009 NR Description: unknown [Arabidopsis thaliana]
  misc_feature (1)..(252): Homolog of NCBI NO: 30695519 NR Description: bHLH protein family [Arabidopsis thaliana] putative bHLH transcription factor bHLH067 [Arabidopsis thaliana]
  misc_feature (1)..(248): Homolog of NCBI NO: 15226442 NR Description: bHLH protein family [Arabidopsis thaliana]
  misc_feature (1)..(248): Homolog of NCBI NO: 15234187 NR Description: bHLH protein family [Arabidopsis thaliana]
  misc_feature (167)..(248): Homolog of NCBI NO: 37533680 NR Description: putative helix-loop-helix DNA-binding protein
  misc_feature (52)..(131): Homolog of NCBI NO: 37533680 NR Description: putative helix-loop-helix DNA-binding protein
  misc_feature (52)..(139): Homolog of NCBI NO: 34902426 NR Description: Unknown protein [Oryza sativa (japonica
  misc_feature (167)..(246): Homolog of NCBI NO: 34902426 NR Description: Unknown protein [Oryza sativa (japonica

SEQ ID NO: 101351 - protein, 233 aa, Arabidopsis thaliana; identical to SEQ ID NO: 39875
  peptide (1)..(233): Ceres Seq. ID no. 13607629
  misc_feature (51)..(102): Pfam Name: Helix-loop-helix DNA-binding domain Pfam Description: Helix-loop-helix DNA-binding domain
  misc_feature (1)..(233): Homolog of NCBI NO: 18412203 NR Description: bHLH protein family [Arabidopsis thaliana]
  misc_feature (1)..(233): Homolog of NCBI NO: 11282339 NR Description: hypothetical protein F21F14.120 - Arabidopsis >gi|6899893|emb|CAB71902.1| putative protein [Arabidopsis
  misc_feature (1)..(233): Homolog of NCBI NO: 21618009 NR Description: unknown [Arabidopsis thaliana]
  misc_feature (1)..(233): Homolog of NCBI NO: 30695519 NR Description: bHLH protein family [Arabidopsis thaliana] putative bHLH transcription factor bHLH067 [Arabidopsis thaliana]
  misc_feature (1)..(229): Homolog of NCBI NO: 15226442 NR Description: bHLH protein family [Arabidopsis thaliana]
  misc_feature (1)..(229): Homolog of NCBI NO: 15234187 NR Description: bHLH protein family [Arabidopsis thaliana]
  misc_feature (148)..(229): Homolog of NCBI NO: 37533680 NR Description: putative helix-loop-helix DNA-binding protein
  misc_feature (33)..(112): Homolog of NCBI NO: 37533680 NR Description: putative helix-loop-helix DNA-binding protein
  misc_feature (33)..(120): Homolog of NCBI NO: 34902426 NR Description: Unknown protein [Oryza sativa (japonica
  misc_feature (148)..(227): Homolog of NCBI NO: 34902426 NR Description: Unknown protein [Oryza sativa (japonica

SEQ ID NO: 101352 - DNA, 2211 bp, Arabidopsis thaliana
  misc_feature (1)..(2211): Ceres Seq. ID no. 13607633
  misc_feature: MA Experiment ID: 108489 Result: Up-regulated in Transcription
  misc_feature: MA Experiment ID: 20000185 Result: Down-regulated in Transcription
  misc_feature: MA Experiment 20000185 PARAMETER Experiment Name: At_Roots__P Parameter: Age (day) Value: 7 vs. 21
  misc_feature: MA Experiment 20000185 PARAMETER Experiment Name: At_Roots__P Parameter: Organism Value: A. thaliana
  misc_feature: MA Experiment 20000185 PARAMETER Experiment Name: At_Roots__P Parameter: Tissue Value: Roots vs. Whole Plant
  misc_feature: MA Experiment ID: 20000234 Result: Up-regulated in Transcription
  misc_feature: MA Experiment 20000234 PARAMETER Experiment Name: At_Siliques_P Parameter: Age (day) Value: 21
  misc_feature: MA Experiment 20000234 PARAMETER Experiment Name: At_Siliques_P Parameter: Organism Value: A. thaliana
  misc_feature: MA Experiment 20000234 PARAMETER Experiment Name: At_Siliques_P Parameter: Plant Line Value: WS
  misc_feature: MA Experiment 20000234 PARAMETER Experiment Name: At_Siliques_P Parameter: Tissue Value: Less Than 5mm Siliques vs. Whole Plant
  misc_feature: MA Experiment ID: 20000235 Result: Up-regulated in Transcription
  misc_feature: MA Experiment 20000235 PARAMETER Experiment Name: At_Siliques_P Parameter: Age (day) Value: 21
  misc_feature: MA Experiment 20000235 PARAMETER Experiment Name: At_Siliques_P Parameter: Organism Value: A. thaliana
  misc_feature: MA Experiment 20000235 PARAMETER Experiment Name: At_Siliques_P Parameter: Plant Line Value: WS
  misc_feature: MA Experiment 20000235 PARAMETER Experiment Name: At_Siliques_P Parameter: Tissue Value: 5-10mm Siliques vs. Whole Plant
  misc_feature: MA Experiment ID: 20000264 Result: Up-regulated in Transcription
  misc_feature: MA Experiment 20000264 PARAMETER Experiment Name: At_Open_Flower_P Parameter: Age (day) Value: 21
  misc_feature: MA Experiment 20000264 PARAMETER Experiment Name: At_Open_Flower_P Parameter: Plant Line Value: WS
  misc_feature: MA Experiment 20000264 PARAMETER Experiment Name: At_Open_Flower_P Parameter: Tissue Value: Open Flower vs. Whole Plant
  misc_feature: MA Experiment ID: 20000265 Result: Up-regulated in Transcription
  misc_feature: MA Experiment 20000265 PARAMETER Experiment Name: At_Open_Flower_P Parameter: Age (day) Value: 21
  misc_feature: MA Experiment 20000265 PARAMETER Experiment Name: At_Open_Flower_P Parameter: Plant Line Value: WS
  misc_feature: MA Experiment 20000265 PARAMETER Experiment Name: At_Open_Flower_P Parameter: Tissue Value: Closed Flower vs. Whole Plant
  misc_feature: MA Experiment ID: 20000286 Result: Up-regulated in Transcription
  misc_feature: MA Experiment 20000286 PARAMETER Experiment Name: At_Open_Flower_P Parameter: Age (day) Value: 21
  misc_feature: MA Experiment 20000286 PARAMETER Experiment Name: At_Open_Flower_P Parameter: Plant Line Value: WS
  misc_feature: MA Experiment 20000286 PARAMETER Experiment Name: At_Open_Flower_P Parameter: Tissue Value: Half Open vs. Whole Plant
  misc_feature: MA Experiment ID: 20000438 Result: Down-regulated in Transcription
  misc_feature: MA Experiment 20000438 PARAMETER Experiment Name: At_Shoots__P Parameter: Age (day) Value: 14
  misc_feature: MA Experiment 20000438 PARAMETER Experiment Name: At_Shoots__P Parameter: Tissue Value: Shoots vs. Whole Plant
  misc_feature: MA Experiment ID: 20000439 Result: Down-regulated in Transcription
  misc_feature: MA Experiment 20000439 PARAMETER Experiment Name: At_Roots__P Parameter: Age (day) Value: 14 vs. 21
  misc_feature: MA Experiment 20000439 PARAMETER Experiment Name: At_Roots__P Parameter: Organism Value: A. thaliana
  misc_feature: MA Experiment 20000439 PARAMETER Experiment Name: At_Roots__P Parameter: Tissue Value: Roots vs. Whole Plant
  misc_feature: MA Experiment ID: 20001757 Result: Down-regulated in Transcription
  misc_feature: MA Experiment 20001757 PARAMETER Experiment Name: At_50mM_NH4NO3_L-to-H_P Parameter: Timepoint (hr) Value: 6
  misc_feature: MA Experiment 20001757 PARAMETER Experiment Name: At_50mM_NH4NO3_L-to-H_P Parameter: Tissue Value: Leaf
  misc_feature: MA Experiment 20001757 PARAMETER Experiment Name: At_50mM_NH4NO3_L-to-H_P Parameter: Treatment Value: 50mM NH4NO3 vs 100mM Mannitol
  misc_feature: MA Experiment ID: 20001768 Result: Up-regulated in Transcription
  misc_feature: MA Experiment 20001768 PARAMETER Experiment Name: At_Far-red-enriched-adult_P Parameter: Age (day) Value: 28
  misc_feature: MA Experiment 20001768 PARAMETER Experiment Name: At_Far-red-enriched-adult_P Parameter: Light Value: Far-red enriched vs. White
  misc_feature: MA Experiment 20001768 PARAMETER Experiment Name: At_Far-red-enriched-adult_P Parameter: Organism Value: A. thaliana
  misc_feature: MA Experiment 20001768 PARAMETER Experiment Name: At_Far-red-enriched-adult_P Parameter: Plant Line Value: Columbia
  misc_feature: MA Experiment 20001768 PARAMETER Experiment Name: At_Far-red-enriched-adult_P Parameter: Timepoint (hr) Value: 1
  misc_feature: MA Experiment 20001768 PARAMETER Experiment Name: At_Far-red-enriched-adult_P Parameter: Tissue Value: Aerial
  misc_feature: MA Experiment ID: 20001909 Result: Up-regulated in Transcription
  misc_feature: MA Experiment 20001909 PARAMETER Experiment Name: At_Drought_Reproduction_P Parameter: Age (day) Value: 35
  misc_feature: MA Experiment 20001909 PARAMETER Experiment Name: At_Drought_Reproduction_P Parameter: Organism Value: A. thaliana
  misc_feature: MA Experiment 20001909 PARAMETER Experiment Name: At_Drought_Reproduction_P Parameter: Plant Line Value: WS
  misc_feature: MA Experiment 20001909 PARAMETER Experiment Name: At_Drought_Reproduction_P Parameter: Timepoint (day) Value: 5
  misc_feature: MA Experiment 20001909 PARAMETER Experiment Name: At_Drought_Reproduction_P Parameter: Tissue Value: Flowers
  misc_feature: MA Experiment 20001909 PARAMETER Experiment Name: At_Drought_Reproduction_P Parameter: Treatment Value: Drought vs. No Drought
  misc_feature: MA Experiment ID: 20001910 Result: Up-regulated in Transcription
  misc_feature: MA Experiment 20001910 PARAMETER Experiment Name: At_Drought_Reproduction_P Parameter: Age (day) Value: 37
  misc_feature: MA Experiment 20001910 PARAMETER Experiment Name: At_Drought_Reproduction_P Parameter: Organism Value: A. thaliana
  misc_feature: MA Experiment 20001910 PARAMETER Experiment Name: At_Drought_Reproduction_P Parameter: Plant Line Value: WS
  misc_feature: MA Experiment 20001910 PARAMETER Experiment Name: At_Drought_Reproduction_P Parameter: Timepoint (day) Value: 7
  misc_feature: MA Experiment 20001910 PARAMETER Experiment Name: At_Drought_Reproduction_P Parameter: Tissue Value: Flowers
  misc_feature: MA Experiment 20001910 PARAMETER Experiment Name: At_Drought_Reproduction_P Parameter: Treatment Value: Drought vs. No Drought
accagccccattaataaaccaccgggctctgtttcaataaaaaaaatcccctccctctcatatttacctcccgaataaaaccggagggagagaaaaaacataaaaagcaaaaaaaaaggtaaaatcaaaaaggggaaaaatatataacaacaaaaaaaaaaagttagaaaaaatggcagtaggaaaggttgtggtatctgtggcatcactcctcctagtggtgggtgttgccataggagttatcacgttcgttaataaaggaggcggcgccaatggcgacagtaatggtcccataaactctcatcagaaagcggttcagacaatttgccagtcaaccacagaccaaggttcgtgcgcgaaaacactcgacccagtcaaaagtgatgatccaagcaagcttgtcaaagccttcctgatggctactaaagacgcgatcacaaaatcctcaaacttcacggcttcgaccgaaggaggtatgggtactaacatgaacgcgaccagcaaagccgttcttgattactgcaagagagtattgatgtacgctcttgaggatcttgagaccattgttgaagagatgggtgaggatcttcagcagagtggaactaagcttgaccagctcaaacaatggttaactggagttttcaactaccaaaccgattgtcttgacgacatcgaggaagttgagctaaagaagatcatgggtgaaggaatctctaactccaaggttttgaccagtaacgctatcgatatcttccattccgttgttaccgcgatggcccaaatgggtgtcaaagtcgacgatatgaagaacataaccatgggagccggagccggtggagctgcacgtcgccttcttgaagacaacgactctaagggactccccaaatggttttctggtaaagacaggaagcttatggctaaggccggacgtggcgctccagctggcggtgatgatggtatcggtgaaggcggtggtggtggcggtaagatcaaggcgactcatgtagtggctaaggatggaagtggacagtttaagaccatttctgaggcggttatggcttgcccggataaaaaccctggaaggtgcattatccatatcaaggctggtatctacaatgaacaagtcagaatccctaagaagaagaacaacattttcatgttcggtgatggtgctacacaaaccatcattacctttgacagaagtgttaaacttagcccaggaaccactacttcactcagtggcaccgttcaggtcgaatctgagggattcatggcgaaatggattgggtttaagaacactgctggtccattgggacaccaagcggtcgcactccgtgtgaacggagaccgtgcggtcatattcaactgtagattcgacggttaccaagacacactctacgtcaacaacggacgtcaattctacaggaacattgttgtatccggtacagtggatttcatcttcggaaaatccgcaactgtgatccaaaactctctcatcctcgtccgaaagggaagccccggacaatccaactacgttacggctgacggtaatgaaaagggtgcagcgatgaagatcggtatcgtcctccataactgccgtatcataccggacaaggagctcgaagctgacaagctaaccatcaaatcgtacctaggaaggccgtggaagaagtttgccacgactgtgattattggaactgagattggtgatttgattaaaccagaaggatggaccgaatggcaaggagaacaaaaccacaagactgctaaatacattgagttcaataaccgtggaccgggagctgccactactcagaggcctccttgggttaaggtggctaagtctgcggctgaggttgaaacttacaccgtggctaactgggttggtccagctaactggatccaagaagccaacgtgcccgtccaactaggattgtaagaggacaacacaaaaaagttaagaataaaacagtatgtgataatgttaaggtaacgatacgacgtcgtctctggggatcagaactcttttttggatactatatacaaagatagggttctagacgtgttgagatgatgtttgtataagattgctttcgtttcacgtgcaaaagaggaaaaaaaattgttttgttattttttttgtagtacaaataattaatttttttttatcacatgttgtatccttaagaaaattgatacacaaaatatttt

SEQ ID NO: 101353 - protein, 588 aa, Arabidopsis thaliana; identical to SEQ ID NO: 40064
  peptide (1)..(588): Ceres Seq. ID no. 13607634
  misc_feature (276)..(574): Pfam Name: Pectinesterase Pfam Description: Pectinesterase
  misc_feature (1)..(588): Homolog of NCBI NO: 15228697 NR Description: pollen-specific pectin esterase, putative
  misc_feature (1)..(588): Homolog of NCBI NO: 1172538 NR Description: Probable pectinesterase precursor (Pectin
  misc_feature (14)..(588): Homolog of NCBI NO: 6093741 NR Description: Pectinesterase (Pectin methylesterase) (PE)
  misc_feature (3)..(588): Homolog of NCBI NO: 15226490 NR Description: pectinesterase family [Arabidopsis thaliana]
  misc_feature (3)..(588): Homolog of NCBI NO: 25313437 NR Description: pectinesterase (EC 3.1.1.11) [imported] - thaliana >gi|6093122|emb|CAB58974.1| pectin methylesterase
  misc_feature (3)..(588): Homolog of NCBI NO: 15226482 NR Description: pectinesterase family [Arabidopsis thaliana]
  misc_feature (3)..(588): Homolog of NCBI NO: 25313439 NR Description: pectinesterase (EC 3.1.1.11) precursor,
  misc_feature (3)..(470): Homolog of NCBI NO: 23197964 NR Description: putative pectinesterase [Arabidopsis thaliana]
  misc_feature (1)..(252): Homolog of NCBI NO: 7488527 NR Description: pectin esterase homolog, pollen-specific - turnip
  misc_feature (278)..(587): Homolog of NCBI NO: 21740906 NR Description: OSJNBa0036B21.20 [Oryza sativa (japonica

SEQ ID NO: 101354 - protein, 507 aa, Arabidopsis thaliana; identical to SEQ ID NO: 40065
  peptide (1)..(507): Ceres Seq. ID no. 13607635
  misc_feature (195)..(493): Pfam Name: Pectinesterase Pfam Description: Pectinesterase
  misc_feature (1)..(507): Homolog of NCBI NO: 15228697 NR Description: pollen-specific pectin esterase, putative
  misc_feature (1)..(507): Homolog of NCBI NO: 1172538 NR Description: Probable pectinesterase precursor (Pectin
  misc_feature (1)..(507): Homolog of NCBI NO: 6093741 NR Description: Pectinesterase (Pectin methylesterase) (PE)
  misc_feature (1)..(507): Homolog of NCBI NO: 15226490 NR Description: pectinesterase family [Arabidopsis thaliana]
  misc_feature (1)..(507): Homolog of NCBI NO: 25313437 NR Description: pectinesterase (EC 3.1.1.11) [imported] - thaliana >gi|6093122|emb|CAB58974.1| pectin methylesterase
  misc_feature (1)..(507): Homolog of NCBI NO: 15226482 NR Description: pectinesterase family [Arabidopsis thaliana]
  misc_feature (1)..(507): Homolog of NCBI NO: 25313439 NR Description: pectinesterase (EC 3.1.1.11) precursor,
  misc_feature (1)..(389): Homolog of NCBI NO: 23197964 NR Description: putative pectinesterase [Arabidopsis thaliana]
  misc_feature (1)..(171): Homolog of NCBI NO: 7488527 NR Description: pectin esterase homolog, pollen-specific - turnip
  misc_feature (197)..(506): Homolog of NCBI NO: 21740906 NR Description: OSJNBa0036B21.20 [Oryza sativa (japonica

SEQ ID NO: 101355 - protein, 487 aa, Arabidopsis thaliana; identical to SEQ ID NO: 40066
  peptide (1)..(487): Ceres Seq. ID no. 13607636
  misc_feature (175)..(473): Pfam Name: Pectinesterase Pfam Description: Pectinesterase
  misc_feature (1)..(487): Homolog of NCBI NO: 15228697 NR Description: pollen-specific pectin esterase, putative
  misc_feature (1)..(487): Homolog of NCBI NO: 1172538 NR Description: Probable pectinesterase precursor (Pectin
  misc_feature (1)..(487): Homolog of NCBI NO: 6093741 NR Description: Pectinesterase (Pectin methylesterase) (PE)
  misc_feature (1)..(487): Homolog of NCBI NO: 15226490 NR Description: pectinesterase family [Arabidopsis thaliana]
  misc_feature (1)..(487): Homolog of NCBI NO: 25313437 NR Description: pectinesterase (EC 3.1.1.11) [imported] - thaliana >gi|6093122|emb|CAB58974.1| pectin methylesterase
  misc_feature (1)..(487): Homolog of NCBI NO: 15226482 NR Description: pectinesterase family [Arabidopsis thaliana]
  misc_feature (1)..(487): Homolog of NCBI NO: 25313439 NR Description: pectinesterase (EC 3.1.1.11) precursor,
  misc_feature (1)..(369): Homolog of NCBI NO: 23197964 NR Description: putative pectinesterase [Arabidopsis thaliana]
  misc_feature (1)..(151): Homolog of NCBI NO: 7488527 NR Description: pectin esterase homolog, pollen-specific - turnip
  misc_feature (177)..(486): Homolog of NCBI NO: 21740906 NR Description: OSJNBa0036B21.20 [Oryza sativa (japonica

SEQ ID NO: 101356 - DNA, 850 bp, Arabidopsis thaliana
  misc_feature (1)..(850): Ceres Seq. ID no. 13607637
  misc_feature: MA Experiment ID: 108462 Result: Up-regulated in Transcription
  misc_feature: MA Experiment 108462 PARAMETER Experiment Name: At_Germinating_Seeds_cDNA_P Parameter: Age (day) Value: 2 vs. 0
  misc_feature: MA Experiment 108462 PARAMETER Experiment Name: At_Germinating_Seeds_cDNA_P Parameter: Tissue Value: Germinating Seeds
  misc_feature: MA Experiment ID: 108464 Result: Up-regulated in Transcription
  misc_feature: MA Experiment 108464 PARAMETER Experiment Name: At_Germinating_Seeds_cDNA_P Parameter: Age (day) Value: 4 vs. 0
  misc_feature: MA Experiment 108464 PARAMETER Experiment Name: At_Germinating_Seeds_cDNA_P Parameter: Tissue Value: Germinating Seeds
  misc_feature: MA Experiment ID: 108569 Result: Up-regulated in Transcription
  misc_feature: MA Experiment 108569 PARAMETER Experiment Name: At_0.001%_MeJA__cDNA_P Parameter: Timepoint (hr) Value: 6
  misc_feature: MA Experiment 108569 PARAMETER Experiment Name: At_0.001%_MeJA__cDNA_P Parameter: Tissue Value: Aerial
  misc_feature: MA Experiment 108569 PARAMETER Experiment Name: At_0.001%_MeJA__cDNA_P Parameter: Treatment Value: 0.001% MeJA vs. No Treatment
  misc_feature: MA Experiment ID: 108573 Result: Up-regulated in Transcription
  misc_feature: MA Experiment 108573 PARAMETER Experiment Name: At_Drought_cDNA_P Parameter: Timepoint (hr) Value: 6
  misc_feature: MA Experiment 108573 PARAMETER Experiment Name: At_Drought_cDNA_P Parameter: Tissue Value: Aerial
  misc_feature: MA Experiment 108573 PARAMETER Experiment Name: At_Drought_cDNA_P Parameter: Treatment Value: Drought vs. No Drought
  misc_feature: MA Experiment ID: 20000111 Result: Up-regulated in Transcription
  misc_feature: MA Experiment 20000111 PARAMETER Experiment Name: At_42deg_Heat_cDNA_P Parameter: Temperature (deg C) Value: 42 vs. 22
  misc_feature: MA Experiment 20000111 PARAMETER Experiment Name: At_42deg_Heat_cDNA_P Parameter: Timepoint (hr) Value: 6
  misc_feature: MA Experiment 20000111 PARAMETER Experiment Name: At_42deg_Heat_cDNA_P Parameter: Tissue Value: Aerial
  misc_feature: MA Experiment ID: 20000112 Result: Up-regulated in Transcription
  misc_feature: MA Experiment 20000112 PARAMETER Experiment Name: At_42deg_Heat_cDNA_P Parameter: Temperature (deg C) Value: 42 vs. 22
  misc_feature: MA Experiment 20000112 PARAMETER Experiment Name: At_42deg_Heat_cDNA_P Parameter: Timepoint (hr) Value: 2
  misc_feature: MA Experiment 20000112 PARAMETER Experiment Name: At_42deg_Heat_cDNA_P Parameter: Tissue Value: Aerial
  misc_feature: MA Experiment ID: 20000113 Result: Up-regulated in Transcription
  misc_feature: MA Experiment 20000113 PARAMETER Experiment Name: At_42deg_Heat_cDNA_P Parameter: Temperature (deg C) Value: 42 vs. 22
  misc_feature: MA Experiment 20000113 PARAMETER Experiment Name: At_42deg_Heat_cDNA_P Parameter: Timepoint (hr) Value: 8
  misc_feature: MA Experiment 20000113 PARAMETER Experiment Name: At_42deg_Heat_cDNA_P Parameter: Tissue Value: Aerial
  misc_feature: MA Experiment ID: 20000224 Result: Down-regulated in Transcription
  misc_feature: MA Experiment ID: 20000234 Result: Down-regulated in Transcription
  misc_feature: MA Experiment 20000234 PARAMETER Experiment Name: At_Siliques_P Parameter: Age (day) Value: 21
  misc_feature: MA Experiment 20000234 PARAMETER Experiment Name: At_Siliques_P Parameter: Organism Value: A. thaliana
  misc_feature: MA Experiment 20000234 PARAMETER Experiment Name: At_Siliques_P Parameter: Plant Line Value: WS
  misc_feature: MA Experiment 20000234 PARAMETER Experiment Name: At_Siliques_P Parameter: Tissue Value: Less Than 5mm Siliques vs. Whole Plant
  misc_feature: MA Experiment ID: 20000264 Result: Down-regulated in Transcription
  misc_feature: MA Experiment 20000264 PARAMETER Experiment Name: At_Open_Flower_P Parameter: Age (day) Value: 21
  misc_feature: MA Experiment 20000264 PARAMETER Experiment Name: At_Open_Flower_P Parameter: Plant Line Value: WS
  misc_feature: MA Experiment 20000264 PARAMETER Experiment Name: At_Open_Flower_P Parameter: Tissue Value: Open Flower vs. Whole Plant
  misc_feature: MA Experiment ID: 20000265 Result: Down-regulated in Transcription
  misc_feature: MA Experiment 20000265 PARAMETER Experiment Name: At_Open_Flower_P Parameter: Age (day) Value: 21
  misc_feature: MA Experiment 20000265 PARAMETER Experiment Name: At_Open_Flower_P Parameter: Plant Line Value: WS
  misc_feature: MA Experiment 20000265 PARAMETER Experiment Name: At_Open_Flower_P Parameter: Tissue Value: Closed Flower vs. Whole Plant
  misc_feature: MA Experiment ID: 20000286 Result: Down-regulated in Transcription
  misc_feature: MA Experiment 20000286 PARAMETER Experiment Name: At_Open_Flower_P Parameter: Age (day) Value: 21
  misc_feature: MA Experiment 20000286 PARAMETER Experiment Name: At_Open_Flower_P Parameter: Plant Line Value: WS
  misc_feature: MA Experiment 20000286 PARAMETER Experiment Name: At_Open_Flower_P Parameter: Tissue Value: Half Open vs. Whole Plant
  misc_feature: MA Experiment ID: 20000794 Result: Down-regulated in Transcription
  misc_feature: MA Experiment 20000794 PARAMETER Experiment Name: At_Petals_P Parameter: Age (day) Value: 23-25 days
  misc_feature: MA Experiment 20000794 PARAMETER Experiment Name: At_Petals_P Parameter: Plant Line Value: WS
  misc_feature: MA Experiment 20000794 PARAMETER Experiment Name: At_Petals_P Parameter: Tissue Value: Petals vs. Whole plant
  misc_feature: MA Experiment ID: 20001450 Result: Up-regulated in Transcription
  misc_feature: MA Experiment 20001450 PARAMETER Experiment Name: At_Far-red-induction_P Parameter: Age (day) Value: 7
  misc_feature: MA Experiment 20001450 PARAMETER Experiment Name: At_Far-red-induction_P Parameter: Light Value: Far-red vs. White
  misc_feature: MA Experiment 20001450 PARAMETER Experiment Name: At_Far-red-induction_P Parameter: Organism Value: A. thaliana
  misc_feature: MA Experiment 20001450 PARAMETER Experiment Name: At_Far-red-induction_P Parameter: Plant Line Value: Columbia
  misc_feature: MA Experiment 20001450 PARAMETER Experiment Name: At_Far-red-induction_P Parameter: Timepoint (hr) Value: 8
  misc_feature: MA Experiment 20001450 PARAMETER Experiment Name: At_Far-red-induction_P Parameter: Tissue Value: Whole Plant
  misc_feature: MA Experiment ID: 20001451 Result: Up-regulated in Transcription
  misc_feature: MA Experiment 20001451 PARAMETER Experiment Name: At_Far-red-induction_P Parameter: Age (day) Value: 7
  misc_feature: MA Experiment 20001451 PARAMETER Experiment Name: At_Far-red-induction_P Parameter: Light Value: Far-red vs. White
  misc_feature: MA Experiment 20001451 PARAMETER Experiment Name: At_Far-red-induction_P Parameter: Organism Value: A. thaliana
  misc_feature: MA Experiment 20001451 PARAMETER Experiment Name: At_Far-red-induction_P Parameter: Plant Line Value: Columbia
  misc_feature: MA Experiment 20001451 PARAMETER Experiment Name: At_Far-red-induction_P Parameter: Timepoint (hr) Value: 24
  misc_feature: MA Experiment 20001451 PARAMETER Experiment Name: At_Far-red-induction_P Parameter: Tissue Value: Whole Plant
  misc_feature: MA Experiment ID: 20001558 Result: Down-regulated in Transcription
  misc_feature: MA Experiment 20001558 PARAMETER Experiment Name: At_Drought_Soil_Dry_P Parameter: Age (day) Value: 27
  misc_feature: MA Experiment 20001558 PARAMETER Experiment Name: At_Drought_Soil_Dry_P Parameter: Organism Value: A. thaliana
  misc_feature: MA Experiment 20001558 PARAMETER Experiment Name: At_Drought_Soil_Dry_P Parameter: Plant Line Value: WS
  misc_feature: MA Experiment 20001558 PARAMETER Experiment Name: At_Drought_Soil_Dry_P Parameter: Post Timepoint (hr) Value: 6
  misc_feature: MA Experiment 20001558 PARAMETER Experiment Name: At_Drought_Soil_Dry_P Parameter: Post-Treatment Value: Re-Water vs. No Drought
  misc_feature: MA Experiment 20001558 PARAMETER Experiment Name: At_Drought_Soil_Dry_P Parameter: Timepoint (day) Value: 13
  misc_feature: MA Experiment 20001558 PARAMETER Experiment Name: At_Drought_Soil_Dry_P Parameter: Treatment Value: Drought vs. No Drought
  misc_feature: MA Experiment ID: 20001560 Result: Down-regulated in Transcription
  misc_feature: MA Experiment 20001560 PARAMETER Experiment Name: At_Drought_Soil_Dry_P Parameter: Age (day) Value: 28
  misc_feature: MA Experiment 20001560 PARAMETER Experiment Name: At_Drought_Soil_Dry_P Parameter: Organism Value: A. thaliana
  misc_feature: MA Experiment 20001560 PARAMETER Experiment Name: At_Drought_Soil_Dry_P Parameter: Plant Line Value: WS
  misc_feature: MA Experiment 20001560 PARAMETER Experiment Name: At_Drought_Soil_Dry_P Parameter: Post Timepoint (hr) Value: None
  misc_feature: MA Experiment 20001560 PARAMETER Experiment Name: At_Drought_Soil_Dry_P Parameter: Post-Treatment Value: None
  misc_feature: MA Experiment 20001560 PARAMETER Experiment Name: At_Drought_Soil_Dry_P Parameter: Timepoint (day) Value: 14
  misc_feature: MA Experiment 20001560 PARAMETER Experiment Name: At_Drought_Soil_Dry_P Parameter: Treatment Value: Drought vs. No Drought
cctctcacgttcgaagaccatttcttgttctttggacgaccatcggcgacagtgttaagtctagagtcttcttcttcttcggcgtagttttttccccggcttgaaaaatgggtctatccttcggaaagttgttcagcaagctctttgcaaagaaagagatgcgtatcctcatggtgggtctcgatgcagctggtaagactacgatcttgtacaagctcaagcttggagagatcgtgactacgattccaaccattggtttcaatgtggagactgtggaatacaagaacattagctttaccgtgtgggatgtcgggggtcaagacaagattcgtccattgtggaggcactacttccagaacactcagggacttatctttgtggtggacagcaatgatcgtgaccgtgttgtggaagccagagatgagcttcacagaatgttgaacgaagatgagttgagagatgctgtgcttctcgtttttgctaacaagcaagatcttccaaatgcgatgaacgccgctgagataaccgataagcttggacttcactctctccgtcaacgacactggtacatacagagcacatgtgctacctccggagaagggctttatgagggacttgactggctctctaacaacatcgcaaacaaggcttaggagaacaacgtgtggtttggtttttaatcgaggagagtcttgtcttcttccttctatcttttgttctttcgtctcaaactcttatcatttcatactctttgttcttcgctctaataatttacaagtttttttttttgttgcttttatcctataattcagactcttataaaatggggcccaatttcggcggatattcc

SEQ ID NO: 101357 - protein, 181 aa, Arabidopsis thaliana; identical to SEQ ID NO: 29669
  peptide (1)..(181): Ceres Seq. ID no. 13607638
  misc_feature (4)..(177): Pfam Name: ADP-ribosylation factor family Pfam Description: ADP-ribosylation factor family
  misc_feature (1)..(181): Homolog of NCBI NO: 15228723 NR Description: ADP-ribosylation factor [Arabidopsis thaliana]
  misc_feature (1)..(181): Homolog of NCBI NO: 25294169 NR Description: ADP-ribosylation factor [imported] - pepper
  misc_feature (1)..(181): Homolog of NCBI NO: 15226521 NR Description: ADP-ribosylation factor 1 (ARF1) [Arabidopsis
  misc_feature (1)..(180): Homolog of NCBI NO: 17154685 NR Description: ADP-ribosylation factor [Gossypium hirsutum]
  misc_feature (1)..(181): Homolog of NCBI NO: 30681825 NR Description: ADP-ribosylation factor, putative [Arabidopsis
  misc_feature (1)..(181): Homolog of NCBI NO: 15223164 NR Description: ADP-ribosylation factor 1 (ARF1), putative
  misc_feature (1)..(181): Homolog of NCBI NO: 1703380 NR Description: ADP-RIBOSYLATION FACTOR >gi|25294170|pir||T52341
  misc_feature (1)..(180): Homolog of NCBI NO: 6573751 NR Description: F20B24.7 [Arabidopsis thaliana]
  misc_feature (1)..(180): Homolog of NCBI NO: 25294174 NR Description: F5O8.5 protein - Arabidopsis thaliana
  misc_feature (1)..(181): Homolog of NCBI NO: 15241463 NR Description: ADP-ribosylation factor ARF1, putative

SEQ ID NO: 101358 - protein, 164 aa, Arabidopsis thaliana; identical to SEQ ID NO: 29670
  peptide (1)..(164): Ceres Seq. ID no. 13607639
  misc_feature (1)..(160): Pfam Name: ADP-ribosylation factor family Pfam Description: ADP-ribosylation factor family
  misc_feature (1)..(164): Homolog of NCBI NO: 15228723 NR Description: ADP-ribosylation factor [Arabidopsis thaliana]
  misc_feature (1)..(164): Homolog of NCBI NO: 25294169 NR Description: ADP-ribosylation factor [imported] - pepper
  misc_feature (1)..(164): Homolog of NCBI NO: 15226521 NR Description: ADP-ribosylation factor 1 (ARF1) [Arabidopsis
  misc_feature (1)..(163): Homolog of NCBI NO: 17154685 NR Description: ADP-ribosylation factor [Gossypium hirsutum]
  misc_feature (1)..(164): Homolog of NCBI NO: 30681825 NR Description: ADP-ribosylation factor, putative [Arabidopsis
  misc_feature (1)..(164): Homolog of NCBI NO: 15223164 NR Description: ADP-ribosylation factor 1 (ARF1), putative
  misc_feature (1)..(164): Homolog of NCBI NO: 1703380 NR Description: ADP-RIBOSYLATION FACTOR >gi|25294170|pir||T52341
  misc_feature (1)..(163): Homolog of NCBI NO: 6573751 NR Description: F20B24.7 [Arabidopsis thaliana]
  misc_feature (1)..(163): Homolog of NCBI NO: 25294174 NR Description: F5O8.5 protein - Arabidopsis thaliana
  misc_feature (1)..(164): Homolog of NCBI NO: 15241463 NR Description: ADP-ribosylation factor ARF1, putative

SEQ ID NO: 101359 - protein, 160 aa, Arabidopsis thaliana; identical to SEQ ID NO: 29671
  peptide (1)..(160): Ceres Seq. ID no. 13607640
  misc_feature (1)..(156): Pfam Name: ADP-ribosylation factor family Pfam Description: ADP-ribosylation factor family
  misc_feature (1)..(160): Homolog of NCBI NO: 15228723 NR Description: ADP-ribosylation factor [Arabidopsis thaliana]
  misc_feature (1)..(160): Homolog of NCBI NO: 25294169 NR Description: ADP-ribosylation factor [imported] - pepper
  misc_feature (1)..(160): Homolog of NCBI NO: 15226521 NR Description: ADP-ribosylation factor 1 (ARF1) [Arabidopsis
  misc_feature (1)..(159): Homolog of NCBI NO: 17154685 NR Description: ADP-ribosylation factor [Gossypium hirsutum]
  misc_feature (1)..(160): Homolog of NCBI NO: 30681825 NR Description: ADP-ribosylation factor, putative [Arabidopsis
  misc_feature (1)..(160): Homolog of NCBI NO: 15223164 NR Description: ADP-ribosylation factor 1 (ARF1), putative
  misc_feature (1)..(160): Homolog of NCBI NO: 1703380 NR Description: ADP-RIBOSYLATION FACTOR >gi|25294170|pir||T52341
  misc_feature (1)..(159): Homolog of NCBI NO: 6573751 NR Description: F20B24.7 [Arabidopsis thaliana]
  misc_feature (1)..(159): Homolog of NCBI NO: 25294174 NR Description: F5O8.5 protein - Arabidopsis thaliana
  misc_feature (1)..(160): Homolog of NCBI NO: 15241463 NR Description: ADP-ribosylation factor ARF1, putative

SEQ ID NO: 101360 - DNA, 636 bp, Arabidopsis thaliana
  misc_feature (1)..(636): Ceres Seq. ID no. 13607649
  misc_feature: MA Experiment ID: 108434 Result: Up-regulated in Transcription
  misc_feature: MA Experiment 108434 PARAMETER Experiment Name: At_Root_Tips_cDNA_P Parameter: Tissue Value: Root Tips
  misc_feature: MA Experiment ID: 108462 Result: Down-regulated in Transcription
  misc_feature: MA Experiment 108462 PARAMETER Experiment Name: At_Germinating_Seeds_cDNA_P Parameter: Age (day) Value: 2 vs. 0
  misc_feature: MA Experiment 108462 PARAMETER Experiment Name: At_Germinating_Seeds_cDNA_P Parameter: Tissue Value: Germinating Seeds
  misc_feature: MA Experiment ID: 108463 Result: Down-regulated in Transcription
  misc_feature: MA Experiment 108463 PARAMETER Experiment Name: At_Germinating_Seeds_cDNA_P Parameter: Age (day) Value: 3 vs. 0
  misc_feature: MA Experiment 108463 PARAMETER Experiment Name: At_Germinating_Seeds_cDNA_P Parameter: Tissue Value: Germinating Seeds
  misc_feature: MA Experiment ID: 108464 Result: Down-regulated in Transcription
  misc_feature: MA Experiment 108464 PARAMETER Experiment Name: At_Germinating_Seeds_cDNA_P Parameter: Age (day) Value: 4 vs. 0
  misc_feature: MA Experiment 108464 PARAMETER Experiment Name: At_Germinating_Seeds_cDNA_P Parameter: Tissue Value: Germinating Seeds
  misc_feature: MA Experiment ID: 20000090 Result: Up-regulated in Transcription
  misc_feature: MA Experiment ID: 20000111 Result: Up-regulated in Transcription
  misc_feature: MA Experiment 20000111 PARAMETER Experiment Name: At_42deg_Heat_cDNA_P Parameter: Temperature (deg C) Value: 42 vs. 22
  misc_feature: MA Experiment 20000111 PARAMETER Experiment Name: At_42deg_Heat_cDNA_P Parameter: Timepoint (hr) Value: 6
  misc_feature: MA Experiment 20000111 PARAMETER Experiment Name: At_42deg_Heat_cDNA_P Parameter: Tissue Value: Aerial
  misc_feature: MA Experiment ID: 20000113 Result: Up-regulated in Transcription
  misc_feature: MA Experiment 20000113 PARAMETER Experiment Name: At_42deg_Heat_cDNA_P Parameter: Temperature (deg C) Value: 42 vs. 22
  misc_feature: MA Experiment 20000113 PARAMETER Experiment Name: At_42deg_Heat_cDNA_P Parameter: Timepoint (hr) Value: 8
  misc_feature: MA Experiment 20000113 PARAMETER Experiment Name: At_42deg_Heat_cDNA_P Parameter: Tissue Value: Aerial
  misc_feature: MA Experiment ID: 20000173 Result: Up-regulated in Transcription
  misc_feature: MA Experiment 20000173 PARAMETER Experiment Name: At_42deg_Heat_P Parameter: Age (day) Value: 14
  misc_feature: MA Experiment 20000173 PARAMETER Experiment Name: At_42deg_Heat_P Parameter: Organism Value: A. thaliana
  misc_feature: MA Experiment 20000173 PARAMETER Experiment Name: At_42deg_Heat_P Parameter: Plant Line Value: WS
  misc_feature: MA Experiment 20000173 PARAMETER Experiment Name: At_42deg_Heat_P Parameter: Temperature (deg C) Value: 42 vs. 22
  misc_feature: MA Experiment 20000173 PARAMETER Experiment Name: At_42deg_Heat_P Parameter: Timepoint (hr) Value: 6
  misc_feature: MA Experiment 20000173 PARAMETER Experiment Name: At_42deg_Heat_P Parameter: Tissue Value: Aerial
  misc_feature: MA Experiment ID: 20000224 Result: Down-regulated in Transcription
tctcgagtacacctcatcattcttcttcgtgtgagagagatctttttggaaaacgaaagcgggatttagcgtatagcagcttccaccgtttcgccgaatttcatcgagcttcaagtgaacatgagtaaaccaatggaagaggataccaaccagggaaagactgaggaggaggagttcaacactggaccactctctgttttgatgatgagtgttaagaataacactcaggtgttgatcaattgccgtaacaacaggaaactccttggccgagttagggcttttgacaggcactgcaacatggttcttgaaaatgtcagagaaatgtggactgaggttccgaaaaccggaaaaggaaagaagaaagctcttcctgttaacagagatcgattcatcagcaagatgttcctgcgtggagactcagtcattatcgtcctcaggaaccccaagtgaaagaagctcttcttatgataattctcgcttcttcttgtcaaatcctaattgttgcatcaacagtgagaacatgttttgattatgagccttaaatctactagtgttgccttgtatttttcacttgtcttctatctttgacttgaaacgcagccagtgaactttgtaatatcaaaagagaagttcttt

SEQ ID NO: 101361 - protein, 109 aa, Arabidopsis thaliana; identical to SEQ ID NO: 22047
  peptide (1)..(109): Ceres Seq. ID no. 13607650
  misc_feature (27)..(106): Pfam Name: LSM domain Pfam Description: LSM domain
  misc_feature (1)..(109): Homolog of NCBI NO: 18407411 NR Description: small nuclear ribonucleo protein D2 -related thaliana] >gi|20196966|gb|AAM14847.1| putative small nuclear D2 [Arabidopsis thaliana] >gi|20197310|gb|AAC63620.2| putative
  misc_feature (1)..(109): Homolog of NCBI NO: 30690747 NR Description: small nuclear ribonucleo protein D2 -related
  misc_feature (5)..(109): Homolog of NCBI NO: 21554692 NR Description: small nuclear ribonucleoprotein-like protein
  misc_feature (1)..(108): Homolog of NCBI NO: 4759158 NR Description: small nuclear ribonucleoprotein polypeptide D2; core protein D2 [Homo sapiens] >gi|20821553|ref|XP_133225.1| nuclear ribonucleoprotein D2 [Mus musculus]
  misc_feature (1)..(109): Homolog of NCBI NO: 31230450 NR Description: ENSANGP00000002741 [Anopheles gambiae]
  misc_feature (1)..(108): Homolog of NCBI NO: 26337731 NR Description: unnamed protein product [Mus musculus]
  misc_feature (3)..(108): Homolog of NCBI NO: 21357623 NR Description: CG1249-PA [Drosophila melanogaster]
  misc_feature (1)..(108): Homolog of NCBI NO: 22203734 NR Description: small nuclear ribonucleoprotein D2-like protein
  misc_feature (1)..(108): Homolog of NCBI NO: 27677236 NR Description: similar to Small nuclear ribonucleoprotein Sm D2
  misc_feature (1)..(108): Homolog of NCBI NO: 34881247 NR Description: similar to SNF2/RAD54 family protein [Rattus

SEQ ID NO: 101362 - protein, 105 aa, Arabidopsis thaliana; identical to SEQ ID NO: 22048
  peptide (1)..(105): Ceres Seq. ID no. 13607651
  misc_feature (23)..(102): Pfam Name: LSM domain Pfam Description: LSM domain
  misc_feature (1)..(105): Homolog of NCBI NO: 18407411 NR Description: small nuclear ribonucleo protein D2 -related thaliana] >gi|20196966|gb|AAM14847.1| putative small nuclear D2 [Arabidopsis thaliana] >gi|20197310|gb|AAC63620.2| putative
  misc_feature (1)..(105): Homolog of NCBI NO: 30690747 NR Description: small nuclear ribonucleo protein D2 -related
  misc_feature (1)..(105): Homolog of NCBI NO: 21554692 NR Description: small nuclear ribonucleoprotein-like protein
  misc_feature (1)..(104): Homolog of NCBI NO: 4759158 NR Description: small nuclear ribonucleoprotein polypeptide D2; core protein D2 [Homo sapiens] >gi|20821553|ref|XP_133225.1| nuclear ribonucleoprotein D2 [Mus musculus]
  misc_feature (1)..(105): Homolog of NCBI NO: 31230450 NR Description: ENSANGP00000002741 [Anopheles gambiae]
  misc_feature (1)..(104): Homolog of NCBI NO: 26337731 NR Description: unnamed protein product [Mus musculus]
  misc_feature (1)..(104): Homolog of NCBI NO: 21357623 NR Description: CG1249-PA [Drosophila melanogaster]
  misc_feature (1)..(104): Homolog of NCBI NO: 22203734 NR Description: small nuclear ribonucleoprotein D2-like protein
  misc_feature (1)..(104): Homolog of NCBI NO: 27677236 NR Description: similar to Small nuclear ribonucleoprotein Sm D2
  misc_feature (1)..(104): Homolog of NCBI NO: 34881247 NR Description: similar to SNF2/RAD54 family protein [Rattus

SEQ ID NO: 101363 - protein, 82 aa, Arabidopsis thaliana; identical to SEQ ID NO: 22049
  peptide (1)..(82): Ceres Seq. ID no. 13607652
  misc_feature (1)..(79): Pfam Name: LSM domain Pfam Description: LSM domain
  misc_feature (1)..(82): Homolog of NCBI NO: 18407411 NR Description: small nuclear ribonucleo protein D2 -related thaliana] >gi|20196966|gb|AAM14847.1| putative small nuclear D2 [Arabidopsis thaliana] >gi|20197310|gb|AAC63620.2| putative
  misc_feature (1)..(82): Homolog of NCBI NO: 30690747 NR Description: small nuclear ribonucleo protein D2 -related
  misc_feature (1)..(82): Homolog of NCBI NO: 21554692 NR Description: small nuclear ribonucleoprotein-like protein
  misc_feature (1)..(81): Homolog of NCBI NO: 4759158 NR Description: small nuclear ribonucleoprotein polypeptide D2; core protein D2 [Homo sapiens] >gi|20821553|ref|XP_133225.1| nuclear ribonucleoprotein D2 [Mus musculus]
  misc_feature (1)..(82): Homolog of NCBI NO: 31230450 NR Description: ENSANGP00000002741 [Anopheles gambiae]
  misc_feature (1)..(81): Homolog of NCBI NO: 26337731 NR Description: unnamed protein product [Mus musculus]
  misc_feature (1)..(81): Homolog of NCBI NO: 21357623 NR Description: CG1249-PA [Drosophila melanogaster]
  misc_feature (1)..(81): Homolog of NCBI NO: 22203734 NR Description: small nuclear ribonucleoprotein D2-like protein
  misc_feature (1)..(81): Homolog of NCBI NO: 27677236 NR Description: similar to Small nuclear ribonucleoprotein Sm D2
  misc_feature (1)..(81): Homolog of NCBI NO: 34881247 NR Description: similar to SNF2/RAD54 family protein [Rattus
